United States Patent Application Publication US 2023/0026259 A1 - sequence listing, part 21

SEQ ID NO: 97882 - protein, 216 aa, Homo sapiens
  Payload ID: 19522
  Gene Name: WW domain binding protein 2
  ENSP ID: ENSP00000415251
MALNKNHSEGGGVIVNNTESILMSYDHVELTFNDMKNVPEAFKGTKKGTVYLTPYRVIFLSKGKDAMQSFMMPFYLMKDCEIKQPVFGANYIKGTVKAEAGGGWEGSASYKLTFTAGGAIEFGQRMLQVASQEFYPGPPMMDGAMGYVQPPPPPYPGPMEPPVSGPDVPSTPAAEAKAAEAAASAYYNPGNPHNVYMPTSQPPPPPYYPPEDKKTQ

SEQ ID NO: 97883 - protein, 167 aa, Homo sapiens
  Payload ID: 19522
  Gene Name: WW domain binding protein 2
  ENSP ID: ENSP00000464768
MSYDHVELTFNDMKNVPEAFKGTKKGTVYLTPYRVIFLSKGKDAMQSFMMPFYLMKDCEIKQPVFGANYIKGTVKAEAGGGWEGSASYKLTFTAGGAIEFGQRMLQVASQASRGEVPSGAYGYSYMPSGAYVYPPPVANGMYPCPPGYPYPPPPPEFYPGPPMMDGA

SEQ ID NO: 97884 - protein, 205 aa, Homo sapiens
  Payload ID: 19522
  Gene Name: WW domain binding protein 2
  ENSP ID: ENSP00000464782
  MOD_RES (1)..(1): Any amino acid
XGWEGSASYKLTFTAGGAIEFGQRMLQVASQASRGEVPSGAYGYSYMPSGAYVYPPPVANGMYPCPPGYPYPPPPPEFYPGPPMMDGAMGYVQPPPPPYPGPMEPPVSGPDVPSTPAAEAKAAEAAASAYYNPGNPHNVYMPTSQPPPPPYYPPEDKKTQRSFLTGTRECMSVHLVAAGWGREQGPLTLCAGRDLPPAPQPASSP

SEQ ID NO: 97885 - protein, 114 aa, Homo sapiens
  Payload ID: 19522
  Gene Name: WW domain binding protein 2
  ENSP ID: ENSP00000464820
MKDCEIKQPVFGANYIKGTVKAEAGGGWEGSASYKLTFTAGGAIEFGQRMLQVASQASRGEVPSGAYGYSYMPSGAYVYPPPVANGMYPCPPGYPYPPPPPGPPMMDGAMGYVQ

SEQ ID NO: 97886 - protein, 35 aa, Homo sapiens
  Payload ID: 19522
  Gene Name: WW domain binding protein 2
  ENSP ID: ENSP00000465052
MALNKNHSEGGGVIVNNTERLEKQTSKNRTSITRT

SEQ ID NO: 97887 - protein, 257 aa, Homo sapiens
  Payload ID: 19522
  Gene Name: WW domain binding protein 2
  ENSP ID: ENSP00000466450
MALNKNHSEGGGVIVNNTESILMSYDHVELTFNDMKNVPEAFKGTKKGTVYLTPYRVIFLSKGKDAMQSFMMPFYLMKDCEIKQPVFGANYIKGTVKAEAGGGWEGSASYKLTFTAGGAIEFGQRMLQVASQASRGEVPSGAYGYSYMPSGAYVYPPPVANGMYPCPPGYPYPPPPPGPPMMDGAMGYVQPPPPPYPGPMEPPVSGPDVPSTPAAEAKAAEAAASAYYNPGNPHNVYMPTSQPPPPPYYPPEDKKTQ

SEQ ID NO: 97888 - protein, 231 aa, Homo sapiens
  Payload ID: 19522
  Gene Name: WW domain binding protein 2
  ENSP ID: ENSP00000466999
MALNKNHSEGGGVIVNNTESILMSYDHVELTFNDMKNVPEAFKGTKKGTVYLTPYRVIFLSKGKDAMQSFMMPFYLMKDCEIKQPVFGANYIKGTVKAEAGGGWEGSASYKLTFTAGGAIEFGQRMLQVASQASRGEVPSGAYGYSYMPSGAYVYPPPVANGMYPCPPGYPYPPPPPEFYPGPPMMDGAMGYVQPPPPPYPGPMEPPVSGPDVPSTPAEPAAATSLLPTGR

SEQ ID NO: 97889 - protein, 261 aa, Homo sapiens; identical to SEQ ID NO: 97881
  Payload ID: 19522
  Gene Name: WW domain binding protein 2
  Uniprot ID: Q969T9
  ENSP ID: ENSP00000467579

SEQ ID NO: 97890 - protein, 239 aa, Homo sapiens
  Payload ID: 19522
  Gene Name: WW domain binding protein 2
  ENSP ID: ENSP00000467583
MSYDHVELTFNDMKNVPEAFKGTKKGTVYLTPYRVIFLSKGKDAMQSFMMPFYLMKDCEIKQPVFGANYIKGTVKAEAGGGWEGSASYKLTFTAGGAIEFGQRMLQVASQASRGEVPSGAYGYSYMPSGAYVYPPPVANGMYPCPPGYPYPPPPPEFYPGPPMMDGAMGYVQPPPPPYPGPMEPPVSGPDVPSTPAAEAKAAEAAASAYYNPGNPHNVYMPTSQPPPPPYYPPEDKKTQ

SEQ ID NO: 97891 - protein, 152 aa, Homo sapiens
  Payload ID: 19522
  Gene Name: WW domain binding protein 2
  ENSP ID: ENSP00000468793
MQSFMMPFYLMKDCEIKQPVFGANYIKGTVKAEAGGGWEGSASYKLTFTAGGAIEFGQRMLQVASQASRGEVPSGAYGYSYMPSGAYVYPPPVANGMYPCPPGYPYPPPPPEFYPGPPMMDGAMGYVQPPPPPYPGPMEPPVSGPDVPSTPA

SEQ ID NO: 97892 - protein, 231 aa, Homo sapiens; identical to SEQ ID NO: 97888
  Payload ID: 19522
  Gene Name: WW domain binding protein 2
  ENSP ID: ENSP00000486675

SEQ ID NO: 97893 - protein, 376 aa, Homo sapiens
  Payload ID: 19523
  Gene Name: WW domain binding protein 4
  Uniprot ID: O75554
  ENSP ID: ENSP00000368801
MADYWKSQPKKFCDYCKCWIADNRPSVEFHERGKNHKENVAKRISEIKQKSLDKAKEEEKASKEFAAMEAAALKAYQEDLKRLGLESEILEPSITPVTSTIPPTSTSNQQKEKKEKKKRKKDPSKGRWVEGITSEGYHYYYDLISGASQWEKPEGFQGDLKKTAVKTVWVEGLSEDGFTYYYNTETGESRWEKPDDFIPHTSDLPSSKVNENSLGTLDESKSSDSHSDSDGEQEAEEGGVSTETEKPKIKFKEKNKNSDGGSDPETQKEKSIQKQNSLGSNEEKSKTLKKSNPYGEWQEIKQEVESHEEVDLELPSTENEYVSTSEADGGGEPKVVFKEKTVTSLGVMADGVAPVFKKRRTENGKSRNLRQRGDDQ

SEQ ID NO: 97894 - protein, 104 aa, Homo sapiens
  Payload ID: 19524
  Gene Name: WW domain binding protein 5
  Uniprot ID: Q9UHQ7
  ENSP ID: ENSP00000361740
MKSCQKMEGKPENESEPKHEEEPKPEEKPEEEEKLEEEAKAKGTFRERLIQSLQEFKEDIHNRHLSNEDMFREVDEIDEIRRVRNKLIVMRWKVNRNHPYPYLM

SEQ ID NO: 97895 - protein, 104 aa, Homo sapiens; identical to SEQ ID NO: 97894
  Payload ID: 19524
  Gene Name: WW domain binding protein 5
  Uniprot ID: Q9UHQ7
  ENSP ID: ENSP00000361745

SEQ ID NO: 97896 - protein, 544 aa, Homo sapiens
  Payload ID: 19525
  Gene Name: WW domain containing adaptor with coiled-coil
  Uniprot ID: Q9BTA9
  ENSP ID: ENSP00000311106
MVMYARKQQRLSDGCHDRRGDSQPYQALKYSSKSHPSSGDHRHEKMRDAGDPSPPNKMLRRSDSPENKYSDSTGHSKAKNVHTHRVRERDGGTSYSPQENSHNHSALHSSNSHSSNPSNNPSKTSDAPYDSADDWSEHISSSGKKYYYNCRTEVSQWEKPKEWLEREQRQKEANKMAVNSFPKDRDYRREVMQATATSGFASGKSTSGDKPVSHSCTTPSTSSASGLNPTSAPPTSASAVPVSPVPQSPIPPLLQDPNLLRQLLPALQATLQLNNSNVDISKINEVLTAAVTQASLQSIIHKFLTAGPSAFNITSLISQAAQLSTQAQPSNQSPMSLTSDASSPRSYVSPRISTPQTNTVPIKPLISTPPVSSQPKVSTPVVKQGPVSQSATQQPVTADKQQGHEPVSPRSLQRSSSQRSPSPGPNHTSNSSNASNATVVPQNSSARSTCSLTPALAAHFSENLIKHVQGWPADHAEKQASRLREEAHNMGTIHMSEICTELKNLRSLVRVCEIQATLREQRILFLRQQIKELEKLKNQNSFMV

SEQ ID NO: 97897 - protein, 647 aa, Homo sapiens
  Payload ID: 19525
  Gene Name: WW domain containing adaptor with coiled-coil
  Uniprot ID: Q9BTA9
  ENSP ID: ENSP00000346986
MVMYARKQQRLSDGCHDRRGDSQPYQALKYSSKSHPSSGDHRHEKMRDAGDPSPPNKMLRRSDSPENKYSDSTGHSKAKNVHTHRVRERDGGTSYSPQENSHNHSALHSSNSHSSNPSNNPSKTSDAPYDSADDWSEHISSSGKKYYYNCRTEVSQWEKPKEWLEREQRQKEANKMAVNSFPKDRDYRREVMQATATSGFASGMEDKHSSDASSLLPQNILSQTSRHNDRDYRLPRAETHSSSTPVQHPIKPVVHPTATPSTVPSSPFTLQSDHQPKKSFDANGASTLSKLPTPTSSVPAQKTERKESTSGDKPVSHSCTTPSTSSASGLNPTSAPPTSASAVPVSPVPQSPIPPLLQDPNLLRQLLPALQATLQLNNSNVDISKINEVLTAAVTQASLQSIIHKFLTAGPSAFNITSLISQAAQLSTQAQPSNQSPMSLTSDASSPRSYVSPRISTPQTNTVPIKPLISTPPVSSQPKVSTPVVKQGPVSQSATQQPVTADKQQGHEPVSPRSLQRSSSQRSPSPGPNHTSNSSNASNATVVPQNSSARSTCSLTPALAAHFSENLIKHVQGWPADHAEKQASRLREEAHNMGTIHMSEICTELKNLRSLVRVCEIQATLREQRILFLRQQIKELEKLKNQNSFMV

SEQ ID NO: 97898 - protein, 495 aa, Homo sapiens
  Payload ID: 19525
  Gene Name: WW domain containing adaptor with coiled-coil
  ENSP ID: ENSP00000364797
MRDAGDPSPPNKMLRRSDSPENKYSDSTGHSKAKNVHTHRVRERDGGTSYSPQENSHNHSALHSSNSHSSNPSNNPSKTSDAPYDSADDWSEHISSSGKKYYYNCRTEVSQWEKPKEWLEREQRQKEANKMAVNSFPKDRDYRREVMQATATSGFASGKSTSGDKPVSHSCTTPSTSSASGLNPTSAPPTSASAVPVSPVPQSPIPPLLQDPNLLRQLLPALQATLQLNNSNVDISKINEAVTQASLQSIIHKFLTAGPSAFNITSLISQAAQLSTQAQPSNQSPMSLTSDASSPRSYVSPRISTPQTNTVPIKPLISTPPVSSQPKVSTPVVKQGPVSQSATQQPVTADKQQGHEPVSPRSLQRSSSQRSPSPGPNHTSNSSNASNATVVPQNSSARSTCSLTPALAAHFSENLIKHVQGWPADHAEKQASRLREEAHNMGTIHMSEICTELKNLRSLVRVCEIQATLREQRILFLRQQIKELEKLKNQNSFMV

SEQ ID NO: 97899 - protein, 602 aa, Homo sapiens
  Payload ID: 19525
  Gene Name: WW domain containing adaptor with coiled-coil
  Uniprot ID: Q9BTA9
  ENSP ID: ENSP00000364816
MRDAGDPSPPNKMLRRSDSPENKYSDSTGHSKAKNVHTHRVRERDGGTSYSPQENSHNHSALHSSNSHSSNPSNNPSKTSDAPYDSADDWSEHISSSGKKYYYNCRTEVSQWEKPKEWLEREQRQKEANKMAVNSFPKDRDYRREVMQATATSGFASGMEDKHSSDASSLLPQNILSQTSRHNDRDYRLPRAETHSSSTPVQHPIKPVVHPTATPSTVPSSPFTLQSDHQPKKSFDANGASTLSKLPTPTSSVPAQKTERKESTSGDKPVSHSCTTPSTSSASGLNPTSAPPTSASAVPVSPVPQSPIPPLLQDPNLLRQLLPALQATLQLNNSNVDISKINEVLTAAVTQASLQSIIHKFLTAGPSAFNITSLISQAAQLSTQAQPSNQSPMSLTSDASSPRSYVSPRISTPQTNTVPIKPLISTPPVSSQPKVSTPVVKQGPVSQSATQQPVTADKQQGHEPVSPRSLQRSSSQRSPSPGPNHTSNSSNASNATVVPQNSSARSTCSLTPALAAHFSENLIKHVQGWPADHAEKQASRLREEAHNMGTIHMSEICTELKNLRSLVRVCEIQATLREQRILFLRQQIKELEKLKNQNSFMV

SEQ ID NO: 97900 - protein, 59 aa, Homo sapiens
  Payload ID: 19525
  Gene Name: WW domain containing adaptor with coiled-coil
  ENSP ID: ENSP00000395008
MRDAGDPSPPNKMLRRSDSPENKYSDSTGHSKAKNVHTHRVRERDGGTSYSPQENSHNH

SEQ ID NO: 97901 - protein, 148 aa, Homo sapiens
  Payload ID: 19525
  Gene Name: WW domain containing adaptor with coiled-coil
  ENSP ID: ENSP00000399706
MKRCETPEILHHQIKCCGDLIVLKTNTVTAQVTVRPKMCILTELERGMVGPVTLHKKIHTTTVLFIVQIHILLIQAITQAKLQMHLMILQMTGLSILALLGKSTTTIVEQKFHNGKNQKSGLKENRDKKKQTRWQSTASQKIGITEER

SEQ ID NO: 97902 - protein, 173 aa, Homo sapiens
  Payload ID: 19525
  Gene Name: WW domain containing adaptor with coiled-coil
  ENSP ID: ENSP00000400848
MRDAGDPSPPNKMLRRSDSPENKYSDSTGHSKAKNVHTHRVRERDGGTSYSPQENSHNHSALHSSNSHSSNPSNNPSKTSDAPYDSADDWSEHISSSGKKYYYNCRTEVSQWEKPKEWLEREQRQKEANKMAVNSFPKDRDYRREVMQATATSGFASGMEDKHSSDASSLLPQ

SEQ ID NO: 97903 - protein, 34 aa, Homo sapiens
  Payload ID: 19525
  Gene Name: WW domain containing adaptor with coiled-coil
  ENSP ID: ENSP00000404125
MVMYARKQQRLSDGCHDRRGDSQPYQVTGGSSLI

SEQ ID NO: 97904 - protein, 204 aa, Homo sapiens
  Payload ID: 19525
  Gene Name: WW domain containing adaptor with coiled-coil
  ENSP ID: ENSP00000404758
MRDAGDPSPPNKMLRRSDSPENKYSDSTGHSKAKNVHTHRVRERDGGTSYSPQENSHNHSALHSSNSHSSNPSNNPSKTSDAPYDSADDWSEHISSSGKKYYYNCRTEVSQWEKPKEWLEREQRQKEANKMAVNSFPKDRDYRREVMQATATSGFASGMEDKHSSDASSLLPQNILSQTSRHNDRDYRLPRAETHSSSTPVQHP

SEQ ID NO: 97905 - protein, 233 aa, Homo sapiens
  Payload ID: 19525
  Gene Name: WW domain containing adaptor with coiled-coil
  ENSP ID: ENSP00000415645
MRDAGDPSPPNKMLRRSDSPENKYSDSTGHSKAKNVHTHRVRERDGGTSYSPQENSHNHSALHSSNSHSSNPSNNPSKTSDAPYDSADDWSEHISSSGKKYYYNCRTEVSQWEKPKEWLEREQRQKEANKMAVNSFPKDRDYRREVMQATATSGFASGMEDKHSSDASSLLPQNILSQTSRHNDRDYRLPRAETHSSSTPVQHPIKPVVHPTATPSTVPSSPFTLQSDHQPKK

SEQ ID NO: 97906 - protein, 436 aa, Homo sapiens
  Payload ID: 19525
  Gene Name: WW domain containing adaptor with coiled-coil
  Uniprot ID: Q9BTA9
  ENSP ID: ENSP00000415727
MRDAGDPSPPNKMLRRSDSPENKYSDSTGHSKAKNVHTHRVRERDGGTSYSPQENSHNHSALHSSNSHSSNPSNNPSKTSDAPYDSADDWSEHISSSGKKYYYNCRTEVSQWEKPKEWLEREQRQKEANKMAVNSFPKDRDYRREVMQATATSGFASGMEDKHSSDASSLLPQNILSQTSRHNDRDYRLPRAETHSSSTPVQHPIKPVVHPTATPSTVPSSPFTLQSDHQPKKSFDANGASTLSKLPTPTSSVPAQKTERKESTSGDKPVSHSCTTPSTSSASGLNPTSAPPTSASAVPVSPVPQSPIPPLLQDPNLLRQLLPALQATLQLNNSNVDISKINEVLTAAVTQASLQSIIHKFLTAGPSAFNITSLISQAAQLSTQDIPLHEGIQMERDTHRSKWEVKGSLCQKADKQQECLVWNGSIMVQRLLQPSG

SEQ ID NO: 97907 - protein, 36 aa, Homo sapiens
  Payload ID: 19525
  Gene Name: WW domain containing adaptor with coiled-coil
  ENSP ID: ENSP00000434903
MRDAGDPSPPNKMLRRSDSPENKYSDSTGHSKAKNV

SEQ ID NO: 97908 - protein, 148 aa, Homo sapiens; identical to SEQ ID NO: 97901
  Payload ID: 19525
  Gene Name: WW domain containing adaptor with coiled-coil
  ENSP ID: ENSP00000486994

SEQ ID NO: 97909 - protein, 922 aa, Homo sapiens
  Payload ID: 19526
  Gene Name: WW domain containing E3 ubiquitin protein ligase 1
  Uniprot ID: Q9H0M0
  ENSP ID: ENSP00000265428
MATASPRSDTSNNHSGRLQLQVTVSSAKLKRKKNWFGTAIYTEVVVDGEITKTAKSSSSSNPKWDEQLTVNVTPQTTLEFQVWSHRTLKADALLGKATIDLKQALLIHNRKLERVKEQLKLSLENKNGIAQTGELTVVLDGLVIEQENITNCSSSPTIEIQENGDALHENGEPSARTTARLAVEGTNGIDNHVPTSTLVQNSCCSYVVNGDNTPSSPSQVAARPKNTPAPKPLASEPADDTVNGESSSFAPTDNASVTGTPVVSEENALSPNCTSTTVEDPPVQEILTSSENNECIPSTSAELESEARSILEPDTSNSRSSSAFEAAKSRQPDGCMDPVRQQSGNANTETLPSGWEQRKDPHGRTYYVDHNTRTTTWERPQPLPPGWERRVDDRRRVYYVDHNTRTTTWQRPTMESVRNFEQWQSQRNQLQGAMQQFNQRYLYSASMLAAENDPYGPLPPGWEKRVDSTDRVYFVNHNTKTTQWEDPRTQGLQNEEPLPEGWEIRYTREGVRYFVDHNTRTTTFKDPRNGKSSVTKGGPQIAYERGFRWKLAHFRYLCQSNALPSHVKINVSRQTLFEDSFQQIMALKPYDLRRRLYVIFRGEEGLDYGGLAREWFFLLSHEVLNPMYCLFEYAGKNNYCLQINPASTINPDHLSYFCFIGRFIAMALFHGKFIDTGFSLPFYKRMLSKKLTIKDLESIDTEFYNSLIWIRDNNIEECGLEMYFSVDMEILGKVTSHDLKLGGSNILVTEENKDEYIGLMTEWRFSRGVQEQTKAFLDGFNEVVPLQWLQYFDEKELEVMLCGMQEVDLADWQRNTVYRHYTRNSKQIIWFWQFVKETDNEVRMRLLQFVTGTCRLPLGGFAELMGSNGPQKFCIEKVGKDTWLPRSHTCFNRLDLPPYKSYEQLKEKLLFAIEETEGFGQE

SEQ ID NO: 97910 - protein, 922 aa, Homo sapiens; identical to SEQ ID NO: 97909
  Payload ID: 19526
  Gene Name: WW domain containing E3 ubiquitin protein ligase 1
  Uniprot ID: Q9H0M0
  ENSP ID: ENSP00000427793

SEQ ID NO: 97911 - protein, 232 aa, Homo sapiens
  Payload ID: 19526
  Gene Name: WW domain containing E3 ubiquitin protein ligase 1
  ENSP ID: ENSP00000429076
  MOD_RES (1)..(1): Any amino acid
XGGPQIAYERGFRWKLAHFRYLCQSNALPSHVKINVSRQTLFEDSFQQIMALKPYDLRRRLYVIFRGEEGLDYGGLARNILRSSLMSGKFSSIMSLNIFSVPFVPFFFRNISHGEWFFLLSHEVLNPMYCLFEYAGKNNYCLQINPASTINPDHLSYFCFIGRFIAMALFHGKFIDTGFSLPFYKRMLSKKLTIKDLESIDTEFYNSLIWIRDNNIEECGLEMYFSVDMEIL

SEQ ID NO: 97912 - protein, 55 aa, Homo sapiens
  Payload ID: 19526
  Gene Name: WW domain containing E3 ubiquitin protein ligase 1
  ENSP ID: ENSP00000430228
VKETDNEVRMRLLQFVTGTCRLPLGGFAELMGSNGPQKFCIEKVGKDTWLPRSHT

SEQ ID NO: 97913 - protein, 754 aa, Homo sapiens
  Payload ID: 19527
  Gene Name: WW domain containing E3 ubiquitin protein ligase 2
  Uniprot ID: O00308
  ENSP ID: ENSP00000348283
MQLTLNLQTENKGSVVSGGELTIFLDGPTVDLGNVPNGSALTDGSQLPSRDSSGTAVAPENRHQPPSTNCFGGRSRTHRHSGASARTTPATGEQSPGARSRHRQPVKNSGHSGLANGTVNDEPTTATDPEEPSVVGVTSPPAAPLSVTPNPNTTSLPAPATPAEGEEPSTSGTQQLPAAAQAPDALPAGWEQRELPNGRVYYVDHNTKTTTWERPLPPGWEKRTDPRGRFYYVDHNTRTTTWQRPTAEYVRNYEQWQSQRNQLQGAMQHFSQRFLYQSSSASTDHDPLGPLPPGWEKRQDNGRVYYVNHNTRTTQWEDPRTQGMIQEPALPPGWEMKYTSEGVRYFVDHNTRTTTFKDPRPGFESGTKQGSPGAYDRSFRWKYHQFRFLCHSNALPSHVKISVSRQTLFEDSFQQIMNMKPYDLRRRLYIIMRGEEGLDYGGIAREWFFLLSHEVLNPMYCLFEYAGKNNYCLQINPASSINPDHLTYFRFIGRFIAMALYHGKFIDTGFTLPFYKRMLNKRPTLKDLESIDPEFYNSIVWIKENNLEECGLELYFIQDMEILGKVTTHELKEGGESIRVTEENKEEYIMLLTDWRFTRGVEEQTKAFLDGFNEVAPLEWLRYFDEKELELMLCGMQEIDMSDWQKSTIYRHYTKNSKQIQWFWQVVKEMDNEKRIRLLQFVTGTCRLPVGGFAELIGSNGPQKFCIDKVGKETWLPRSHTCFNRLDLPPYKSYEQLREKLLYAIEETEGFGQE

SEQ ID NO: 97914 - protein, 870 aa, Homo sapiens
  Payload ID: 19527
  Gene Name: WW domain containing E3 ubiquitin protein ligase 2
  Uniprot ID: O00308
  ENSP ID: ENSP00000352069
MASASSSRAGVALPFEKSQLTLKVVSAKPKVHNRQPRINSYVEVAVDGLPSETKKTGKRIGSSELLWNEIIILNVTAQSHLDLKVWSCHTLRNELLGTASVNLSNVLKNNGGKMENMQLTLNLQTENKGSVVSGGELTIFLDGPTVDLGNVPNGSALTDGSQLPSRDSSGTAVAPENRHQPPSTNCFGGRSRTHRHSGASARTTPATGEQSPGARSRHRQPVKNSGHSGLANGTVNDEPTTATDPEEPSVVGVTSPPAAPLSVTPNPNTTSLPAPATPAEGEEPSTSGTQQLPAAAQAPDALPAGWEQRELPNGRVYYVDHNTKTTTWERPLPPGWEKRTDPRGRFYYVDHNTRTTTWQRPTAEYVRNYEQWQSQRNQLQGAMQHFSQRFLYQSSSASTDHDPLGPLPPGWEKRQDNGRVYYVNHNTRTTQWEDPRTQGMIQEPALPPGWEMKYTSEGVRYFVDHNTRTTTFKDPRPGFESGTKQGSPGAYDRSFRWKYHQFRFLCHSNALPSHVKISVSRQTLFEDSFQQIMNMKPYDLRRRLYIIMRGEEGLDYGGIAREWFFLLSHEVLNPMYCLFEYAGKNNYCLQINPASSINPDHLTYFRFIGRFIAMALYHGKFIDTGFTLPFYKRMLNKRPTLKDLESIDPEFYNSIVWIKENNLEECGLELYFIQDMEILGKVTTHELKEGGESIRVTEENKEEYIMLLTDWRFTRGVEEQTKAFLDGFNEVAPLEWLRYFDEKELELMLCGMQEIDMSDWQKSTIYRHYTKNSKQIQWFWQVVKEMDNEKRIRLLQFVTGTCRLPVGGFAELIGSNGPQKFCIDKVGKETWLPRSHTCFNRLDLPPYKSYEQLREKLLYAIEETEGFGQE

SEQ ID NO: 97915 - protein, 335 aa, Homo sapiens
  Payload ID: 19527
  Gene Name: WW domain containing E3 ubiquitin protein ligase 2
  Uniprot ID: O00308
  ENSP ID: ENSP00000455311
MASASSSRAGVALPFEKSQLTLKVVSAKPKVHNRQPRINSYVEVAVDGLPSETKKTGKRIGSSELLWNEIIILNVTAQSHLDLKVWSCHTLRNELLGTASVNLSNVLKNNGGKMENMQLTLNLQTENKGSVVSGGELTIFLDGPTVDLGNVPNGSALTDGSQLPSRDSSGTAVAPENRHQPPSTNCFGGRSRTHRHSGASARTTPATGEQSPGARSRHRQPVKNSGHSGLANGTVNDEPTTATDPEEPSVVGVTSPPAAPLSVTPNPNTTSLPAPATPAEGEEPSTSGTQQLPAAAQAPDALPAGWEQRELPNGRVYYVDHNTKTTTWERPLPPG

SEQ ID NO: 97916 - protein, 61 aa, Homo sapiens
  Payload ID: 19527
  Gene Name: WW domain containing E3 ubiquitin protein ligase 2
  ENSP ID: ENSP00000455347
MASASSSRAGVALPFEKSQLTLKVVSAKPKVHNRQPRINSYVEVAVDGLPSETKKTGKRIG

SEQ ID NO: 97917 - protein, 431 aa, Homo sapiens
  Payload ID: 19527
  Gene Name: WW domain containing E3 ubiquitin protein ligase 2
  Uniprot ID: O00308
  ENSP ID: ENSP00000456216
MIQEPALPPGWEMKYTSEGVRYFVDHNTRTTTFKDPRPGFESGTKQGSPGAYDRSFRWKYHQFRFLCHSNALPSHVKISVSRQTLFEDSFQQIMNMKPYDLRRRLYIIMRGEEGLDYGGIAREWFFLLSHEVLNPMYCLFEYAGKNNYCLQINPASSINPDHLTYFRFIGRFIAMALYHGKFIDTGFTLPFYKRMLNKRPTLKDLESIDPEFYNSIVWIKENNLEECGLELYFIQDMEILGKVTTHELKEGGESIRVTEENKEEYIMLLTDWRFTRGVEEQTKAFLDGFNEVAPLEWLRYFDEKELELMLCGMQEIDMSDWQKSTIYRHYTKNSKQIQWFWQVVKEMDNEKRIRLLQFVTGTCRLPVGGFAELIGSNGPQKFCIDKVGKETWLPRSHTCFNRLDLPPYKSYEQLREKLLYAIEETEGFGQE

SEQ ID NO: 97918 - protein, 107 aa, Homo sapiens
  Payload ID: 19527
  Gene Name: WW domain containing E3 ubiquitin protein ligase 2
  ENSP ID: ENSP00000456451
MASASSSRAGVALPFEKSQLTLKVVSAKPKVHNRQPRINSYVEVAVDGLPSETKKTGKRIGSSELLWNEIIILNVTAQSHLDLKVWSCHTLRNELLGTASVNLSNVL

SEQ ID NO: 97919 - protein, 116 aa, Homo sapiens
  Payload ID: 19527
  Gene Name: WW domain containing E3 ubiquitin protein ligase 2
  ENSP ID: ENSP00000456582
MASASSSRAGVALPFEKSQLTLKVVSAKPKVHNRQPRINSYVEVAVDGLPSETKKTGKRIGSSELLWNEIIILNVTAQSHLDLKVWSCHTLRNELLGTASVNLSNVLKNNGGKSTF

SEQ ID NO: 97920 - protein, 189 aa, Homo sapiens
  Payload ID: 19528
  Gene Name: WW domain containing oxidoreductase
  Uniprot ID: Q9NZC7
  ENSP ID: ENSP00000348119
MAALRYAGLDDTDSEDELPPGWEERTTKDGWVYYANHTEEKTQWEHPKTGKRKRVAGDLPYGWEQETDENGQVFFVDHINKRTTYLDPRLAFTVDDNPTKPTTRQRYDGSTTAMEILQGRDFTGKVVVVTGANSGIGFETAKSFALHGAHVILACRNMARASEAVSRILEEWKTKYHPPPEKCRIKIFH

SEQ ID NO: 97921 - protein, 311 aa, Homo sapiens
  Payload ID: 19528
  Gene Name: WW domain containing oxidoreductase
  Uniprot ID: Q9NZC7
  ENSP ID: ENSP00000384238
MAALRYAGLDDTDSEDELPPGWEERTTKDGWVYYANHTEEKTQWEHPKTGKRKRVAGDLPYGWEQETDENGQVFFVDHINKRTTYLDPRLAFTVDDNPTKPTTRQRYDGSTTAMEILQGRDFTGKVVVVTGANSGIATGSCHHRVLCCCPRTGGSGRDVLQQLLPLHALTRSSERRDGPDPVGAQREADPRTAWQPVRLSGAQSGWAHTPALCVSPHASARAGPLPNVPPTQIRKSKGNKSSHNRVKNLKYQWEAGNSWGKVSLFWGWARHRSLCFLVVACLKVKTCLVCRFRISLEKHQQFSFFYCYRIA

SEQ ID NO: 97922 - protein, 234 aa, Homo sapiens
  Payload ID: 19528
  Gene Name: WW domain containing oxidoreductase
  Uniprot ID: Q9NZC7
  ENSP ID: ENSP00000384495
MAALRYAGLDDTDSEDELPPGWEERTTKDGWVYYANHTEEKTQWEHPKTGKRKRVAGDLPYGWEQETDENGQVFFVDHINKRTTYLDPRLAFTVDDNPTKPTTRQRYDGSTTAMEILQGRDFTGKVVVVTGANSGIGFETAKSFALHGAHVILACRNMARASEAVSRILEEWQQGAATTVYCAAVPELEGLGGMYFNNCCRCMPSPEAQSEETARTLWALSERLIQERLGSQSG

SEQ ID NO: 97923 - protein, 363 aa, Homo sapiens
  Payload ID: 19528
  Gene Name: WW domain containing oxidoreductase
  Uniprot ID: Q9NZC7
  ENSP ID: ENSP00000386161
MAALRYAGLDDTDSEDELPPGWEERTTKDGWVYYANHTEEKTQWEHPKTGKRKRVAGDLPYGWEQETDENGQVFFVDHINKRTTYLDPRLAFTVDDNPTKPTTRQRYDGSTTAMEILQGRDFTGKVVVVTGANSGIGFETAKSFALHGAHVILACRNMARASEAVSRILEEWHKAKVEAMTLDLALLRSVQHFAEAFKAKNVPLHVLVCNAATFALPWSLTKDGLETTFQVNHLGHFYLVQLLQDVLCRSAPARVIVVSSESHRFTDINDSLGKLDFSRLSPTKNDYWAMLAYNRSKLCNILFSNELHRRLSPRGVTSNAVHPGNMMYSNIHRSWWVYTLLFTLARPFTKSMVSDCLVEGGHF

SEQ ID NO: 97924 - protein, 213 aa, Homo sapiens
  Payload ID: 19528
  Gene Name: WW domain containing oxidoreductase
  ENSP ID: ENSP00000445210
MAALRYAGLDDTDSEDELPPGWEERTTKDGWVYYANHTEEKTQWEHPKTGKRKRVAGDLPYGWEQETDENGQVFFVDHINKRTTYLDPRLAFTVDDNPTKPTTRQRYDGSTTAMEILQGRDFTGKVVVVTGANSGIGKASCHVGRILKHTRVEELSLLPTAINRELPPPCTVLLSQNWRVWEGCTSTTAAAACPHQKLRAKRRPGPCGRSARG

SEQ ID NO: 97925 - protein, 45 aa, Homo sapiens
  Payload ID: 19528
  Gene Name: WW domain containing oxidoreductase
  ENSP ID: ENSP00000454331
MAALRYAGLDDTDSEDELPPGWEERTTKDGWVYYAKFAIRMGTRN

SEQ ID NO: 97926 - protein, 36 aa, Homo sapiens
  Payload ID: 19528
  Gene Name: WW domain containing oxidoreductase
  Uniprot ID: Q9NZC7
  ENSP ID: ENSP00000454485
MAALRYAGLDDTDSEDELPPGWEERTTKDGWVYYAK

SEQ ID NO: 97927 - protein, 45 aa, Homo sapiens; identical to SEQ ID NO: 97925
  Payload ID: 19528
  Gene Name: WW domain containing oxidoreductase
  ENSP ID: ENSP00000454788

SEQ ID NO: 97928 - protein, 414 aa, Homo sapiens
  Payload ID: 19528
  Gene Name: WW domain containing oxidoreductase
  Uniprot ID: Q9NZC7
  ENSP ID: ENSP00000457230
MAALRYAGLDDTDSEDELPPGWEERTTKDGWVYYANHTEEKTQWEHPKTGKRKRVAGDLPYGWEQETDENGQVFFVDHINKRTTYLDPRLAFTVDDNPTKPTTRQRYDGSTTAMEILQGRDFTGKVVVVTGANSGIGFETAKSFALHGAHVILACRNMARASEAVSRILEEWHKAKVEAMTLDLALLRSVQHFAEAFKAKNVPLHVLVCNAATFALPWSLTKDGLETTFQVNHLGHFYLVQLLQDVLCRSAPARVIVVSSESHRFTDINDSLGKLDFSRLSPTKNDYWAMLAYNRSKLCNILFSNELHRRLSPRGVTSNAVHPGNMMYSNIHRSWWVYTLLFTLARPFTKSMQQGAATTVYCAAVPELEGLGGMYFNNCCRCMPSPEAQSEETARTLWALSERLIQERLGSQSG

SEQ ID NO: 97929 - protein, 150 aa, Homo sapiens
  Payload ID: 19528
  Gene Name: WW domain containing oxidoreductase
  ENSP ID: ENSP00000482648
PLHVLVCNAATFALPWSLTKDGLETTFQVNHLGHFYLVQLLQDVLCRSAPARVIVVSSESHRFTDINDSLGKLDFSRLSPTKNDYWAMLAYNRSKLCNILFSNELHRRLSPRGVTSNAVHPGNMMYSNIHRSWWVYTLLFTLARPFTKSM

SEQ ID NO: 97930 - protein, 45 aa, Homo sapiens; identical to SEQ ID NO: 97925
  Payload ID: 19528
  Gene Name: WW domain containing oxidoreductase
  ENSP ID: ENSP00000485925

SEQ ID NO: 97931 - protein, 400 aa, Homo sapiens
  Payload ID: 19529
  Gene Name: WW domain containing transcription regulator 1
  Uniprot ID: Q9GZV5
  ENSP ID: ENSP00000353847
MNPASAPPPLPPPGQQVIHVTQDLDTDLEALFNSVMNPKPSSWRKKILPESFFKEPDSGSHSRQSSTDSSGGHPGPRLAGGAQHVRSHSSPASLQLGTGAGAAGSPAQQHAHLRQQSYDVTDELPLPPGWEMTFTATGQRYFLNHIEKITTWQDPRKAMNQPLNHMNLHPAVSSTPVPQRSMAVSQPNLVMNHQHQQQMAPSTLSQQNHPTQNPPAGLMSMPNALTTQQQQQQKLRLQRIQMERERIRMRQEELMRQEAALCRQLPMEAETLAPVQAAVNPPTMTPDMRSITNNSSDPFLNGGPYHSREQSTDSGLGLGCYSVPTTPEDFLSNVDEMDTGENAGQTPMNINPQQTRFPDFLDCLPGTNVDLGTLESEDLIPLFNDVESALNKSEPFLTWL

SEQ ID NO: 97932 - protein, 247 aa, Homo sapiens
  Payload ID: 19529
  Gene Name: WW domain containing transcription regulator 1
  ENSP ID: ENSP00000417339
MLHIEKITTWQDPRKAMNQPLNHMNLHPAVSSTPVPQRSMAVSQPNLVMNHQHQQQMAPSTLSQQNHPTQNPPAGLMSMPNALTTQQQQQQKLRLQRIQMERERIRMRQEELMRQEAALCRQLPMEAETLAPVQAAVNPPTMTPDMRSITNNSSDPFLNGGPYHSREQSTDSGLGLGCYSVPTTPEDFLSNVDEMDTGENAGQTPMNINPQQTRFPDFLDCLPGTNVDLGTLESEDLIPLFNDVESA

SEQ ID NO: 97933 - protein, 29 aa, Homo sapiens
  Payload ID: 19529
  Gene Name: WW domain containing transcription regulator 1
  ENSP ID: ENSP00000417862
  MOD_RES (1)..(1): Any amino acid
XMLILGGCGTWGVVLHHRSCPLSTAPHGS

SEQ ID NO: 97934 - protein, 21 aa, Homo sapiens
  Payload ID: 19529
  Gene Name: WW domain containing transcription regulator 1
  ENSP ID: ENSP00000417984
MNPASAPPPLPPPGQQVIHVT

SEQ ID NO: 97935 - protein, 189 aa, Homo sapiens
  Payload ID: 19529
  Gene Name: WW domain containing transcription regulator 1
  ENSP ID: ENSP00000418580
MNPASAPPPLPPPGQQVIHVTQDLDTDLEALFNSVMNPKPSSWRKKILPESFFKEPDSGSHSRQSSTDSSGGHPGPRLAGGAQHVRSHSSPASLQLGTGAGAAGSPAQQHAHLRQQSYDVTDELPLPPGWEMTFTATGQRYFLNHIEKITTWQDPRKAMNQPLNHMNLHPAVSSTPVPQRSMAVSQPNL

SEQ ID NO: 97936 - protein, 42 aa, Homo sapiens
  Payload ID: 19529
  Gene Name: WW domain containing transcription regulator 1
  ENSP ID: ENSP00000418621
  MOD_RES (1)..(1): Any amino acid
XHSRELSWRKGPSMLGKLPSVDSSPWKLRLLPQFRLLSTHPR

SEQ ID NO: 97937 - protein, 400 aa, Homo sapiens; identical to SEQ ID NO: 97931
  Payload ID: 19529
  Gene Name: WW domain containing transcription regulator 1
  Uniprot ID: Q9GZV5
  ENSP ID: ENSP00000419234

SEQ ID NO: 97938 - protein, 400 aa, Homo sapiens; identical to SEQ ID NO: 97931
  Payload ID: 19529
  Gene Name: WW domain containing transcription regulator 1
  Uniprot ID: Q9GZV5
  ENSP ID: ENSP00000419465

SEQ ID NO: 97939 - protein, 138 aa, Homo sapiens
  Payload ID: 19529
  Gene Name: WW domain containing transcription regulator 1
  ENSP ID: ENSP00000420120
MNPASAPPPLPPPGQQVIHVTQDLDTDLEALFNSVMNPKPSSWRKKILPESFFKEPDSGSHSRQSSTDSSGGHPGPRLAGGAQHVRSHSSPASLQLGTGAGAAGSPAQQHAHLRQQSYDVTDELPLPPGWEMTFTATG

SEQ ID NO: 97940 - protein, 109 aa, Homo sapiens
  Payload ID: 19529
  Gene Name: WW domain containing transcription regulator 1
  ENSP ID: ENSP00000420159
MNPASAPPPLPPPGQQVIHVTQDLDTDLEALFNSVMNPKPSSWRKKILPESFFKEPDSGSHSRQSSTDSSGGHPGPRLAGGAQHVRSHSSPASLQLGTGAGAAGSPAQQ

SEQ ID NO: 97941 - protein, 1092 aa, Homo sapiens
  Payload ID: 19530
  Gene Name: WWC family member 3
  Uniprot ID: Q9ULE0
  ENSP ID: ENSP00000370242
MDHINKLTQIEDPREQWRREQERMLKEYLIVAQEALNAKKEIYQIKQQRFELAQEEYQQLHKMCEDDSRSYASSFSGYSTNTKYDPHQIKAEIASRRDRLSRLKRELTQMKQELQYKEKGVETLQEIDRKMSSTHTSYKLDEAQAIMSELRTIKKAICTGEKERRDLMHSLAKLTDSFKNSCSVTDSLVDFPHHVGVPGDAGVPQQFCDAGSQTDIIGEFVFDDKTRLVDRVRLNWQYEEARKRVANIQQQLARLDNESWPSTAEADRDRLQLIKEKEALLQELQLIIAQRRSAGDVARLEEERERLEEELRRARATSAQGATERILLQEKRNCLLMQLEEATRLTSYLQSQLKSLCASTLTVSSGSSRGSLASSRGSLASSRGSLSSVSFTDIYGLPQYEKPDAEGSQLLRFDLIPFDSLGRDAPFSEPPGPSGFHKQRRSLDTPQSLASLSSRSSLSSLSPPSSPLDTPFLPASRDSPLAQLADSCEGPGLGALDRLRAHASAMGDEDLPGMAALQPHGVPGDGEGPHERGPPPASAPVGGTVTLREDSAKRLERRARRISACLSDYSLASDSGVFEPLTKRNEDAEEPAYGDTASNGDPQIHVGLLRDSGSECLLVHVLQLKNPAGLAVKEDCKVHIRVYLPPLDSGTPNTYCSKALEFQVPLVFNEVFRIPVHSSALTLKSLQLYVCSVTPQLQEELLGIAQINLADYDSLSEMQLRWHSVQVFTSSEPSRTREAGCAGESSARDPAHTISISGKTDAVTVLLARTTAQLQAVERELAEERAKLEYTEEEVLEMERKEEQAEAISERSWQADSVDSGCSNCTQTSPPYPEPCCMGIDSILGHPFAAQAGPYSPEKFQPSPLKVDKETNTEDLFLEEAASLVKERPSRRARGSPFVRSGTIVRSQTFSPGARSQYVCRLYRSDSDSSTLPRKSPFVRNTLERRTLRYKQSCRSSLAELMARTSLDLELDLQASRTRQRQLNEELCALRELRQRLEDAQLRGQTDLPPWVLRDERLRGLLREAERQTRQTKLDYRHEQAAEKMLKKASKEIYQLRGQSHKEPIQVQTFREKIAFFTRPRINIPPLPADDV

SEQ ID NO: 97942 - protein, 1216 aa, Homo sapiens
  Payload ID: 19530
  Gene Name: WWC family member 3
  ENSP ID: ENSP00000399584
MPWLSGGRRRRRGQPREAPREPPPSAQPQREPPPAPPAAVPTPPAPSAPPPRARESAELPLPAGWEEARDYDGRVFYIDHNTRQTSWIDPRDRITKPLTFADCVGDELPLGWETVYDKQIGVYYMDHINKLTQIEDPREQWRREQERMLKEYLIVAQEALNAKKEIYQIKQQRFELAQEEYQQLHKMCEDDSRSYASSFSGYSTNTKYDPHQIKAEIASRRDRLSRLKRELTQMKQELQYKEKGVETLQEIDRKMSSTHTSYKLDEAQAIMSELRTIKKAICTGEKERRDLMHSLAKLTDSFKNSCSVTDSLVDFPHHVGVPGDAGVPQQFCDAGSQTDIIGEFVFDDKTRLVDRVRLNWQYEEARKRVANIQQQLARLDNESWPSTAEADRDRLQLIKEKEALLQELQLIIAQRRSAGDVARLEEERERLEEELRRARATSAQGATERILLQEKRNCLLMQLEEATRLTSYLQSQLKSLCASTLTVSSGSSRGSLASSRGSLASSRGSLSSVSFTDIYGLPQYEKPDAEGSQLLRFDLIPFDSLGRDAPFSEPPGPSGFHKQRRSLDTPQSLASLSSRSSLSSLSPPSSPLDTPFLPASRDSPLAQLADSCEGPGLGALDRLRAHASAMGDEDLPGMAALQPHGVPGDGEGPHERGPPPASAPVGGTVTLREDSAKRLERRARRISACLSDYSLASDSGVFEPLTKRNEDAEEPAYGDTASNGDPQIHVGLLRDSGSECLLVHVLQLKNPAGLAVKEDCKVHIRVYLPPLDSGTPNTYCSKALEFQVPLVFNEVFRIPVHSSALTLKSLQLYVCSVTPQLQEELLGIAQINLADYDSLSEMQLRWHSVQVFTSSEPSRTREAGCAGESSARDPAHTISISGKTDAVTVLLARTTAQLQAVERELAEERAKLEYTEEEVLEMERKEEQAEAISERSWQADSVDSGCSNCTQTSPPYPEPCCMGIDSILGHPFAAQAGPYSPEKFQPSPLKVDKETNTEDLFLEEAASLVKERPSRRARGSPFVRSGTIVRSQTFSPGARSQYVCRLYRSDSDSSTLPRKSPFVRNTLERRTLRYKQSCRSSLAELMARTSLDLELDLQASRTRQRQLNEELCALRELRQRLEDAQLRGQTDLPPWVLRDERLRGLLREAERQTRQTKLDYRHEQAAEKMLKKASKEIYQLRGQSHKEPIQVQTFREKIAFFTRPRINIPPLPADDV

SEQ ID NO: 97943 - protein, 69 aa, Homo sapiens
  Payload ID: 19531
  Gene Name: X antigen family, member 1A
  Uniprot ID: Q9HD64
  ENSP ID: ENSP00000364750
MESPKKKNQQLKVGILHLGSRQKKIRIQLRSQVLGREMRDMEGDLQELHQSNTGDKSGFGFRRQGEDNT

SEQ ID NO: 97944 - protein, 81 aa, Homo sapiens
  Payload ID: 19531
  Gene Name: X antigen family, member 1A
  Uniprot ID: Q9HD64
  ENSP ID: ENSP00000364752
MESPKKKNQQLKVGILHLGSRQKKIRIQLRSQCATWKVICKSCISQTPGINLDLGSGVKVKIIPKEEHCKMPEAGEEQPQV

SEQ ID NO: 97945 - protein, 69 aa, Homo sapiens; identical to SEQ ID NO: 97943
  Payload ID: 19532
  Gene Name: X antigen family, member 1B
  Uniprot ID: Q9HD64
  ENSP ID: ENSP00000364763

SEQ ID NO: 97946 - protein, 81 aa, Homo sapiens; identical to SEQ ID NO: 97944
  Payload ID: 19532
  Gene Name: X antigen family, member 1B
  Uniprot ID: Q9HD64
  ENSP ID: ENSP00000364766

SEQ ID NO: 97947 - protein, 81 aa, Homo sapiens; identical to SEQ ID NO: 97944
  Payload ID: 19532
  Gene Name: X antigen family, member 1B
  Uniprot ID: Q9HD64
  ENSP ID: ENSP00000430130

SEQ ID NO: 97948 - protein, 111 aa, Homo sapiens
  Payload ID: 19533
  Gene Name: X antigen family, member 2
  Uniprot ID: Q96GT9
  ENSP ID: ENSP00000286049
MSWRGRSTYRPRPRRSLQPPELIGAMLEPTDEEPKEEKPPTKSRNPTPDQKREDDQGAAEIQVPDLEADLQELCQTKTGDGCEGGTDVKGKILPKAEHFKMPEAGEGKSQV

SEQ ID NO: 97949 - protein, 111 aa, Homo sapiens
  Payload ID: 19534
  Gene Name: X antigen family, member 3
  Uniprot ID: Q8WTP9
  ENSP ID: ENSP00000303061
MIWRGRSTYRPRPRRSVPPPELIGPMLEPGDEEPQQEEPPTESRDPAPGQEREEDQGAAETQVPDLEADLQELSQSKTGGECGNGPDDQGKILPKSEQFKMPEGGDRQPQV

SEQ ID NO: 97950 - protein, 111 aa, Homo sapiens; identical to SEQ ID NO: 97949
  Payload ID: 19534
  Gene Name: X antigen family, member 3
  Uniprot ID: Q8WTP9
  ENSP ID: ENSP00000364640

SEQ ID NO: 97951 - protein, 108 aa, Homo sapiens
  Payload ID: 19535
  Gene Name: X antigen family, member 5
  Uniprot ID: Q8WWM1
  ENSP ID: ENSP00000342240
MSWRGRRYRPRRCLRLAQLVGPMLEPSVPEPQQEEPPTESQDHTPGQKREDDQGAAEIQVPNLEADLQELSQSKTGDECGDSPDVQGKILPKSEQFKMPEGGEGKPQL

SEQ ID NO: 97952 - protein, 108 aa, Homo sapiens; identical to SEQ ID NO: 97951
  Payload ID: 19535
  Gene Name: X antigen family, member 5
  Uniprot ID: Q8WWM1
  ENSP ID: ENSP00000364651

SEQ ID NO: 97953 - protein, 75 aa, Homo sapiens
  Payload ID: 19535
  Gene Name: X antigen family, member 5
  ENSP ID: ENSP00000364653
MSWRGRRYRPRRCLRLAQLVGPMLEPSVPEPQQEEPPTESQDHTPGQKREDDQGAAEIQGTSILAQDKTQFSETG

SEQ ID NO: 97954 - protein, 1333 aa, Homo sapiens
  Payload ID: 19536
  Gene Name: xanthine dehydrogenase
  Uniprot ID: P47989
  ENSP ID: ENSP00000368727
MTADKLVFFVNGRKVVEKNADPETTLLAYLRRKLGLSGTKLGCGEGGCGACTVMLSKYDRLQNKIVHFSANACLAPICSLHHVAVTTVEGIGSTKTRLHPVQERIAKSHGSQCGFCTPGIVMSMYTLLRNQPEPTMEEIENAFQGNLCRCTGYRPILQGFRTFARDGGCCGGDGNNPNCCMNQKKDHSVSLSPSLFKPEEFTPLDPTQEPIFPPELLRLKDTPRKQLRFEGERVTWIQASTLKELLDLKAQHPDAKLVVGNTEIGIEMKFKNMLFPMIVCPAWIPELNSVEHGPDGISFGAACPLSIVEKTLVDAVAKLPAQKTEVFRGVLEQLRWFAGKQVKSVASVGGNIITASPISDLNPVFMASGAKLTLVSRGTRRTVQMDHTFFPGYRKTLLSPEEILLSIEIPYSREGEYFSAFKQASRREDDIAKVTSGMRVLFKPGTTEVQELALCYGGMANRTISALKTTQRQLSKLWKEELLQDVCAGLAEELHLPPDAPGGMVDFRCTLTLSFFFKFYLTVLQKLGQENLEDKCGKLDPTFASATLLFQKDPPADVQLFQEVPKGQSEEDMVGRPLPHLAADMQASGEAVYCDDIPRYENELSLRLVTSTRAHAKIKSIDTSEAKKVPGFVCFISADDVPGSNITGICNDETVFAKDKVTCVGHIIGAVVADTPEHTQRAAQGVKITYEELPAIITIEDAIKNNSFYGPELKIEKGDLKKGFSEADNVVSGEIYIGGQEHFYLETHCTIAVPKGEAGEMELFVSTQNTMKTQSFVAKMLGVPANRIVVRVKRMGGGFGGKETRSTVVSTAVALAAYKTGRPVRCMLDRDEDMLITGGRHPFLARYKVGFMKTGTVVALEVDHFSNVGNTQDLSQSIMERALFHMDNCYKIPNIRGTGRLCKTNLPSNTAFRGFGGPQGMLIAECWMSEVAVTCGMPAEEVRRKNLYKEGDLTHFNQKLEGFTLPRCWEECLASSQYHARKSEVDKFNKENCWKKRGLCIIPTKFGISFTVPFLNQAGALLHVYTDGSVLLTHGGTEMGQGLHTKMVQVASRALKIPTSKIYISETSTNTVPNTSPTAASVSADLNGQAVYAACQTILKRLEPYKKKNPSGSWEDWVTAAYMDTVSLSATGFYRTPNLGYSFETNSGNPFHYFSYGVACSEVEIDCLTGDHKNLRTDIVMDVGSSLNPAIDIGQVEGAFVQGLGLFTLEELHYSPEGSLHTRGPSTYKIPAFGSIPIEFRVSLLRDCPNKKAIYASKAVGEPPLFLAASIFFAIKDAIRAARAQHTGNNVKELFRLDSPATPEKIRNACVDKFTTLCVTGVPENCKPWSVRV

SEQ ID NO: 97955 - protein, 261 aa, Homo sapiens
  Payload ID: 19537
  Gene Name: X-box binding protein 1
  Uniprot ID: P17861
  ENSP ID: ENSP00000216037
MVVVAAAPNPADGTPKVLLLSGQPASAAGAPAGQALPLMVPAQRGASPEAASGGLPQARKRQRLTHLSPEEKALRRKLKNRVAAQTARDRKKARMSELEQQVVDLEEENQKLLLENQLLREKTHGLVVENQELRQRLGMDALVAEEEAEAKGNEVRPVAGSAESAALRLRAPLQQVQAQLSPLQNISPWILAVLTLQIQSLISCWAFWTTWTQSCSSNALPQSLPAWRSSQRSTQKDPVPYQPPFLCQWGRHQPSWKPLMN

SEQ ID NO: 97956 - protein, 376 aa, Homo sapiens
  Payload ID: 19537
  Gene Name: X-box binding protein 1
  Uniprot ID: P17861
  ENSP ID: ENSP00000343155
MVVVAAAPNPADGTPKVLLLSGQPASAAGAPAGQALPLMVPAQRGASPEAASGGLPQARKRQRLTHLSPEEKALRRKLKNRVAAQTARDRKKARMSELEQQVVDLEEENQKLLLENQLLREKTHGLVVENQELRQRLGMDALVAEEEAEAKGNEVRPVAGSAESAAGAGPVVTPPEHLPMDSGGIDSSDSESDILLGILDNLDPVMFFKCPSPEPASLEELPEVYPEGPSSLPASLSLSVGTSSAKLEAINELIRFDHIYTKPLVLEIPSETESQANVVVKIEEAPLSPSENDHPEFIVSVKEEPVEDDLVPELGISNLLSSSHCPKPSSCLLDAYSDCGYGGSLSPFSDMSSLLGVNHSWEDTFANELFPQLISV

SEQ ID NO: 97957 - protein, 211 aa, Homo sapiens
  Payload ID: 19537
  Gene Name: X-box binding protein 1
  ENSP ID: ENSP00000384295
MRAPVFQALLLCGRRLVVQPLNSDMRKLKNRVAAQTARDRKKARMSELEQQVVDLEEENQKLLLENQLLREKTHGLVVENQELRQRLGMDALVAEEEAEAKGNEVRPVAGSAESAALRLRAPLQQVQAQLSPLQNISPWILAVLTLQIQSLISCWAFWTTWTQSCSSNALPQSLPAWRSSQRSTQKDPVPYQPPFLCQWGRHQPSWKPLMN

SEQ ID NO: 97958 - protein, 266 aa, Homo sapiens
  Payload ID: 19537
  Gene Name: X-box binding protein 1
  ENSP ID: ENSP00000385162
MVVVAAAPNPADGTPKVLLLSGQPASAAGAPAGQALPLMVPAQRGASPEAASGGLPQARKRQRLTHLSPEEKALRRKLKNRVAAQTARDRKKARMSELEQQVVDLEEEVKLLKNQKLLLENQLLREKTHGLVVENQELRQRLGMDALVAEEEAEAKGNEVRPVAGSAESAALRLRAPLQQVQAQLSPLQNISPWILAVLTLQIQSLISCWAFWTTWTQSCSSNALPQSLPAWRSSQRSTQKDPVPYQPPFLCQWGRHQPSWKPLMN

SEQ ID NO: 97959 - protein, 376 aa, Homo sapiens; identical to SEQ ID NO: 97956
  Payload ID: 19537
  Gene Name: X-box binding protein 1
  Uniprot ID: P17861
  ENSP ID: ENSP00000481170

SEQ ID NO: 97960 - protein, 631 aa, Homo sapiens
  Payload ID: 19538
  Gene Name: xenotropic and polytropic retrovirus receptor 1
  Uniprot ID: Q9UBH6
  ENSP ID: ENSP00000356561
MKFAEHLSAHITPEWRKQYIQYEAFKDMLYSAQDQAPSVEVTDEDTVKRYFAKFEEKFFQTCEKELAKINTFYSEKLAEAQRRFATLQNELQSSLDAQKESTGVTTLRQRRKPVFHLSHEERVQHRNIKDLKLAFSEFYLSLILLQNYQNLNFTGFRKILKKHDKILETSRGADWRVAHVEVAPFYTCKKINQLISETEAVVTNELEDGDRQKAMKRLRVPPLGAAQPAPAWTTFRVGLFCGIFIVLNITLVLAAVFKLETDRSIWPLIRIYRGGFLLIEFLFLLGINTYGWRQAGVNHVLIFELNPRSNLSHQHLFEIAGFLGILWCLSLLACFFAPISVIPTYVYPLALYGFMVFFLINPTKTFYYKSRFWLLKLLFRVFTAPFHKVGFADFWLADQLNSLSVILMDLEYMICFYSLELKWDESKGLLPNNSEERGHSDTMVFFYLWIVFYIISSCYTLIWDLKMDWGLFDKNAGENTFLREEIVYPQKAYYYCAIIEDVILRFAWTIQISITSTTLLPHSGDIIATVFAPLEVFRRFVWNFFRLENEHLNNCGEFRAVRDISVAPLNADDQTLLEQMMDQDDGVRNRQKNRSWKYNQSISLRRPRLASQSKARDTKVLIEDTDDEANT

SEQ ID NO: 97961 - protein, 696 aa, Homo sapiens
  Payload ID: 19538
  Gene Name: xenotropic and polytropic retrovirus receptor 1
  Uniprot ID: Q9UBH6
  ENSP ID: ENSP00000356562
MKFAEHLSAHITPEWRKQYIQYEAFKDMLYSAQDQAPSVEVTDEDTVKRYFAKFEEKFFQTCEKELAKINTFYSEKLAEAQRRFATLQNELQSSLDAQKESTGVTTLRQRRKPVFHLSHEERVQHRNIKDLKLAFSEFYLSLILLQNYQNLNFTGFRKILKKHDKILETSRGADWRVAHVEVAPFYTCKKINQLISETEAVVTNELEDGDRQKAMKRLRVPPLGAAQPAPAWTTFRVGLFCGIFIVLNITLVLAAVFKLETDRSIWPLIRIYRGGFLLIEFLFLLGINTYGWRQAGVNHVLIFELNPRSNLSHQHLFEIAGFLGILWCLSLLACFFAPISVIPTYVYPLALYGFMVFFLINPTKTFYYKSRFWLLKLLFRVFTAPFHKVGFADFWLADQLNSLSVILMDLEYMICFYSLELKWDESKGLLPNNSEESGICHKYTYGVRAIVQCIPAWLRFIQCLRRYRDTKRAFPHLVNAGKYSTTFFMVTFAALYSTHKERGHSDTMVFFYLWIVFYIISSCYTLIWDLKMDWGLFDKNAGENTFLREEIVYPQKAYYYCAIIEDVILRFAWTIQISITSTTLLPHSGDIIATVFAPLEVFRRFVWNFFRLENEHLNNCGEFRAVRDISVAPLNADDQTLLEQMMDQDDGVRNRQKNRSWKYNQSISLRRPRLASQSKARDTKVLIEDTDDEANT

SEQ ID NO: 97962 - protein, 273 aa, Homo sapiens
  Payload ID: 19539
  Gene Name: xeroderma pigmentosum, complementation group A
  Uniprot ID: P23025
  ENSP ID: ENSP00000364270
MAAADGALPEAAALEQPAELPASVRASIERKRQRALMLRQARLAARPYSATAAAATGGMANVKAAPKIIDTGGGFILEEEEEEEQKIGKVVHQPGPVMEFDYVICEECGKEFMDSYLMNHFDLPTCDNCRDADDKHKLITKTEAKQEYLLKDCDLEKREPPLKFIVKKNPHHSQWGDMKLYLKLQIVKRSLEVWGSQEALEEAKEVRQENREKMKQKKFDKKVKELRRAVRSSVWKRETIVHQHEYGPEENLEDDMYRKTCTMCGHELTYEKM

SEQ ID NO: 97963 - protein, 264 aa, Homo sapiens
  Payload ID: 19539
  Gene Name: xeroderma pigmentosum, complementation group A
  ENSP ID: ENSP00000433006
MAAADGALPEAAALEQPAELPASVRASIERKRQRALMLRQARLAARPYSATAAAATGGMANVKAAPKIIDTGGGFILEEEEEEEQKIGKVVHQPGPVMEFDYVICEECGKEFMDSYLMNHFDLPTCDNCRDADDKHKLITKTEAKQEYLLKDCDLEKREPPLKFIVKKNPHHSQWGDMKLYLKLQIVKRSLEVWGSQEALEEAKEVRQENREKMKQKKFDKKVKEVVPAFLNRPQRAETGVDTVEIRHKELTVQFSQKAQNREE

SEQ ID NO: 97964 - protein, 940 aa, Homo sapiens
  Payload ID: 19540
  Gene Name: xeroderma pigmentosum, complementation group C
  Uniprot ID: Q01831
  ENSP ID: ENSP00000285021
MARKRAAGGEPRGRELRSQKSKAKSKARREEEEEDAFEDEKPPKKSLLSKVSQGKRKRGCSHPGGSADGPAKKKVAKVTVKSENLKVIKDEALSDGDDLRDFPSDLKKAHHLKRGATMNEDSNEEEEESENDWEEVEELSEPVLGDVRESTAFSRSLLPVKPVEIEIETPEQAKTRERSEKIKLEFETYLRRAMKRFNKGVHEDTHKVHLLCLLANGFYRNNICSQPDLHAIGLSIIPARFTRVLPRDVDTYYLSNLVKWFIGTFTVNAELSASEQDNLQTTLERRFAIYSARDDEELVHIFLLILRALQLLTRLVLSLQPIPLKSATAKGKKPSKERLTADPGGSSETSSQVLENHTKPKTSKGTKQEETFAKGTCRPSAKGKRNKGGRKKRSKPSSSEEDEGPGDKQEKATQRRPHGRERRVASRVSYKEESGSDEAGSGSDFELSSGEASDPSDEDSEPGPPKQRKAPAPQRTKAGSKSASRTHRGSHRKDPSLPAASSSSSSSKRGKKMCSDGEKAEKRSIAGIDQWLEVFCEQEEKWVCVDCVHGVVGQPLTCYKYATKPMTYVVGIDSDGWVRDVTQRYDPVWMTVTRKCRVDAEWWAETLRPYQSPFMDREKKEDLEFQAKHMDQPLPTAIGLYKNHPLYALKRHLLKYEAIYPETAAILGYCRGEAVYSRDCVHTLHSRDTWLKKARVVRLGEVPYKMVKGFSNRARKARLAEPQLREENDLGLFGYWQTEEYQPPVAVDGKVPRNEFGNVYLFLPSMMPIGCVQLNLPNLHRVARKLDIDCVQAITGFDFHGGYSHPVTDGYIVCEEFKDVLLTAWENEQAVIERKEKEKKEKRALGNWKLLAKGLLIRERLKRRYGPKSEAAAPHTDAGGGLSSDEEEGTSSQAEAARILAASWPQNREDEEKQKLKGGPKKTKREKKAAASHLFPFEQL

SEQ ID NO: 97965 - protein, 168 aa, Homo sapiens
  Payload ID: 19540
  Gene Name: xeroderma pigmentosum, complementation group C
  ENSP ID: ENSP00000423867
MARKRAAGGEPRGRELRSQKSKAKSKARHAFEDEKPPKKSLLSKVSQGKRKRGCSHPGGSADGPAKKKVAKVTVKSENLKVIKDEALSDGDDLRDFPSDLKKAHHLKRGATMNEDSNEEEEESENDWEEVEELSEPVLGDVRESTAFSRSLLPVKPVEIEIETPEQAK

SEQ ID NO: 97966 - protein, 140 aa, Homo sapiens
  Payload ID: 19540
  Gene Name: xeroderma pigmentosum, complementation group C
  Uniprot ID: Q01831
  ENSP ID: ENSP00000424548
MARKRAAGGEPRGRELRSQKSKAKSKARREEEEEDAFEDEKPPKKSLLSKVSQGKRKRGCSHPGGSADGPAKKKVAKVTVKSENLKVIKDEALSDGDDLRDFPSDLKKAHHLKRGATMNEDSNEEEEESENDWEEVEVKR

SEQ ID NO: 97967 - protein, 180 aa, Homo sapiens
  Payload ID: 19541
  Gene Name: Xg blood group
  Uniprot ID: P55808
  ENSP ID: ENSP00000370566
MESWWGLPCLAFLCFLMHARGQRDFDLADALDDPEPTKKPNSDIYPKPKPPYYPQPENPDSGGNIYPRPKPRPQPQPGNSGNSGGYFNDVDRDDGRYPPRPRPRPPAGGGGGGYSSYGNSDNTHGGDHHSTYGNPEGNMVAKIVSPIVSVVVVTLLGAAASYFKLNNRRNCFRTHEPENV

SEQ ID NO: 97968 - protein, 195 aa, Homo sapiens
  Payload ID: 19541
  Gene Name: Xg blood group
  Uniprot ID: P55808
  ENSP ID: ENSP00000411004
MESWWGLPCLAFLCFLMHARGQRDFDLADALDDPEPTKKPNSDIYPKPKPPYYPQPENPDSGGNIYPRPKPRPQPQPGNSGNSGGYFNDVDRDDGRYPPRPRPRPPAGGGGGGYSSYGNSDNTHGRGGYRLNSRYGNTYGGDHHSTYGNPEGNMVAKIVSPIVSVVVVTLLGAAASYFKLNNRRNCFRTHEPENV

SEQ ID NO: 97969 - protein, 148 aa, Homo sapiens
  Payload ID: 19541
  Gene Name: Xg blood group
  ENSP ID: ENSP00000430005
MESWWGLPCLAFLCFLMHARDIYPKPKPPYYPQPENPDSGGNIYPRPKPRPQPQPGNSGNSGGYFNDVDRDDGRYPPRPRPRPPAGGGGGGYSSYGNSDNTHGGDHHSTYGNPEGNMVAKIVSPIVSVVVVTLLGAAASYFKLNNRRN

SEQ ID NO: 97970 - protein, 282 aa, Homo sapiens
  Payload ID: 19542
  Gene Name: XIAP associated factor 1
  Uniprot ID: Q6GPH4
  ENSP ID: ENSP00000341029
MEGDFSVCRNCKRHVVSANFTLHEAYCLRFLVLCPECEEPVPKETMEEHCKLEHQQANECQERPVECKFCKLDMQLSKLELHESYCGSRTELCQGCGQFIMHRMLAQHRDVCRSEQAQLGKGERISAPEREIYCHYCNQMIPENKYFHHMGKCCPDSEFKKHFPVGNPEILPSSLPSQAAENQTSTMEKDVRPKTRSINRFPLHSESSSKKAPRSKNKTLDPLLMSEPKPRTSSPRGDKAAYDILRRCSQCGILLPLPILNQHQEKCRWLASSKGKQVRNFS

SEQ ID NO: 97971 - protein, 301 aa, Homo sapiens
  Payload ID: 19542
  Gene Name: XIAP associated factor 1
  Uniprot ID: Q6GPH4
  ENSP ID: ENSP00000354822
MEGDFSVCRNCKRHVVSANFTLHEAYCLRFLVLCPECEEPVPKETMEEHCKLEHQQVGCTMCQQSMQKSSLEFHKANECQERPVECKFCKLDMQLSKLELHESYCGSRTELCQGCGQFIMHRMLAQHRDVCRSEQAQLGKGERISAPEREIYCHYCNQMIPENKYFHHMGKCCPDSEFKKHFPVGNPEILPSSLPSQAAENQTSTMEKDVRPKTRSINRFPLHSESSSKKAPRSKNKTLDPLLMSEPKPRTSSPRGDKAAYDILRRCSQCGILLPLPILNQHQEKCRWLASSKGKQVRNFS

SEQ ID NO: 97972 - protein, 141 aa, Homo sapiens
  Payload ID: 19542
  Gene Name: XIAP associated factor 1
  Uniprot ID: Q6GPH4
  ENSP ID: ENSP00000458229
MEGDFSVCRNCKRHVVSANFTLHEAYCLRFLVLCPECEEPVPKETMEEHCKLEHQQVGCTMCQQSMQKSSLEFHKANECQERPVECKFCKLDMQLSKLELHESYCGSRTELCQGCGQFIMHRMLAQHRDVCRSEQAQLGKG

SEQ ID NO: 97973 - protein, 164 aa, Homo sapiens
  Payload ID: 19542
  Gene Name: XIAP associated factor 1
  ENSP ID: ENSP00000458321
MEGDFSVCRNCKRHVVSANFTLHEAYCLRFLVLCPECEEPVPKETMEEHCKLEHQQVGCTMCQQSMQKSSLEFHKANECQERPVECKFCKLDMQLSKLELHESYCGSRTELCQGCGQFIMHRMLAQHRDVCRSEQAQLGKETSPDPGKCLSITVAAALSAHLWP

SEQ ID NO: 97974 - protein, 74 aa, Homo sapiens
  Payload ID: 19542
  Gene Name: XIAP associated factor 1
  ENSP ID: ENSP00000459543
MEGDFSVCRNCKRHVVSANFTLHEAYCLRFLVLCPECEEPVPKETMEEHCKLEHQQGKEFQLLKGKSTVIIATK

SEQ ID NO: 97975 - protein, 190 aa, Homo sapiens
  Payload ID: 19542
  Gene Name: XIAP associated factor 1
  ENSP ID: ENSP00000460315
MEGDFSVCRNCKRHVVSANFTLHEAYCLRFLVLCPECEEPVPKETMEEHCKLEHQQERWDLGVTEWVQSSLQERWGLRVGGRGSSPPCRLGVRCVSRACRSPRWSFIRPMSARSALLSVSSANWTCSSASWSSTSPTVAAGQSSAKAVASSSCTACSPSTEMSVAVNRPSSGKGKEFQLLKGKSTVIIAT

SEQ ID NO: 97976 - protein, 133 aa, Homo sapiens
  Payload ID: 19542
  Gene Name: XIAP associated factor 1
  ENSP ID: ENSP00000460373
MEGDFSVCRNCKRHVVSANFTLHEAYCLRFLVLCPECEEPVPKETMEEHCKLEHQQVGCTMCQQSMQKSSLEFHKANECQERPVECKFCKLDMQLSKLELHESYCGSRTELCQGCGQFIMHRMLAQHRDVCRS

SEQ ID NO: 97977 - protein, 63 aa, Homo sapiens
  Payload ID: 19542
  Gene Name: XIAP associated factor 1
  ENSP ID: ENSP00000460632
MEGDFSVCRNCKRHVVSANFTLHEAYCLRFLVLCPECEEPVPKETMEEHCKLEHQQAWRAVEN

SEQ ID NO: 97978 - protein, 122 aa, Homo sapiens
  Payload ID: 19542
  Gene Name: XIAP associated factor 1
  Uniprot ID: Q6GPH4
  ENSP ID: ENSP00000461196
MEGDFSVCRNCKRHVVSANFTLHEAYCLRFLVLCPECEEPVPKETMEEHCKLEHQQANECQERPVECKFCKLDMQLSKLELHESYCGSRTELCQGCGQFIMHRMLAQHRDVCRSEQAQLGKG

SEQ ID NO: 97979 - protein, 128 aa, Homo sapiens
  Payload ID: 19542
  Gene Name: XIAP associated factor 1
  ENSP ID: ENSP00000461635
MEGDFSVCRNCKRHVVSANFTLHEAYCLRFLVLCPECEEPVPKETMEEHCKLEHQQAYGSGIGKRFWFQERLAVLLRSVKRGCEKGRSWKAVRWSPVSRLSMSIPPGAPDLSLWRYSSSGSRCQLRLV

SEQ ID NO: 97980 - protein, 145 aa, Homo sapiens
  Payload ID: 19542
  Gene Name: XIAP associated factor 1
  ENSP ID: ENSP00000461698
MEGDFSVCRNCKRHVVSANFTLHEAYCLRFLVLCPECEEPVPKETMEEHCKLEHQQANECQERPVECKFCKLDMQLSKLELHESYCGSRTELCQGCGQFIMHRMLAQHRDVCRSEQAQLGKETSPDPGKCLSITVAAALSAHLWP

SEQ ID NO: 97981 - protein, 128 aa, Homo sapiens; identical to SEQ ID NO: 97979
  Payload ID: 19542
  Gene Name: XIAP associated factor 1
  ENSP ID: ENSP00000461750

SEQ ID NO: 97982 - protein, 1843 aa, Homo sapiens
  Payload ID: 19543
  Gene Name: xin actin binding repeat containing 1
  Uniprot ID: Q702N8
  ENSP ID: ENSP00000343140
MADTQTQVAPTPTMRMATAEDLPLPPPPALEDLPLPPPKESFSKFHQQRQASELRRLYRHIHPELRKNLAEAVAEDLAEVLGSEEPTEGDVQCMRWIFENWRLDAIGEHERPAAKEPVLCGDVQATSRKFEEGSFANSTDQEPTRPQPGGGDVRAARWLFETKPLDELTGQAKELEATVREPAASGDVQGTRMLFETRPLDRLGSRPSLQEQSPLELRSEIQELKGDVKKTVKLFQTEPLCAIQDAEGAIHEVKAACREEIQSNAVRSARWLFETRPLDAINQDPSQVRVIRGISLEEGARPDVSATRWIFETQPLDAIREILVDEKDFQPSPDLIPPGPDVQQQQHLFETRALDTLKGDEEAGAEAPPKEEVVPGDVRSTLWLFETKPLDAFRDKVQVGHLQRVDPQDGEGHLSSDSSSALPFSQSAPQRDELKGDVKTFKNLFETLPLDSIGQGEVLAHGSPSREEGTDSAGQAQGIGSPVYAMQDSKGRLHALTSVSREQIVGGDVQGYRWMFETQPLDQLGRSPSTIDVVRGITRQEVVAGDVGTARWLFETQPLEMIHQREQQERQKEEGKSQGDPQPEAPPKGDVQTIRWLFETCPMSELAEKQGSEVTDPTAKAEAQSCTWMFKPQPVDRPVGSREQHLQVSQVPAGERQTDRHVFETEPLQASGRPCGRRPVRYCSRVEIPSGQVSRQKEVFQALEAGKKEEQEPRVIAGSIPAGSVHKFTWLFENCPMGSLAAESIQGGNLLEEQPMSPSGNRMQESQETAAEGTLRTLHATPGILHHGGILMEARGPGELCLAKYVLSGTGQGHPYIRKEELVSGELPRIICQVLRRPDVDQQGLLVQEDPTGQLQLKPLRLPTPGSSGNIEDMDPELQQLLACGLGTSVARTGLVMQETEQGLVALTAYSLQPRLTSKASERSSVQLLASCIDKGDLSGLHSLRWEPPADPSPVPASEGAQSLHPTESIIHVPPLDPSMGMGHLRASGATPCPPQAIGKAVPLAGEAAAPAQLQNTEKQEDSHSGQKGMAVLGKSEGATTTPPGPGAPDLLAAMQSLRMATAEAQSLHQQVLNKHKQGPTPTATSNPIQDGLRKAGATQSNIRPGGGSDPRIPAAPRKVSREEQALPRGLPGGWVTIQDGIYTAHPVRTFDPPGGVQLSQREPQSRHRETALSVQAPRPLQGGPGQSTGPGREEPGGCTQMAWGPPGKAMAEVCPGGLQAAETTLKTAPLGRHILASGPQAAGASPHPHNAFVPPPPTLPAAVTGPDFPAGAHRAEDSIQQASEPLKDPLLHSHSSPAGQRTPGGSQTKTPKLDPTMPPKKKPQLPPKPAHLTQSHPPQRLPKPLPLSPSFSSEVGQREHQRGERDTAIPQPAKVPTTVDQGHIPLARCPSGHSQPSLQHGLSTTAPRPTKNQATGSNAQSSEPPKLNALNHDPTSPQWGPGPSGEQPMEGSHQGAPESPDSLQRNQKELQGLLNQVQALEKEAASSVDVQALRRLFEAVPQLGGAAPQAPAAHQKPEASVEQAFGELTRVSTEVAQLKEQTLARLLDIEEAVHKALSSMSSLQPEASARGHFQGPPKDHSAHKISVTVSSSARPSGSGQEVGGQTAVKNQAKVECHTEAQSQVKIRNHTEARGHTASTAPSTRRQETSREYLCPPRVLPSSRDSPSSPTFISIQSATRKPLETPSFKGNPDVSVKSTQLAQDIGQALLHQKGVQDKTGKKDITQCSVQPEPAPPSASPLPRGWQKSVLELQTGPGSSQHYGAMRTVTEQYEEVDQFGNTVLMSSTTVTEQAEPPRNPGSHLGLHASPLLRQFLHSPAGFSSDLTEAETVQVSCSYSQPAAQ

SEQ ID NO: 97983 - protein, 1121 aa, Homo sapiens
  Payload ID: 19543
  Gene Name: xin actin binding repeat containing 1
  Uniprot ID: Q702N8
  ENSP ID: ENSP00000379550
MADTQTQVAPTPTMRMATAEDLPLPPPPALEDLPLPPPKESFSKFHQQRQASELRRLYRHIHPELRKNLAEAVAEDLAEVLGSEEPTEGDVQCMRWIFENWRLDAIGEHERPAAKEPVLCGDVQATSRKFEEGSFANSTDQEPTRPQPGGGDVRAARWLFETKPLDELTGQAKELEATVREPAASGDVQGTRMLFETRPLDRLGSRPSLQEQSPLELRSEIQELKGDVKKTVKLFQTEPLCAIQDAEGAIHEVKAACREEIQSNAVRSARWLFETRPLDAINQDPSQVRVIRGISLEEGARPDVSATRWIFETQPLDAIREILVDEKDFQPSPDLIPPGPDVQQQQHLFETRALDTLKGDEEAGAEAPPKEEVVPGDVRSTLWLFETKPLDAFRDKVQVGHLQRVDPQDGEGHLSSDSSSALPFSQSAPQRDELKGDVKTFKNLFETLPLDSIGQGEVLAHGSPSREEGTDSAGQAQGIGSPVYAMQDSKGRLHALTSVSREQIVGGDVQGYRWMFETQPLDQLGRSPSTIDVVRGITRQEVVAGDVGTARWLFETQPLEMIHQREQQERQKEEGKSQGDPQPEAPPKGDVQTIRWLFETCPMSELAEKQGSEVTDPTAKAEAQSCTWMFKPQPVDRPVGSREQHLQVSQVPAGERQTDRHVFETEPLQASGRPCGRRPVRYCSRVEIPSGQVSRQKEVFQALEAGKKEEQEPRVIAGSIPAGSVHKFTWLFENCPMGSLAAESIQGGNLLEEQPMSPSGNRMQESQETAAEGTLRTLHATPGILHHGGILMEARGPGELCLAKYVLSGTGQGHPYIRKEELVSGELPRIICQVLRRPDVDQQGLLVQEDPTGQLQLKPLRLPTPGSSGNIEDMDPELQQLLACGLGTSVARTGLVMQETEQGLVALTAYSLQPRLTSKASERSSVQLLASCIDKGDLSGLHSLRWEPPADPSPVPASEGAQSLHPTESIIHVPPLDPSMGMGHLRASGATPCPPQAIGKAVPLAGEAAAPAQLQNTEKQEDSHSGQKGMAVLGKSEGATTTPPGPGAPDLLAAMQSLRMATAEAQSLHQQVLNKHKQGPTPTATSNPIQDGLRKAGATQSNIRPGGGSDPRIPAAPRKLL

SEQ ID NO: 97984 - protein, 526 aa, Homo sapiens
  Payload ID: 19543
  Gene Name: xin actin binding repeat containing 1
  Uniprot ID: Q702N8
  ENSP ID: ENSP00000391645
MPPKKKPQLPPKPAHLTQSHPPQRLPKPLPLSPSFSSEVGQREHQRGERDTAIPQPAKVPTTVDQGHIPLARCPSGHSQPSLQHGLSTTAPRPTKNQATGSNAQSSEPPKLNALNHDPTSPQWGPGPSGEQPMEGSHQGAPESPDSLQRNQKELQGLLNQVQALEKEAASSVDVQALRRLFEAVPQLGGAAPQAPAAHQKPEASVEQAFGELTRVSTEVAQLKEQTLARLLDIEEAVHKALSSMSSLQPEASARGHFQGPPKDHSAHKISVTVSSSARPSGSGQEVGGQTAVKNQAKVECHTEAQSQVKIRNHTEARGHTASTAPSTRRQETSREYLCPPRVLPSSRDSPSSPTFISIQSATRKPLETPSFKGNPDVSVKSTQLAQDIGQALLHQKGVQDKTGKKDITQCSVQPEPAPPSASPLPRGWQKSVLELQTGPGSSQHYGAMRTVTEQYEEVDQFGNTVLMSSTTVTEQAEPPRNPGSHLGLHASPLLRQFLHSPAGFSSDLTEAETVQVSCSYSQPAAQ

SEQ ID NO: 97985 - protein, 963 aa, Homo sapiens
  Payload ID: 19544
  Gene Name: xin actin binding repeat containing 2
  ENSP ID: ENSP00000295237
MPLQKTNEEVSLSGIDSECTVVQPSPGSQSNARILGVCSDNQLSTTSPETVAAKRLHHVLAASEDKDKMKKEVLQSSRDIMQSKSACEIKQSHQECSTQQTQQKKYLEQLHLPQSKPISPNFKVKTIKLPTLDHTLNETDHSYESHKQQSEIDVQTFTKKQYLKTKKTEASTECSHKQSLAERHYQLPKKEKRVTVQLPTESIQKNQEDKLKMVPRKQREFSGSDRGKLPGSEEKNQGPSMIGRKEERLITERKHEHLKNKSAPKVVKQKVIDAHLDSQTQNFQQTQIQTAESKAEHKKLPQPYNSLQEEKCLEVKGIQEKQVFSNTKDSKQEITQNKSFFSSVKESQRDDGKGALNIVEFLRKREELQQILSRVKQFEAEPNKSGLKTFQTLLNTIPGWLISEDKREYAVHIAMENNLEKVKEEITHIKTQAEDMLVSYENIIQTAMMSSKTGKPGNKPTSLDETSSKVSNVHVSNNKNSEQKENKIAKEKTVQHQVAAHHEATVRSHVKTHQEIKLDDSNIPPPSLKTRPPSPTFITIESTARRTENPTKNELSQSPKKDSYVEPPPRRPMSQKSEIHRANTSPSPPRSRSEQLVRLKDTTAKLSKGAIPCPAATPVPIVEKRSEIIMSPATLRRQIKIETRGRDSPPTITIPVNINHAASGSFRESVDAQEEIRKVEKRATYVHKDGLNSTDHMVPDTESYDAVEIIRKVAVPPRLSEHTQRYEAANRTVQMAENFVNDPENEINRWFREFEHGPVSEAKSNRRVYAKGETNHNIQQESRTFCKEEFGLTSLGNTSFTDFSCKHPRELREKIPVKQPRICSETRSLSEHFSGMDAFESQIVESKMKTSSSHSSEAGKSGCDFKHAPPTYEDVIAGHILDISDSPKEVRKNFQKTWQESGRVFKGLGYATADASATEMRTTFQEESAFISEAAAPRQGNMYTLSKDSLSNGVPSGRQAEFS

SEQ ID NO: 97986 - protein, 938 aa, Homo sapiens
  Payload ID: 19544
  Gene Name: xin actin binding repeat containing 2
  Uniprot ID: A4UGR9
  ENSP ID: ENSP00000386454
MFPMQKGSLNLLRQKWESCDYQRSECHPRDSHCTIFQPQESKLLAPEGEVVSAPQSLDPTSLPYSTGEEMWSSKPEEKDSVDKSNNTREYGRPEVLKEDSLSSRRRIERFSIALDELRSVFEAPKSGNKPAEYGGKEVEIERSLCSPAFKSHPGSQLEDSVKDSDKKGKETSFDKMSPESGHSRIFEATAGPNKPESGFAEDSAARGEGVSDLHEVVSLKERMARYQAAVSRGDCRSFSANMMEESEMCAVPGGLAKVKKQFEDEITSSRNTFAQYQYQHQNRSEQEAIHSSQVGTSRSSQEMARNEQEGSKVQKIDVHGTEMVSHLEKHTEEVNQASQFHQYVQETVIDTPEDEEIPKVSTKLLKEQFEKSAQEKILYSDKEMTTPAKQIKKLLLQDKEICILCQKTVYPMECLVADKQNFHKSCFRCHHCNSKLSLGNYASLHGQIYCKPHFKQLFKSKGNYDEGFGHKQHKDRWNCKNQSRSVDFIPNEEPNMCKNIAENTLVPGDRNEHLDAGNSEGQRNDLRKLGERGKLKVIWPPSKEIPKKTLPFEEELKMSKPKWPPEMTTLLSPEFKSESLLEDVRTPENKGQRQDHFPFLQPYLQSTHVCQKEDVIGIKEMKMPEGRKDEKKEGRKNVQDRPSEAEDTKSNRKSAMDLNDNNNVIVQSAEKEKNEKTNQTNGAEVLQVTNTDDEMMPENHKENLNKNNNNNYVAVSYLNNCRQKTSILEFLDLLPLSSEANDTANEYEIEKLENTSRISELLGIFESEKTYSRNVLAMALKKQTDRAAAGSPVQPAPKPSLSRGLMVKGGSSIISPDTNLLNIKGSHSKSKNLHFFFSNTVKITAFSKKNENIFNCDLIDSVDQIKNMPCLDLREFGKDVKPWHVETTEAARNNENTGFDALSHECTAKPLFPRVEVQSEQLTVEEQIKRNRCYSDTE

SEQ ID NO: 97987 - protein, 971 aa, Homo sapiens
  Payload ID: 19544
  Gene Name: xin actin binding repeat containing 2
  Uniprot ID: A4UGR9
  ENSP ID: ENSP00000386619
MFPMQKGSLNLLRQKWESCDYQRSECHPRDSHCTIFQPQESKLLAPEGEVVSAPQSLDPTSLPYSTGEEMWSSKPEEKDSVDKSNNTREYGRPEVLKEDSLSSRRRIERFSIALDELRSVFEAPKSGNKPAEYGGKEVEIERSLCSPAFKSHPGSQLEDSVKDSDKKGKETSFDKMSPESGHSRIFEAVFSTDQAQILRLHLHPKLTKTPKNSLKSSTYISTAGPNKPESGFAEDSAARGEGVSDLHEVVSLKERMARYQAAVSRGDCRSFSANMMEESEMCAVPGGLAKVKKQFEDEITSSRNTFAQYQYQHQNRSEQEAIHSSQVGTSRSSQEMARNEQEGSKVQKIDVHGTEMVSHLEKHTEEVNQASQFHQYVQETVIDTPEDEEIPKVSTKLLKEQFEKSAQEKILYSDKEMTTPAKQIKKLLLQDKEICILCQKTVYPMECLVADKQNFHKSCFRCHHCNSKLSLGNYASLHGQIYCKPHFKQLFKSKGNYDEGFGHKQHKDRWNCKNQSRSVDFIPNEEPNMCKNIAENTLVPGDRNEHLDAGNSEGQRNDLRKLGERGKLKVIWPPSKEIPKKTLPFEEELKMSKPKWPPEMTTLLSPEFKSESLLEDVRTPENKGQRQDHFPFLQPYLQSTHVCQKEDVIGIKEMKMPEGRKDEKKEGRKNVQDRPSEAEDTKSNRKSAMDLNDNNNVIVQSAEKEKNEKTNQTNGAEVLQVTNTDDEMMPENHKENLNKNNNNNYVAVSYLNNCRQKTSILEFLDLLPLSSEANDTANEYEIEKLENTSRISELLGIFESEKTYSRNVLAMALKKQTDRAAAGSPVQPAPKPSLSRGLMVKGGSSIISPDTNLLNIKGSHSKSKNLHFFFSNTVKITAFSKKNENIFNCDLIDSVDQIKNMPCLDLREFGKDVKPWHVETTEAARNNENTGFDALSHECTAKPLFPRVEVQSEQLTVEEQIKRNRCYSDTE

SEQ ID NO: 97988 - protein, 3549 aa, Homo sapiens
  Payload ID: 19544
  Gene Name: xin actin binding repeat containing 2
  Uniprot ID: A4UGR9
  ENSP ID: ENSP00000386840
MFPMQKGSLNLLRQKWESCDYQRSECHPRDSHCTIFQPQESKLLAPEGEVVSAPQSLDPTSLPYSTGEEMWSSKPEEKDSVDKSNNTREYGRPEVLKEDSLSSRRRIERFSIALDELRSVFEAPKSGNKPAEYGGKEVEIERSLCSPAFKSHPGSQLEDSVKDSDKKGKETSFDKMSPESGHSRIFEATAGPNKPESGFAEDSAARGEGVSDLHEVVSLKERMARYQAAVSRGDCRSFSANMMEESEMCAVPGGLAKVKKQFEDEITSSRNTFAQYQYQHQNRSEQEAIHSSQVGTSRSSQEMARNEQEGSKVQKIDVHGTEMVSHLEKHTEEVNQASQFHQYVQETVIDTPEDEEIPKVSTKLLKEQFEKSAQEKILYSDKEMTTPAKQIKTESEYEETFKPSSVVSTSSTSCVSTSQRKETSTTRYSDHSVTSSTLAQINATSSGMTEEFPPPPPDVLQTSVDVTAFSQSPELPSPPRRLPVPKDVYSKQRNLYELNRLYKHIHPELRKNLEKDYISEVSEIVSSQMNSGSSVSADVQQARYVFENTNDSSQKDLNSEREYLEWDEILKGEVQSIRWIFENQPLDSINNGSPDEGDISRGIADQEIIAGGDVKYTTWMFETQPIDTLGAYSSDTVENAEKIPELARGDVCTARWMFETRPLDSMNKMHQSQEESAVTISKDITGGDVKTVRYMFETQHLDQLGQLHSVDEVHLLQLRSELKEIKGNVKRSIKCFETQPLYVIRDGSGQMLEIKTVHREDVEKGDVRTARWMFETQPLDTINKDITEIKVVRGISMEENVKGGVSKAKWLFETQPLEKIKESEEVIIEKEKIIGTDVSRKCWMFETQPLDILKEVPDADSLQREEIIGGDVQTTKHLFETLPIEALKDSPDIGKLQKITASEEEKGDVRHQKWIFETQPLEDIRKDKKEYTRTVKLEEVDRGDVKNYTHIFESNNLIKFDASHKIEVEGVTRGAVELNKSLFETTPLYAIQDPLGKYHQVKTVQQEEIVRGDVRSCRWLFETRPIDQFDESIHKFQIIRGISAQEIQTGNVKSAKWLFETQPLDSIKYFSDVEETESKTEQTRDIVKGDVKTCKWLFETQPMESLYEKVSLMTSSEEIHKGDVKTCTWLFETQPLDTIKDDSETAVKLQTVKQEEIQGGDVRTACFLFETENLDSIQGEEVKEIKPVEMDIQAGDVSSMRYKFENQSLDSISSSSEEVLKKIKTLKTEDIQKGNVLNCRWLFENQPIDKIKESQEGDECVKTVTDIQGGDVRKGCFIFETFSLDEIKEESDYISTKKTITEEVIQGDVKSYRMLFETQPLYAIQDREGSYHEVTTVKKEEVIHGDVRGTRWLFETKPLDSINKSETVYVIKSVTQEDIQKGDVSSVRYRFETQPLDQISEESHNIMPSIDHIQGGNVKTSRQFFESENFDKNNYIRTVSVNEIQKGNVKTSTWLFETHTMDELRGEGLEYENIKTVTQEDVQKGDVKQAVWLFENRTFDSIMEAHKGITKMTKEEIPPSDVKTTTWLFETTPLHEFNETRVEKIEIIGKSIKETLEDLYSQKVIQAPGIIIEADEIGDVRMAKYKLMNQASPEIQKEEIIRADLRNIMVNLLSKRDCTEREILISEEEKGNVNLTKTQLLNRSTEFHAEKEEIVKGDVQQAIKNLFSEERSVKKGILIQEDEKGDINMTIYCLLHENDGDTIEREEVIGGDVKRTIHNLLSSTSNNKISERAKIDASERGNVQFFTTCIEAGALDYLKQLHTESNETLTAKKQEGEKEIIGGDVEGTKLLLKKRQSLVERTVSETDIIPGDVHNTVKVFMTEPQSTFGKIPKEEIIKGDLTSTLNSLSQAVNQKTVTKTEEIIKGNMLATLKSLKESSHRWKESKQPDAIPGDIEKAIECLEKATNTKTEILKKELLKDDLETSLRSLKEAQRSFKEVHKEGVIKKDAKAVMAGSSGEQKTDIHQVAVQRNKNSLLQPKPGPFEPAAKWQGGADTLSQTMGKSCHGNLVEERTEVNLPKAPKGTVKIVIDREQNNDALEKSLRRLSNSHHKSNVLESGDKTGVWTDTTGEQHLRDEYMSRQLTSTVSVKNNLTTKESDRAVRELKKDDVFNSIQSAGKTVGKQQTYELRNDHQKMEGFHIKSPKKTKNIKILTDTQSSKPSPTQHPVSMPVGGTYDLSGDFQKQTLLKQETKYSNKDIKKKNINLQPMWQLLPVEQDTSNVTEMKVSEKSHNTFKATNKKRETDVHLKSQDFLMKTNTSTGLKMAMERSLNPINFNPENNVKESECPLPPPSPPPPPPSNASSEIEFPLPPPPPLMMFPEKNGFLPSLSTEKIKAEFESFPGLPLPPPPVDEKSERESSSMFLPPPPPPTPSQKPAHLLSSSAPEKHSGDFMQQYSQKEASNSQNSQAKIITGKTGVLPPPTLPKPKLPKHIKDNKNDFSPKVELATSLSDMECKITTSKDQKKVMVMTSSEHTETKQNVISKSLDERKQLSIDSANCLSHTVPGTSAPRKKQIAPLIKSHSFPESSGQQNPKPYMRKFKTPLMIAEEKYRQQKEEIEKQKQESSYYNIVKTQSQNQHITEVEKEMPLQKTNEEVSLSGIDSECTVVQPSPGSQSNARILGVCSDNQLSTTSPETVAAKRLHHVLAASEDKDKMKKEVLQSSRDIMQSKSACEIKQSHQECSTQQTQQKKYLEQLHLPQSKPISPNFKVKTIKLPTLDHTLNETDHSYESHKQQSEIDVQTFTKKQYLKTKKTEASTECSHKQSLAERHYQLPKKEKRVTVQLPTESIQKNQEDKLKMVPRKQREFSGSDRGKLPGSEEKNQGPSMIGRKEERLITERKHEHLKNKSAPKVVKQKVIDAHLDSQTQNFQQTQIQTAESKAEHKKLPQPYNSLQEEKCLEVKGIQEKQVFSNTKDSKQEITQNKSFFSSVKESQRDDGKGALNIVEFLRKREELQQILSRVKQFEAEPNKSGLKTFQTLLNTIPGWLISEDKREYAVHIAMENNLEKVKEEITHIKTQAEDMLVSYENIIQTAMMSSKTGKPGNKPTSLDETSSKVSNVHVSNNKNSEQKENKIAKEKTVQHQVAAHHEATVRSHVKTHQEIKLDDSNIPPPSLKTRPPSPTFITIESTARRTENPTKNELSQSPKKDSYVEPPPRRPMSQKSEIHRANTSPSPPRSRSEQLVRLKDTTAKLSKGAIPCPAATPVPIVEKRSEIIMSPATLRRQIKIETRGRDSPPTITIPVNINHAASGSFRESVDAQEEIRKVEKRATYVHKDGLNSTDHMVPDTESYDAVEIIRKVAVPPRLSEHTQRYEAANRTVQMAENFVNDPENEINRWFREFEHGPVSEAKSNRRVYAKGETNHNIQQESRTFCKEEFGLTSLGNTSFTDFSCKHPRELREKIPVKQPRICSETRSLSEHFSGMDAFESQIVESKMKTSSSHSSEAGKSGCDFKHAPPTYEDVIAGHILDISDSPKEVRKNFQKTWQESGRVFKGLGYATADASATEMRTTFQEESAFISEAAAPRQGNMYTLSKDSLSNGVPSGRQAEFS

SEQ ID NO: 97989 - protein, 716 aa, Homo sapiens
  Payload ID: 19544
  Gene Name: xin actin binding repeat containing 2
  Uniprot ID: A4UGR9
  ENSP ID: ENSP00000386981
MARYQAAVSRGDCRSFSANMMEESEMCAVPGGLAKVKKQFEDEITSSRNTFAQYQYQHQNRSEQEAIHSSQVGTSRSSQEMARNEQEGSKVQKIDVHGTEMVSHLEKHTEEVNQASQFHQYVQETVIDTPEDEEIPKVSTKLLKEQFEKSAQEKILYSDKEMTTPAKQIKKLLLQDKEICILCQKTVYPMECLVADKQNFHKSCFRCHHCNSKLSLGNYASLHGQIYCKPHFKQLFKSKGNYDEGFGHKQHKDRWNCKNQSRSVDFIPNEEPNMCKNIAENTLVPGDRNEHLDAGNSEGQRNDLRKLGERGKLKVIWPPSKEIPKKTLPFEEELKMSKPKWPPEMTTLLSPEFKSESLLEDVRTPENKGQRQDHFPFLQPYLQSTHVCQKEDVIGIKEMKMPEGRKDEKKEGRKNVQDRPSEAEDTKSNRKSAMDLNDNNNVIVQSAEKEKNEKTNQTNGAEVLQVTNTDDEMMPENHKENLNKNNNNNYVAVSYLNNCRQKTSILEFLDLLPLSSEANDTANEYEIEKLENTSRISELLGIFESEKTYSRNVLAMALKKQTDRAAAGSPVQPAPKPSLSRGLMVKGGSSIISPDTNLLNIKGSHSKSKNLHFFFSNTVKITAFSKKNENIFNCDLIDSVDQIKNMPCLDLREFGKDVKPWHVETTEAARNNENTGFDALSHECTAKPLFPRVEVQSEQLTVEEQIKRNRCYSDTE

SEQ ID NO: 97990 - protein, 3327 aa, Homo sapiens
  Payload ID: 19544
  Gene Name: xin actin binding repeat containing 2
  Uniprot ID: A4UGR9
  ENSP ID: ENSP00000387255
MARYQAAVSRGDCRSFSANMMEESEMCAVPGGLAKVKKQFEDEITSSRNTFAQYQYQHQNRSEQEAIHSSQVGTSRSSQEMARNEQEGSKVQKIDVHGTEMVSHLEKHTEEVNQASQFHQYVQETVIDTPEDEEIPKVSTKLLKEQFEKSAQEKILYSDKEMTTPAKQIKTESEYEETFKPSSVVSTSSTSCVSTSQRKETSTTRYSDHSVTSSTLAQINATSSGMTEEFPPPPPDVLQTSVDVTAFSQSPELPSPPRRLPVPKDVYSKQRNLYELNRLYKHIHPELRKNLEKDYISEVSEIVSSQMNSGSSVSADVQQARYVFENTNDSSQKDLNSEREYLEWDEILKGEVQSIRWIFENQPLDSINNGSPDEGDISRGIADQEIIAGGDVKYTTWMFETQPIDTLGAYSSDTVENAEKIPELARGDVCTARWMFETRPLDSMNKMHQSQEESAVTISKDITGGDVKTVRYMFETQHLDQLGQLHSVDEVHLLQLRSELKEIKGNVKRSIKCFETQPLYVIRDGSGQMLEIKTVHREDVEKGDVRTARWMFETQPLDTINKDITEIKVVRGISMEENVKGGVSKAKWLFETQPLEKIKESEEVIIEKEKIIGTDVSRKCWMFETQPLDILKEVPDADSLQREEIIGGDVQTTKHLFETLPIEALKDSPDIGKLQKITASEEEKGDVRHQKWIFETQPLEDIRKDKKEYTRTVKLEEVDRGDVKNYTHIFESNNLIKFDASHKIEVEGVTRGAVELNKSLFETTPLYAIQDPLGKYHQVKTVQQEEIVRGDVRSCRWLFETRPIDQFDESIHKFQIIRGISAQEIQTGNVKSAKWLFETQPLDSIKYFSDVEETESKTEQTRDIVKGDVKTCKWLFETQPMESLYEKVSLMTSSEEIHKGDVKTCTWLFETQPLDTIKDDSETAVKLQTVKQEEIQGGDVRTACFLFETENLDSIQGEEVKEIKPVEMDIQAGDVSSMRYKFENQSLDSISSSSEEVLKKIKTLKTEDIQKGNVLNCRWLFENQPIDKIKESQEGDECVKTVTDIQGGDVRKGCFIFETFSLDEIKEESDYISTKKTITEEVIQGDVKSYRMLFETQPLYAIQDREGSYHEVTTVKKEEVIHGDVRGTRWLFETKPLDSINKSETVYVIKSVTQEDIQKGDVSSVRYRFETQPLDQISEESHNIMPSIDHIQGGNVKTSRQFFESENFDKNNYIRTVSVNEIQKGNVKTSTWLFETHTMDELRGEGLEYENIKTVTQEDVQKGDVKQAVWLFENRTFDSIMEAHKGITKMTKEEIPPSDVKTTTWLFETTPLHEFNETRVEKIEIIGKSIKETLEDLYSQKVIQAPGIIIEADEIGDVRMAKYKLMNQASPEIQKEEIIRADLRNIMVNLLSKRDCTEREILISEEEKGNVNLTKTQLLNRSTEFHAEKEEIVKGDVQQAIKNLFSEERSVKKGILIQEDEKGDINMTIYCLLHENDGDTIEREEVIGGDVKRTIHNLLSSTSNNKISERAKIDASERGNVQFFTTCIEAGALDYLKQLHTESNETLTAKKQEGEKEIIGGDVEGTKLLLKKRQSLVERTVSETDIIPGDVHNTVKVFMTEPQSTFGKIPKEEIIKGDLTSTLNSLSQAVNQKTVTKTEEIIKGNMLATLKSLKESSHRWKESKQPDAIPGDIEKAIECLEKATNTKTEILKKELLKDDLETSLRSLKEAQRSFKEVHKEGVIKKDAKAVMAGSSGEQKTDIHQVAVQRNKNSLLQPKPGPFEPAAKWQGGADTLSQTMGKSCHGNLVEERTEVNLPKAPKGTVKIVIDREQNNDALEKSLRRLSNSHHKSNVLESGDKTGVWTDTTGEQHLRDEYMSRQLTSTVSVKNNLTTKESDRAVRELKKDDVFNSIQSAGKTVGKQQTYELRNDHQKMEGFHIKSPKKTKNIKILTDTQSSKPSPTQHPVSMPVGGTYDLSGDFQKQTLLKQETKYSNKDIKKKNINLQPMWQLLPVEQDTSNVTEMKVSEKSHNTFKATNKKRETDVHLKSQDFLMKTNTSTGLKMAMERSLNPINFNPENNVKESECPLPPPSPPPPPPSNASSEIEFPLPPPPPLMMFPEKNGFLPSLSTEKIKAEFESFPGLPLPPPPVDEKSERESSSMFLPPPPPPTPSQKPAHLLSSSAPEKHSGDFMQQYSQKEASNSQNSQAKIITGKTGVLPPPTLPKPKLPKHIKDNKNDFSPKVELATSLSDMECKITTSKDQKKVMVMTSSEHTETKQNVISKSLDERKQLSIDSANCLSHTVPGTSAPRKKQIAPLIKSHSFPESSGQQNPKPYMRKFKTPLMIAEEKYRQQKEEIEKQKQESSYYNIVKTQSQNQHITEVEKEMPLQKTNEEVSLSGIDSECTVVQPSPGSQSNARILGVCSDNQLSTTSPETVAAKRLHHVLAASEDKDKMKKEVLQSSRDIMQSKSACEIKQSHQECSTQQTQQKKYLEQLHLPQSKPISPNFKVKTIKLPTLDHTLNETDHSYESHKQQSEIDVQTFTKKQYLKTKKTEASTECSHKQSLAERHYQLPKKEKRVTVQLPTESIQKNQEDKLKMVPRKQREFSGSDRGKLPGSEEKNQGPSMIGRKEERLITERKHEHLKNKSAPKVVKQKVIDAHLDSQTQNFQQTQIQTAESKAEHKKLPQPYNSLQEEKCLEVKGIQEKQVFSNTKDSKQEITQNKSFFSSVKESQRDDGKGALNIVEFLRKREELQQILSRVKQFEAEPNKSGLKTFQTLLNTIPGWLISEDKREYAVHIAMENNLEKVKEEITHIKTQAEDMLVSYENIIQTAMMSSKTGKPGNKPTSLDETSSKVSNVHVSNNKNSEQKENKIAKEKTVQHQVAAHHEATVRSHVKTHQEIKLDDSNIPPPSLKTRPPSPTFITIESTARRTENPTKNELSQSPKKDSYVEPPPRRPMSQKSEIHRANTSPSPPRSRSEQLVRLKDTTAKLSKGAIPCPAATPVPIVEKRSEIIMSPATLRRQIKIETRGRDSPPTITIPVNINHAASGSFRESVDAQEEIRKVEKRATYVHKDGLNSTDHMVPDTESYDAVEIIRKVAVPPRLSEHTQRYEAANRTVQMAENFVNDPENEINRWFREFEHGPVSEAKSNRRVYAKGETNHNIQQESRTFCKEEFGLTSLGNTSFTDFSCKHPRELREKIPVKQPRICSETRSLSEHFSGMDAFESQIVESKMKTSSSHSSEAGKSGCDFKHAPPTYEDVIAGHILDISDSPKEVRKNFQKTWQESGRVFKGLGYATADASATEMRTTFQEESAFISEAAAPRQGNMYTLSKDSLSNGVPSGRQAEFS

SEQ ID NO: 97991 - protein, 3374 aa, Homo sapiens
  Payload ID: 19544
  Gene Name: xin actin binding repeat containing 2
  Uniprot ID: A4UGR9
  ENSP ID: ENSP00000486198
MSPESGHSRIFEATAGPNKPESGFAEDSAARGEGVSDLHEVVSLKERMARYQAAVSRGDCRSFSANMMEESEMCAVPGGLAKVKKQFEDEITSSRNTFAQYQYQHQNRSEQEAIHSSQVGTSRSSQEMARNEQEGSKVQKIDVHGTEMVSHLEKHTEEVNQASQFHQYVQETVIDTPEDEEIPKVSTKLLKEQFEKSAQEKILYSDKEMTTPAKQIKTESEYEETFKPSSVVSTSSTSCVSTSQRKETSTTRYSDHSVTSSTLAQINATSSGMTEEFPPPPPDVLQTSVDVTAFSQSPELPSPPRRLPVPKDVYSKQRNLYELNRLYKHIHPELRKNLEKDYISEVSEIVSSQMNSGSSVSADVQQARYVFENTNDSSQKDLNSEREYLEWDEILKGEVQSIRWIFENQPLDSINNGSPDEGDISRGIADQEIIAGGDVKYTTWMFETQPIDTLGAYSSDTVENAEKIPELARGDVCTARWMFETRPLDSMNKMHQSQEESAVTISKDITGGDVKTVRYMFETQHLDQLGQLHSVDEVHLLQLRSELKEIKGNVKRSIKCFETQPLYVIRDGSGQMLEIKTVHREDVEKGDVRTARWMFETQPLDTINKDITEIKVVRGISMEENVKGGVSKAKWLFETQPLEKIKESEEVIIEKEKIIGTDVSRKCWMFETQPLDILKEVPDADSLQREEIIGGDVQTTKHLFETLPIEALKDSPDIGKLQKITASEEEKGDVRHQKWIFETQPLEDIRKDKKEYTRTVKLEEVDRGDVKNYTHIFESNNLIKFDASHKIEVEGVTRGAVELNKSLFETTPLYAIQDPLGKYHQVKTVQQEEIVRGDVRSCRWLFETRPIDQFDESIHKFQIIRGISAQEIQTGNVKSAKWLFETQPLDSIKYFSDVEETESKTEQTRDIVKGDVKTCKWLFETQPMESLYEKVSLMTSSEEIHKGDVKTCTWLFETQPLDTIKDDSETAVKLQTVKQEEIQGGDVRTACFLFETENLDSIQGEEVKEIKPVEMDIQAGDVSSMRYKFENQSLDSISSSSEEVLKKIKTLKTEDIQKGNVLNCRWLFENQPIDKIKESQEGDECVKTVTDIQGGDVRKGCFIFETFSLDEIKEESDYISTKKTITEEVIQGDVKSYRMLFETQPLYAIQDREGSYHEVTTVKKEEVIHGDVRGTRWLFETKPLDSINKSETVYVIKSVTQEDIQKGDVSSVRYRFETQPLDQISEESHNIMPSIDHIQGGNVKTSRQFFESENFDKNNYIRTVSVNEIQKGNVKTSTWLFETHTMDELRGEGLEYENIKTVTQEDVQKGDVKQAVWLFENRTFDSIMEAHKGITKMTKEEIPPSDVKTTTWLFETTPLHEFNETRVEKIEIIGKSIKETLEDLYSQKVIQAPGIIIEADEIGDVRMAKYKLMNQASPEIQKEEIIRADLRNIMVNLLSKRDCTEREILISEEEKGNVNLTKTQLLNRSTEFHAEKEEIVKGDVQQAIKNLFSEERSVKKGILIQEDEKGDINMTIYCLLHENDGDTIEREEVIGGDVKRTIHNLLSSTSNNKISERAKIDASERGNVQFFTTCIEAGALDYLKQLHTESNETLTAKKQEGEKEIIGGDVEGTKLLLKKRQSLVERTVSETDIIPGDVHNTVKVFMTEPQSTFGKIPKEEIIKGDLTSTLNSLSQAVNQKTVTKTEEIIKGNMLATLKSLKESSHRWKESKQPDAIPGDIEKAIECLEKATNTKTEILKKELLKDDLETSLRSLKEAQRSFKEVHKEGVIKKDAKAVMAGSSGEQKTDIHQVAVQRNKNSLLQPKPGPFEPAAKWQGGADTLSQTMGKSCHGNLVEERTEVNLPKAPKGTVKIVIDREQNNDALEKSLRRLSNSHHKSNVLESGDKTGVWTDTTGEQHLRDEYMSRQLTSTVSVKNNLTTKESDRAVRELKKDDVFNSIQSAGKTVGKQQTYELRNDHQKMEGFHIKSPKKTKNIKILTDTQSSKPSPTQHPVSMPVGGTYDLSGDFQKQTLLKQETKYSNKDIKKKNINLQPMWQLLPVEQDTSNVTEMKVSEKSHNTFKATNKKRETDVHLKSQDFLMKTNTSTGLKMAMERSLNPINFNPENNVKESECPLPPPSPPPPPPSNASSEIEFPLPPPPPLMMFPEKNGFLPSLSTEKIKAEFESFPGLPLPPPPVDEKSERESSSMFLPPPPPPTPSQKPAHLLSSSAPEKHSGDFMQQYSQKEASNSQNSQAKIITGKTGVLPPPTLPKPKLPKHIKDNKNDFSPKVELATSLSDMECKITTSKDQKKVMVMTSSEHTETKQNVISKSLDERKQLSIDSANCLSHTVPGTSAPRKKQIAPLIKSHSFPESSGQQNPKPYMRKFKTPLMIAEEKYRQQKEEIEKQKQESSYYNIVKTQSQNQHITEVEKEMPLQKTNEEVSLSGIDSECTVVQPSPGSQSNARILGVCSDNQLSTTSPETVAAKRLHHVLAASEDKDKMKKEVLQSSRDIMQSKSACEIKQSHQECSTQQTQQKKYLEQLHLPQSKPISPNFKVKTIKLPTLDHTLNETDHSYESHKQQSEIDVQTFTKKQYLKTKKTEASTECSHKQSLAERHYQLPKKEKRVTVQLPTESIQKNQEDKLKMVPRKQREFSGSDRGKLPGSEEKNQGPSMIGRKEERLITERKHEHLKNKSAPKVVKQKVIDAHLDSQTQNFQQTQIQTAESKAEHKKLPQPYNSLQEEKCLEVKGIQEKQVFSNTKDSKQEITQNKSFFSSVKESQRDDGKGALNIVEFLRKREELQQILSRVKQFEAEPNKSGLKTFQTLLNTIPGWLISEDKREYAVHIAMENNLEKVKEEITHIKTQAEDMLVSYENIIQTAMMSSKTGKPGNKPTSLDETSSKVSNVHVSNNKNSEQKENKIAKEKTVQHQVAAHHEATVRSHVKTHQEIKLDDSNIPPPSLKTRPPSPTFITIESTARRTENPTKNELSQSPKKDSYVEPPPRRPMSQKSEIHRANTSPSPPRSRSEQLVRLKDTTAKLSKGAIPCPAATPVPIVEKRSEIIMSPATLRRQIKIETRGRDSPPTITIPVNINHAASGSFRESVDAQEEIRKVEKRATYVHKDGLNSTDHMVPDTESYDAVEIIRKVAVPPRLSEHTQRYEAANRTVQMAENFVNDPENEINRWFREFEHGPVSEAKSNRRVYAKGETNHNIQQESRTFCKEEFGLTSLGNTSFTDFSCKHPRELREKIPVKQPRICSETRSLSEHFSGMDAFESQIVESKMKTSSSHSSEAGKSGCDFKHAPPTYEDVIAGHILDISDSPKEVRKNFQKTWQESGRVFKGLGYATADASATEMRTTFQEESAFISEAAAPRQGNMYTLSKDSLSNGVPSGRQAEFS

SEQ ID NO: 97992 - protein, 459 aa, Homo sapiens
  Payload ID: 19545
  Gene Name: XK, Kell blood group complex subunit-related family, member 3
  Uniprot ID: Q5GH77
  ENSP ID: ENSP00000331704
METVFEEMDEESTGGVSSSKEEIVLGQRLHLSFPFSIIFSTVLYCGEVAFGLYMFEIYRKANDTFWMSFTISFIIVGAILDQIILMFFNKDLRRNKAALLFWHILLLGPIVRCLHTIRNYHKWLKNLKQEKEETQVSITKRNTMLEREIAFSIRDNFMQQKAFKYMSVIQAFLGSVPQLILQMYISLTIREWPLNRALLMTFSLLSVTYGAIRCNILAIQISNDDTTIKLPPIEFFCVVMWRFLEVISRVVTLAFFIASLKLKSLPVLLIIYFVSLLAPWLEFWKSGAHLPGNKENNSNMVGTVLMLFLITLLYAAINFSCWSAVKLQLSDDKIIDGRQRWGHRILHYSFQFLENVIMILVFRFFGGKTLLNCCDSLIAVQLIISYLLATGFMLLFYQYLYPWQSGKVLPGRTENQPEAPYYYVNIEKTEKNKNKQLRNYCHSCNRVGYFSIRKSMTCS

SEQ ID NO: 97993 - protein, 650 aa, Homo sapiens
  Payload ID: 19546
  Gene Name: XK, Kell blood group complex subunit-related family, member 4
  Uniprot ID: Q5GH76
  ENSP ID: ENSP00000328326
MAAKSDGRLKMKKSSDVAFTPLQNSDHSGSVQGLAPGLPSGSGAEDEEAAGGGCCPDGGGCSRCCCCCAGSGGSAGSGGSGGVAGPGGGGAGSAALCLRLGREQRRYSLWDCLWILAAVAVYFADVGTDVWLAVDYYLRGQRWWFGLTLFFVVLGSLSVQVFSFRWFVHDFSTEDSATAAAASSCPQPGADCKTVVGGGSAAGEGEARPSTPQRQASNASKSNIAAANSGSNSSGATRASGKHRSASCSFCIWLLQSLIHILQLGQIWRYFHTIYLGIRSRQSGENDRWRFYWKMVYEYADVSMLHLLATFLESAPQLVLQLCIIVQTHSLQALQGFTAAASLVSLAWALASYQKALRDSRDDKKPISYMAVIIQFCWHFFTIAARVITFALFASVFQLYFGIFIVLHWCIMTFWIVHCETEFCITKWEEIVFDMVVGIIYIFSWFNVKEGRTRCRLFIYYFVILLENTALSALWYLYKAPQIADAFAIPALCVVFSSFLTGVVFMLMYYAFFHPNGPRFGQSPSCACEDPAAAFTLPPDVATSTLRSISNNRSVVSDRDQKFAERDGCVPVFQVRPTAPSTPSSRPPRIEESVIKIDLFRNRYPAWERHVLDRSLRKAILAFECSPSPPRLQYKDDALIQERLEYETTL

SEQ ID NO: 97994 - protein, 650 aa, Homo sapiens; identical to SEQ ID NO: 97993
  Payload ID: 19546
  Gene Name: XK, Kell blood group complex subunit-related family, member 4
  Uniprot ID: Q5GH76
  ENSP ID: ENSP00000480076

SEQ ID NO: 97995 - protein, 686 aa, Homo sapiens
  Payload ID: 19547
  Gene Name: XK, Kell blood group complex subunit-related family, member 5
  ENSP ID: ENSP00000483879
MHARLLGLSALLQAAEQSARLYTVAYYFTTGRLLWGWLALAVLLPGFLVQALSYLWFRADGHPGHCSLMMLHLLQLGVWKRHWDAALTSLQKELEAPHRGWLQLQEADLSALRLLEALLQTGPHLLLQTYVFLASDFTDIVPGVSTLFSWSSLSWALVSYTRFMGFMKPGHLAMPWAALFCQQLWRMGMLGTRVLSLVLFYKAYHFWVFVVAGAHWLVMTFWLVAQQSDIIDSTCHWRLFNLLVGAVYILCYLSFWDSPSRNRMVTFYMVMLLENIILLLLATDFLQGASWTSLQTIAGVLSGFLIGSVSLVIYYSLLHPKSTDIWQGCLRKSCGIAGGDKTERRDSPRATDLAGKRTESSGSCQGASYEPTILGKPPTPEQVPPEAGLGTQVAVEDSFLSHHHWLWVKLALKTGNVSKINAAFGDNSPAYCPPAWGLSQQDYLQRKALSAQQELPSSSRDPSTLENSSAFEGVPKAEADPLETSSYVSFASDQQDEAPTQNPAATQGEGTPKEGADAVSGTQGKGTGGQQRGGEGQQSSTLYFSATAEVATSSQQEGSPATLQTAHSGRRLGKSSPAQPASPHPVGLAPFPDTMADISPILGTGPCRGFCPSAGFPGRTLSISELEEPLEPKRELSHHAAVGVWVSLPQLRTAHEPCLTSTPKSESIQTDCSCREQMKQEPSFFI

SEQ ID NO: 97996 - protein, 86 aa, Homo sapiens
  Payload ID: 19547
  Gene Name: XK, Kell blood group complex subunit-related family, member 5
  ENSP ID: ENSP00000485506
MHARLLGLSALLQAAEQSARLYTVAYYFTTGRLLWGWLALAVLLPGFLVQALSYLWFRADGHPGHCSLMMLHLLQLGVWKRPQIHL

SEQ ID NO: 97997 - protein, 287 aa, Homo sapiens
  Payload ID: 19548
  Gene Name: XK, Kell blood group complex subunit-related family, member 6
  ENSP ID: ENSP00000297303
MAAKSDGGGVGVGFAQLHNLDEAVGSGGEEDGEPGGGGCGGGGDGSEPGESSSMHICHCCNTSSCYWGCRSACLRSLLGRKPRRSAAADGGDQPLQPPAAPGAGRQPPTPSAARPEPPPPQVERPWLDCLWIVLALLVFFGDVGTDLWLALDYYRKGDYVYFGLTLFFVLVPSLLVQSLSFRWFVQDYTGGGLGAVEGLTSRGPPMMGAGYVHGAARGGPGVRVSPTPGAQRLCRLSVWIWQSVIHLLQMGQVWSGQDPLVPSRKRRSRFNHMKLPHLVSSLLPPPI

SEQ ID NO: 97998 - protein, 418 aa, Homo sapiens
  Payload ID: 19548
  Gene Name: XK, Kell blood group complex subunit-related family, member 6
  ENSP ID: ENSP00000371900
  MOD_RES (1)..(1): Any amino acid
XLFLLPSPGDEENCKHCVLLHAGLPQANRTAGYIRTMYLGIQSQRRKEHQRRFYWAMMYEYADVNMLRLLETFLESAPQLVLQLYIMLQKNSAETLPCVSSVTSLMSLAWVLASYHKLLRDSRDDKKSMSYRGAIIQVFWRLFTISSRVISFALFASIFQLYFGIFVVVHWCAMAFWIIHGGTDFCMSKWEEILFNMVVGIVYIFCWFNVKEGRTRYRMFAYYTIVLTENAALTFLWYFYRDPETTDSYAVPALCCVFISFVAGIAMMLLYYGVLHPTGPRAKILASSCCAELLWGIPLPPDVEPMAPEIPGYRGTQVTPTRAVTEQQEDLTADTCLPVFQVRPMGPPTPLGRPYLPEGPLIKIDMPRKRYPAWDAHFVDRRLRRTINILQYVTPTAVGIRYRDGPLLYELLQYESSL

SEQ ID NO: 97999 - protein, 641 aa, Homo sapiens
  Payload ID: 19548
  Gene Name: XK, Kell blood group complex subunit-related family, member 6
  Uniprot ID: Q5GH73
  ENSP ID: ENSP00000416707
MAAKSDGGGVGVGFAQLHNLDEAVGSGGEEDGEPGGGGCGGGGDGSEPGESSSMHICHCCNTSSCYWGCRSACLRSLLGRKPRRSAAADGGDQPLQPPAAPGAGRQPPTPSAARPEPPPPQVERPWLDCLWIVLALLVFFGDVGTDLWLALDYYRKGDYVYFGLTLFFVLVPSLLVQSLSFRWFVQDYTGGGLGAVEGLTSRGPPMMGAGYVHGAARGGPGVRVSPTPGAQRLCRLSVWIWQSVIHLLQMGQVWRYIRTMYLGIQSQRRKEHQRRFYWAMMYEYADVNMLRLLETFLESAPQLVLQLYIMLQKNSAETLPCVSSVTSLMSLAWVLASYHKLLRDSRDDKKSMSYRGAIIQVFWRLFTISSRVISFALFASIFQLYFGIFVVVHWCAMAFWIIHGGTDFCMSKWEEILFNMVVGIVYIFCWFNVKEGRTRYRMFAYYTIVLTENAALTFLWYFYRDPETTDSYAVPALCCVFISFVAGIAMMLLYYGVLHPTGPRAKILASSCCAELLWGIPLPPDVEPMAPEIPGYRGTQVTPTRAVTEQQEDLTADTCLPVFQVRPMGPPTPLGRPYLPEGPLIKIDMPRKRYPAWDAHFVDRRLRRTINILQYVTPTAVGIRYRDGPLLYELLQYESSL

SEQ ID NO: 98000 - protein, 92 aa, Homo sapiens
  Payload ID: 19548
  Gene Name: XK, Kell blood group complex subunit-related family, member 6
  ENSP ID: ENSP00000436594
  MOD_RES (1)..(1): Any amino acid
XLVPSLLVQSLSFRWFVQDYTGGGLGAVEGLTSRGPPMMGAGYVHGAARGGPGVRVSPTPGAQRLCRLSVWIWQSVIHLLQMGQVWSSKRKT

SEQ ID NO: 98001 - protein, 579 aa, Homo sapiens
  Payload ID: 19549
  Gene Name: XK, Kell blood group complex subunit-related family, member 7
  Uniprot ID: Q5GH72
  ENSP ID: ENSP00000477059
MAAKSDGAAASASPDPEGAAGGARGSAGGRGEAAAAAGPPGVVGAGGPGPRYELRDCCWVLCALLVFFSDGATDLWLAASYYLQNQHTYFSLTLLFVLLPSLVVQLLSFRWFVYDYSEPAGSPGPAVSTKDSVAGGAAISTKDSAGAFRTKEGSPEPGPQPAPSSASAYRRRCCRLCIWLLQTLVHLLQLGQVWRYLRALYLGLQSRWRGERLRRHFYWQMLFESADVSMLRLLETFLRSAPQLVLQLSLLVHRGGAPDLLPALSTSASLVSLAWTLASYQKVLRDSRDDKRPLSYKGAVAQVLWHLFSIAARGLAFALFASVYKLYFGIFIVAHWCVMTFWVIQGETDFCMSKWEEIIYNMVVGIIYIFCWFNVKEGRSRRRMTLYHCIVLLENAALTGFWYSSRNFSTDFYSLIMVCVVASSFALGIFFMCVYYCLLHPNGPMLGPQAPGCIFRKASEPCGPPADAITSPPRSLPRTTGAERDGASAGERAGTPTPPVFQVRPGLPPTPVARTLRTEGPVIRIDLPRKKYPAWDAHFIDRRLRKTILALEYSSPATPRLQYRSVGTSQELLEYETTV

SEQ ID NO: 98002 - protein, 395 aa, Homo sapiens
  Payload ID: 19550
  Gene Name: XK, Kell blood group complex subunit-related family, member 8
  Uniprot ID: Q9H6D3
  ENSP ID: ENSP00000362991
MPWSSRGALLRDLVLGVLGTAAFLLDLGTDLWAAVQYALGGRYLWAALVLALLGLASVALQLFSWLWLRADPAGLHGSQPPRRCLALLHLLQLGYLYRCVQELRQGLLVWQQEEPSEFDLAYADFLALDISMLRLFETFLETAPQLTLVLAIMLQSGRAEYYQWVGICTSFLGISWALLDYHRALRTCLPSKPLLGLGSSVIYFLWNLLLLWPRVLAVALFSALFPSYVALHFLGLWLVLLLWVWLQGTDFMPDPSSEWLYRVTVATILYFSWFNVAEGRTRGRAIIHFAFLLSDSILLVATWVTHSSWLPSGIPLQLWLPVGCGCFFLGLALRLVYYHWLHPSCCWKPDPDQVDGARSLLSPEGYQLPQNRRMTHLAQKFFPKAKDEAASPVKG

SEQ ID NO: 98003 - protein, 373 aa, Homo sapiens
  Payload ID: 19551
  Gene Name: XK, Kell blood group complex subunit-related family, member 9
  Uniprot ID: Q5GH70
  ENSP ID: ENSP00000386141
MKYTKQNFMMSVLGIIIYVTDLIVDIWVSVRFFHEGQYVFSALALSFMLFGTLVAQCFSYSWFKADLKKAGQESQHCFLLLHCLQGGVFTRYWFALKRGYHAAFKYDSNTSNFVEEQIDLHKEVIDRVTDLSMLRLFETYLEGCPQLILQLYILLEHGQANFSQYAAIMVSCCAISWSTVDYQVALRKSLPDKKLLNGLCPKITYLFYKLFTLLSWMLSVVLLLFLNVKIALFLLLFLWLLGIIWAFKNNTQFCTCISMEFLYRIVVGFILIFTFFNIKGQNTKCPMSCYYIVRVLGTLGILTVFWVCPLTIFNPDYFIPISITIVLTLLLGILFLIVYYGSFHPNRSAETKCDEIDGKPVLRECRMRYFLME

SEQ ID NO: 98004 - protein, 89 aa, Homo sapiens
  Payload ID: 19551
  Gene Name: XK, Kell blood group complex subunit-related family, member 9
  ENSP ID: ENSP00000428904
MKYTKQNFMMSVLGIIIYVTDLIVDIWVSVRFFHEGQYVFSALALSFMLFGTLVAQCFSYSWFKADLKKAGQESQHCFLLLHCLQGGVF

SEQ ID NO: 98005 - protein, 125 aa, Homo sapiens
  Payload ID: 19551
  Gene Name: XK, Kell blood group complex subunit-related family, member 9
  ENSP ID: ENSP00000430781
MKYTKQNFMMSVLGIIIYVTDLIVDIWVSVRFFHEGQYVFSALALSFMLFGTLVAQCFSYSWFKADLKKAGQESQHCFLLLHCLQGGVFTRALLCHPGWPAVAPSQLIAASTSLVQEILLHQLPE

SEQ ID NO: 98006 - protein, 373 aa, Homo sapiens; identical to SEQ ID NO: 98003
  Payload ID: 19551
  Gene Name: XK, Kell blood group complex subunit-related family, member 9
  Uniprot ID: Q5GH70
  ENSP ID: ENSP00000431088

SEQ ID NO: 98007 - protein, 449 aa, Homo sapiens
  Payload ID: 19552
  Gene Name: XK, Kell blood group complex subunit-related, X-linked
  Uniprot ID: Q6PP77
  ENSP ID: ENSP00000362047
MDRVYEIPEEPNVDPVSSLEEDVIRGANPRFTFPFSILFSTFLYCGEAASALYMVRIYRKNSETYWMTYTFSFFMFSSIMVQLTLIFVHRDLAKDKPLSLFMHLILLGPVIRCLEAMIKYLTLWKKEEQEEPYVSLTRKKMLIDGEEVLIEWEVGHSIRTLAMHRNAYKRMSQIQAFLGSVPQLTYQLYVSLISAEVPLGRVVLMVFSLVSVTYGATLCNMLAIQIKYDDYKIRLGPLEVLCITIWRTLEITSRLLILVLFSATLKLKAVPFLVLNFLIILFEPWIKFWRSGAQMPNNIEKNFSRVGTLVVLISVTILYAGINFSCWSALQLRLADRDLVDKGQNWGHMGLHYSVRLVENVIMVLVFKFFGVKVLLNYCHSLIALQLIIAYLISIGFMLLFFQYLHPLRSLFTHNVVDYLHCVCCHQHPRTRVENSEPPFETEARQSVV

SEQ ID NO: 98008 - protein, 139 aa, Homo sapiens
  Payload ID: 19552
  Gene Name: XK, Kell blood group complex subunit-related, X-linked
  ENSP ID: ENSP00000419884
MDRVYEIPEEPNVDPVSSLEEDVIRGANPRFTFPFSILFSTFLYCGEAASALYMVRIYRKNSETYWMTYTFSFFMFSSIMVQLTLIFVHRDLAKDKPLSLFMHLILLGPVISCANGIFPGICHLWGHPLQYVGYPDQVR

SEQ ID NO: 98009 - protein, 497 aa, Homo sapiens
  Payload ID: 19553
  Gene Name: X-linked inhibitor of apoptosis, E3 ubiquitin protein ligase
  Uniprot ID: P98170
  ENSP ID: ENSP00000347858
MTFNSFEGSKTCVPADINKEEEFVEEFNRLKTFANFPSGSPVSASTLARAGFLYTGEGDTVRCFSCHAAVDRWQYGDSAVGRHRKVSPNCRFINGFYLENSATQSTNSGIQNGQYKVENYLGSRDHFALDRPSETHADYLLRTGQVVDISDTIYPRNPAMYSEEARLKSFQNWPDYAHLTPRELASAGLYYTGIGDQVQCFCCGGKLKNWEPCDRAWSEHRRHFPNCFFVLGRNLNIRSESDAVSSDRNFPNSTNLPRNPSMADYEARIFTFGTWIYSVNKEQLARAGFYALGEGDKVKCFHCGGGLTDWKPSEDPWEQHAKWYPGCKYLLEQKGQEYINNIHLTHSLEECLVRTTEKTPSLTRRIDDTIFQNPMVQEAIRMGFSFKDIKKIMEEKIQISGSNYKSLEVLVADLVNAQKDSMQDESSQTSLQKEISTEEQLRRLQEEKLCKICMDRNIAIVFVPCGHLVTCKQCAEAVDKCPMCYTVITFKQKIFMS

SEQ ID NO: 98010 - protein, 497 aa, Homo sapiens; identical to SEQ ID NO: 98009
  Payload ID: 19553
  Gene Name: X-linked inhibitor of apoptosis, E3 ubiquitin protein ligase
  Uniprot ID: P98170
  ENSP ID: ENSP00000360242

SEQ ID NO: 98011 - protein, 497 aa, Homo sapiens; identical to SEQ ID NO: 98009
  Payload ID: 19553
  Gene Name: X-linked inhibitor of apoptosis, E3 ubiquitin protein ligase
  Uniprot ID: P98170
  ENSP ID: ENSP00000395230

SEQ ID NO: 98012 - protein, 156 aa, Homo sapiens
  Payload ID: 19553
  Gene Name: X-linked inhibitor of apoptosis, E3 ubiquitin protein ligase
  ENSP ID: ENSP00000400637
MTFNSFEGSKTCVPADINKEEEFVEEFNRLKTFANFPSGSPVSASTLARAGFLYTGEGDTVRCFSCHAAVDRWQYGDSAVGRHRKVSPNCRFINGFYLENSATQSTNSGIQNGQYKVENYLGSRDHFALDRPSETHADYLLRTGQVVDISDTIYPR

SEQ ID NO: 98013 - protein, 16 aa, Homo sapiens
  Payload ID: 19553
  Gene Name: X-linked inhibitor of apoptosis, E3 ubiquitin protein ligase
  ENSP ID: ENSP00000405529
MTFNSFEGSKTCVPAD

SEQ ID NO: 98014 - protein, 444 aa, Homo sapiens
  Payload ID: 19554
  Gene Name: X-linked Kx blood group
  Uniprot ID: P51811
  ENSP ID: ENSP00000367879
MKFPASVLASVFLFVAETTAALSLSSTYRSGGDRMWQALTLLFSLLPCALVQLTLLFVHRDLSRDRPLVLLLHLLQLGPLFRCFEVFCIYFQSGNNEEPYVSITKKRQMPKNGLSEEIEKEVGQAEGKLITHRSAFSRASVIQAFLGSAPQLTLQLYISVMQQDVTVGRSLLMTISLLSIVYGALRCNILAIKIKYDEYEVKVKPLAYVCIFLWRSFEIATRVVVLVLFTSVLKTWVVVIILINFFSFFLYPWILFWCSGSPFPENIEKALSRVGTTIVLCFLTLLYTGINMFCWSAVQLKIDSPDLISKSHNWYQLLVYYMIRFIENAILLLLWYLFKTDIYMYVCAPLLVLQLLIGYCTAILFMLVFYQFFHPCKKLFSSSVSEGFQRWLRCFCWACRQQKPCEPIGKEDLQSSRDRDETPSSSKTSPEPGQFLNAEDLCSA

SEQ ID NO: 98015 - protein, 855 aa, Homo sapiens
  Payload ID: 19555
  Gene Name: XPA binding protein 2
  Uniprot ID: Q9HCS7
  ENSP ID: ENSP00000351137
MVVMARLSRPERPDLVFEEEDLPYEEEIMRNQFSVKCWLRYIEFKQGAPKPRLNQLYERALKLLPCSYKLWYRYLKARRAQVKHRCVTDPAYEDVNNCHERAFVFMHKMPRLWLDYCQFLMDQGRVTHTRRTFDRALRALPITQHSRIWPLYLRFLRSHPLPETAVRGYRRFLKLSPESAEEYIEYLKSSDRLDEAAQRLATVVNDERFVSKAGKSNYQLWHELCDLISQNPDKVQSLNVDAIIRGGLTRFTDQLGKLWCSLADYYIRSGHFEKARDVYEEAIRTVMTVRDFTQVFDSYAQFEESMIAAKMETASELGREEEDDVDLELRLARFEQLISRRPLLLNSVLLRQNPHHVHEWHKRVALHQGRPREIINTYTEAVQTVDPFKATGKPHTLWVAFAKFYEDNGQLDDARVILEKATKVNFKQVDDLASVWCQCGELELRHENYDEALRLLRKATALPARRAEYFDGSEPVQNRVYKSLKVWSMLADLEESLGTFQSTKAVYDRILDLRIATPQIVINYAMFLEEHKYFEESFKAYERGISLFKWPNVSDIWSTYLTKFIARYGGRKLERARDLFEQALDGCPPKYAKTLYLLYAQLEEEWGLARHAMAVYERATRAVEPAQQYDMFNIYIKRAAEIYGVTHTRGIYQKAIEVLSDEHAREMCLRFADMECKLGEIDRARAIYSFCSQICDPRTTGAFWQTWKDFEVRHGNEDTIKEMLRIRRSVQATYNTQVNFMASQMLKVSGSATGTVSDLAPGQSGMDDMKLLEQRAEQLAAEAERDQPLRAQSKILFVRSDASREELAELAQQVNPEEIQLGEDEDEDEMDLEPNEVRLEQQSVPAAVFGSLKED

SEQ ID NO: 98016 - protein, 642 aa, Homo sapiens
  Payload ID: 19556
  Gene Name: X-prolyl aminopeptidase (aminopeptidase P) 1, soluble
  Uniprot ID: Q9NQW7
  ENSP ID: ENSP00000324011
MAASRKPPRVRVNHQDFQLRNLRIIEPNEVTHSGDTGVETDGRMPPKVTSELLRQLRQAMRNSEYVTEPIQAYIIPSGDAHQSEYIAPCDCRRAFVSGFDGSAGTAIITEEHAAMWTDGRYFLQAAKQMDSNWTLMKMGLKDTPTQEDWLVSVLPEGSRVGVDPLIIPTDYWKKMAKVLRSAGHHLIPVKENLVDKIWTDRPERPCKPLLTLGLDYTGISWKDKVADLRLKMAERNVMWFVVTALDEIAWLFNLRGSDVEHNPVFFSYAIIGLETIMLFIDGDRIDAPSVKEHLLLDLGLEAEYRIQVHPYKSILSELKALCADLSPREKVWVSDKASYAVSETIPKDHRCCMPYTPICIAKAVKNSAESEGMRRAHIKDAVALCELFNWLEKEVPKGGVTEISAADKAEEFRRQQADFVDLSFPTISSTGPNGAIIHYADGTTDVTRTMHFGTPTAYEKECFTYVLKGHIAVSAAVFPTGTKGHLLDSFARSALWDSGLDYLHGTGHGVGSFLNVHEGPCGISYKTFSDEPLEAGMIVTDEPGYYEDGAFGIRIENVVLVVPVKTKYNFNNRGSLTFEPLTLVPIQTKMIDVDSLTDKECDWLNNYHLTCRDVIGKELQKQGRQEALEWLIRETQPISKQH

SEQ ID NO: 98017 - protein, 552 aa, Homo sapiens
  Payload ID: 19556
  Gene Name: X-prolyl aminopeptidase (aminopeptidase P) 1, soluble
  ENSP ID: ENSP00000358697
MWTDGRYFLQAAKQMDSNWTLMKMGLKDTPTQEDWLVSVLPEGSRVGVDPLIIPTDYWKKMAKVLRSAGHHLIPVKENLVDKIWTDRPERPCKPLLTLGLDYTGISWKDKVADLRLKMAERNVMWFVVTALDEIAWLFNLRGSDVEHNPVFFSYAIIGLETIMLFIDGDRIDAPSVKEHLLLDLGLEAEYRIQVHPYKSILSELKALCADLSPREKVWVSDKASYAVSETIPKDHRCCMPYTPICIAKAVKNSAESEGMRRAHIKDAVALCELFNWLEKEVPKGGVTEISAADKAEEFRRQQADFVDLSFPTISSTGPNGAIIHYAPVPETNRTLSLDEVYLIDSGAQYKDGTTDVTRTMHFGTPTAYEKECFTYVLKGHIAVSAAVFPTGTKGHLLDSFARSALWDSGLDYLHGTGHGVGSFLNVHEGPCGISYKTFSDEPLEAGMIVTDEPGYYEDGAFGIRIENVVLVVPVKTKYNFNNRGSLTFEPLTLVPIQTKMIDVDSLTDKECDWLNNYHLTCRDVIGKELQKQGRQEALEWLIRETQPISKQH

SEQ ID NO: 98018 - protein, 303 aa, Homo sapiens
  Payload ID: 19556
  Gene Name: X-prolyl aminopeptidase (aminopeptidase P) 1, soluble
  ENSP ID: ENSP00000385388
MPPKVTSELLRQLRQAMRNSEYVTEPIQAYIIPSGDAHQSEYIAPCDCRRAFVSGFDGSAGTAIITEEHAAMWTDGRYFLQAAKQMDSNWTLMKMGLKDTPTQEDWLVSVLPEGSRVGVDPLIIPTDYWKKMAKVLRSAGHHLIPVKENLVDKIWTDRPERPCKPLLTLGLDYTGISWKDKVADLRLKMAERNVMWFVVTALDEIAWLFNLRGSDVEHNPVFFSYAIIGLETIMLFIDGDRIDAPSVKEHLLLDLGLEAEYRIQVHPYKSILSELKALCADLSPREKVWVSDKASYAVSETIP

SEQ ID NO: 98019 - protein, 233 aa, Homo sapiens
  Payload ID: 19556
  Gene Name: X-prolyl aminopeptidase (aminopeptidase P) 1, soluble
  ENSP ID: ENSP00000410318
MPPKVTSELLRQLRQAMRNSEYVTEPIQAYIIPSGDAHQSEYIAPCDCRRAFVSGFDGSAGTAIITEEHAAMWTDGRYFLQAAKQMDSNWTLMKMGLKDTPTQEDWLVSVLPEGSRVGVDPLIIPTDYWKKMAKVLRSAGHHLIPVKENLVDKIWTDRPERPCKPLLTLGLDYTGLFNLRGSDVEHNPVFFSYAIIGLETIMLFIDGDRIDAPSVKEHLLLDLGLEAEYRIQV

SEQ ID NO: 98020 - protein, 666 aa, Homo sapiens
  Payload ID: 19556
  Gene Name: X-prolyl aminopeptidase (aminopeptidase P) 1, soluble
  Uniprot ID: Q9NQW7
  ENSP ID: ENSP00000421566
MAASRKPPRVRVNHQDFQLRNLRIIEPNEVTHSGDTGVETDGRMPPKVTSELLRQLRQAMRNSEYVTEPIQAYIIPSGDAHQSEYIAPCDCRRAFVSGFDGSAGTAIITEEHAAMWTDGRYFLQAAKQMDSNWTLMKMGLKDTPTQEDWLVSVLPEGSRVGVDPLIIPTDYWKKMAKVLRSAGHHLIPVKENLVDKIWTDRPERPCKPLLTLGLDYTGISWKDKVADLRLKMAERNVMWFVVTALDEIAWLFNLRGSDVEHNPVFFSYAIIGLETIMLFIDGDRIDAPSVKEHLLLDLGLEAEYRIQVHPYKSILSELKALCADLSPREKVWVSDKASYAVSETIPKDHRCCMPYTPICIAKAVKNSAESEGMRRAHIKDAVALCELFNWLEKEVPKGGVTEISAADKAEEFRRQQADFVDLSFPTISSTGPNGAIIHYAPVPETNRTLSLDEVYLIDSGAQYKDGTTDVTRTMHFGTPTAYEKECFTYVLKGHIAVSAAVFPTGTKGHLLDSFARSALWDSGLDYLHGTGHGVGSFLNVHEGPCGISYKTFSDEPLEAGMIVTDEPGYYEDGAFGIRIENVVLVVPVKTKYNFNNRGSLTFEPLTLVPIQTKMIDVDSLTDKECDWLNNYHLTCRDVIGKELQKQGRQEALEWLIRETQPISKQH

SEQ ID NO: 98021 - protein, 183 aa, Homo sapiens
  Payload ID: 19557
  Gene Name: X-prolyl aminopeptidase (aminopeptidase P) 2, membrane-bound
  ENSP ID: ENSP00000360146
MARAHWGCCPWLVLLCACAWGHTKPVDLGGQDVRNCSTNPPYLPVTVVNTTMSLTALRQQMQTQNLSAYIIPGTDAHMNEYIGQHDERRAWITGFTGSAGTAVVTMKKAAVWTDSRYWTQAERQMDCNWELHKEVGTTPIVTWLLTEIPAGGRVGFDPFLLSIGMLFLQSLNLSMLTRVTQLP

SEQ ID NO: 98022 - protein, 674 aa, Homo sapiens
  Payload ID: 19557
  Gene Name: X-prolyl aminopeptidase (aminopeptidase P) 2, membrane-bound
  Uniprot ID: O43895
  ENSP ID: ENSP00000360147
MARAHWGCCPWLVLLCACAWGHTKPVDLGGQDVRNCSTNPPYLPVTVVNTTMSLTALRQQMQTQNLSAYIIPGTDAHMNEYIGQHDERRAWITGFTGSAGTAVVTMKKAAVWTDSRYWTQAERQMDCNWELHKEVGTTPIVTWLLTEIPAGGRVGFDPFLLSIDTWESYDLALQGSNRQLVSITTNLVDLVWGSERPPVPNQPIYALQEAFTGSTWQEKVSGVRSQMQKHQKVPTAVLLSALEETAWLFNLRASDIPYNPFFYSYTLLTDSSIRLFANKSRFSSETLSYLNSSCTGPMCVQIEDYSQVRDSIQAYSLGDVRIWIGTSYTMYGIYEMIPKEKLVTDTYSPVMMTKAVKNSKEQALLKASHVRDAVAVIRYLVWLEKNVPKGTVDEFSGAEIVDKFRGEEQFSSGPSFETISASGLNAALAHYSPTKELNRKLSSDEMYLLDSGGQYWDGTTDITRTVHWGTPSAFQKEAYTRVLIGNIDLSRLIFPAATSGRMVEAFARRALWDAGLNYGHGTGHGIGNFLCVHEWPVGFQSNNIAMAKGMFTSIEPGYYKDGEFGIRLEDVALVVEAKTKYPGSYLTFEVVSFVPYDRNLIDVSLLSPEHLQYLNRYYQTIREKVGPELQRRQLLEEFEWLQQHTEPLAARAPDTASWASVLVVSTLAILGWSV

SEQ ID NO: 98023 - protein, 507 aa, Homo sapiens
  Payload ID: 19558
  Gene Name: X-prolyl aminopeptidase 3, mitochondrial
  Uniprot ID: Q9NQH7
  ENSP ID: ENSP00000349658
MPWLLSAPKLVPAVANVRGLSGCMLCSQRRYSLQPVPERRIPNRYLGQPSPFTHPHLLRPGEVTPGLSQVEYALRRHKLMSLIQKEAQGQSGTDQTVVVLSNPTYYMSNDIPYTFHQDNNFLYLCGFQEPDSILVLQSLPGKQLPSHKAILFVPRRDPSRELWDGPRSGTDGAIALTGVDEAYTLEEFQHLLPKMKAETNMVWYDWMRPSHAQLHSDYMQPLTEAKAKSKNKVRGVQQLIQRLRLIKSPAEIERMQIAGKLTSQAFIETMFTSKAPVEEAFLYAKFEFECRARGADILAYPPVVAGGNRSNTLHYVKNNQLIKDGEMVLLDGGCESSCYVSDITRTWPVNGRFTAPQAELYEAVLEIQRDCLALCFPGTSLENIYSMMLTLIGQKLKDLGIMKNIKENNAFKAARKYCPHHVGHYLGMDVHDTPDMPRSLPLQPGMVITIEPGIYIPEDDKDAPEKFRGLGVRIEDDVVVTQDSPLILSADCPKEMNDIEQICSQAS

SEQ ID NO: 98024 - protein, 69 aa, Homo sapiens
  Payload ID: 19558
  Gene Name: X-prolyl aminopeptidase 3, mitochondrial
  ENSP ID: ENSP00000394283
MPWLLSAPKLVPAVANVRGLSGCMLCSQRRYSLQPVPERRIPNRYLGQPSPFTHPHLLRPDSNSCWEVG

SEQ ID NO: 98025 - protein, 55 aa, Homo sapiens
  Payload ID: 19558
  Gene Name: X-prolyl aminopeptidase 3, mitochondrial
  ENSP ID: ENSP00000483752
MPWLLSAPKLVPAVANVRGLSGSYFVTQAGVQWRDPITLQPMSSRLKQSFYQLPE

SEQ ID NO: 98026 - protein, 517 aa, Homo sapiens
  Payload ID: 19559
  Gene Name: X-ray radiation resistance associated 1
  Uniprot ID: Q6P2D8
  ENSP ID: ENSP00000319303
MLDDNRLSNPSCFASLAGLRRLKKLSLDENRIIRIPYLQQVQLYDESVDWNGGRGSPHKEPQFMLQSKPRMLEDSDEQLDYTVLPMKKDVDRTEVVFSSYPGFSTSEIAKEDAVLPVALFPSLCEFVFHNNPLVAHTRGVPPLLKSFLQERLGIHLIRRKIVKPKHHVLMSRKESWKVKSEIPKVPKQPLVLHHPRMTTTKSPSKDMLEPEAELAEDLPTTKSTSVESEMPTENLEGHSPSCRTFVPLPPICSNSTVHSEETLSHLSDTTVRLSPERPSDEDSKSTESIFLTQVSELPSSVIHKDDLELKEKDQKKPPTAPREVKGTRRKLPTAFLPSKYHGYEELLTAKPDPAFIEPKGIQKNAQALQQMLKHPLLCHSSKPKLDTLQKPYVHKEKRAQRIPIPPPKKTRAQLLDDIFIRLRDPRNITEAPLGAVLHQWTERRLVNHKQYLEAKRLLKEFQARYRQLVSGSLRTVFGTTPLPMACPALSESQPKFGHFLEFMDEFCQEPTASDSQG

SEQ ID NO: 98027 - protein, 792 aa, Homo sapiens
  Payload ID: 19559
  Gene Name: X-ray radiation resistance associated 1
  Uniprot ID: Q6P2D8
  ENSP ID: ENSP00000339918
MAFSGIYKLDDGKPYLNNCFPARNLLRVPEEGQGHWLVVQKGNLKKKPKGLVGAQAERRESLKATSFEFKGKKESRRENQVDLPGHILDQAFLLKHHCVRKPSDLCTINAKENDFKHFHSVIYINASENLLPLEAFHTFPALKELDLAFNGIKTIYVKYGDFKLLEFLDLSFNSLTVEAICDLGILPHLRVLLLTGNGLTSLPPNLAVAEQEASVTSLTSKRYILRFPALETLMLDDNRLSNPSCFASLAGLRRLKKLSLDENRIIRIPYLQQVQLYDESVDWNGGRGSPHKEPQFMLQSKPRMLEDSDEQLDYTVLPMKKDVDRTEVVFSSYPGFSTSETTKICSLPPIFEILPVKSLKARNQTLAPPFPELRYLSLAYNKIAKEDAVLPVALFPSLCEFVFHNNPLVAHTRGVPPLLKSFLQERLGIHLIRRKIVKPKHHVLMSRKESWKVKSEIPKVPKQPLVLHHPRMTTTKSPSKDMLEPEAELAEDLPTTKSTSVESEMPTENLEGHSPSCRTFVPLPPICSNSTVHSEETLSHLSDTTVRLSPERPSDEDSKSTESIFLTQVSELPSSVIHKDDLELKEKDQKKPPTAPREVKGTRRKLPTAFLPSKYHGYEELLTAKPDPAFIEPKGIQKNAQALQQMLKHPLLCHSSKPKLDTLQKPYVHKEKRAQRIPIPPPKKTRAQLLDDIFIRLRDPRNITEAPLGAVLHQWTERRLVNHKQYLEAKRLLKEFQARYRQLVSGSLRTVFGTTPLPMACPALSESQPKFGHFLEFMDEFCQEPTASDSQG

SEQ ID NO: 98028 - protein, 63 aa, Homo sapiens
  Payload ID: 19559
  Gene Name: X-ray radiation resistance associated 1
  ENSP ID: ENSP00000432689
  MOD_RES (1)..(1): Any amino acid
XRGSPHKEPQFMLQSKPRMLEDSDEQLDYTVLPMKKDVDRTDRKRGCCPTSSSLPISLRVRLS

SEQ ID NO: 98029 - protein, 115 aa, Homo sapiens
  Payload ID: 19559
  Gene Name: X-ray radiation resistance associated 1
  ENSP ID: ENSP00000433431
MLDDNRLSNPSCFASLAGLRRLKKLSLDENRIIRIPYLQQVQLYDESVDWNGGRGSPHKEPQFMLQSKPRMLEDSDEQLDYTVLPMKKDVDRTDRKRGCCPTSSSLPISLRVRLS

SEQ ID NO: 98030 - protein, 19 aa, Homo sapiens
  Payload ID: 19559
  Gene Name: X-ray radiation resistance associated 1
  ENSP ID: ENSP00000433940
MLDDNRLSNPSCFASLAGL

SEQ ID NO: 98031 - protein, 55 aa, Homo sapiens
  Payload ID: 19559
  Gene Name: X-ray radiation resistance associated 1
  ENSP ID: ENSP00000435662
MLDDNRLSNPSCFASLAGLRRLKKLSLDENRIIRIPYLQQVQLYDESVDWNGGRG

SEQ ID NO: 98032 - protein, 598 aa, Homo sapiens
  Payload ID: 19559
  Gene Name: X-ray radiation resistance associated 1
  Uniprot ID: Q6P2D8
  ENSP ID: ENSP00000435838
MAFSGIYKLDDGKPYLNNCFPARNLLRVPEEGQGHWLVVQKGNLKKKPKGLVGAQAERRESLKATSFEFKGKKESRRENQVDLPGHILDQAFLLKHHCVRKPSDLCTINAKENDFKHFHSVIYINASENLLPLEAFHTFPALKELDLAFNGIKTIYVKYGDFKLLEFLDLSFNSLTVEAICDLGILPHLRVLLLTGNGLTSLPPNLAVAEQEASVTSLTSKRYILRFPALETLMLDDNRLSNPSCFASLAGLRRLKKLSLDENRIIRIPYLQQVQLYDESVDWNGGRGSPHKEPQFMLQSKPRMLEDSDEQLDYTVLPMKKDVDRTGVPPLLKSFLQERLGIHLIRRKIVKPKHHVLMSRKESWKVKSEIPKVPKQPLVLHHPRMTTTKSPSKDMLEPEAELAEDLPTTKSTSVESEMPTENLEGHSPSCRTFVPLPPICSNSTVHSEETLSHLSDTTVRLSPERPSDEDSKSTESIFLTQVSELPSSVIHKDDLELKEKDQKKPPTAPREVKGTRRKLPTAFLPSKYHGYEELLTAKPDPAFIEPKGIQKNAQALQQMLKHPLLCHSSKPKLDTLQKPYVHKEKRVLSCTSGQNGGW

SEQ ID NO: 98033 - protein, 241 aa, Homo sapiens
  Payload ID: 19559
  Gene Name: X-ray radiation resistance associated 1
  ENSP ID: ENSP00000436390
MSRKESWKVKSEIPKVPKQPLVLHHPRMTTTKSPSKDMLEPEAELAEDLPTTKSTSVESEMPTENLEGHSPSCRTFVPLPPICSNSTVHSEETLSHLSDTTVRLSPERPSDEDSKSTESIFLTQVSELPSSVIHKDDLELKEKDQKKPPTAPREVKGTRRKLPTAFLPSKYHGYEELLTAKPDPAFIEPKGIQKNAQALQQMLKHPLLCHSSKPKLDTLQKPYVHKEKRVLSCTSGQNGGW

SEQ ID NO: 98034 - protein, 296 aa, Homo sapiens
  Payload ID: 19559
  Gene Name: X-ray radiation resistance associated 1
  ENSP ID: ENSP00000437334
MAFSGIYKLDDGKPYLNNCFPARNLLRVPEEGQGHWLVVQKGNLKKKPKGLVGAQAERRESLKATSFEFKGKKESRRENQVDLPGHILDQAFLLKHHCVRKPSDLCTINVSGLKFSKAKENDFKHFHSVIYINASENLLPLEAFHTFPALKELDLAFNGIKTIYVKYGDFKLLEFLDLSFNSLTVEAICDLGILPHLRVLLLTGNGLTSLPPNLAVAEQEASVTSLTSKRYILRFPALETLMLDDNRLSNPSCFASLAGLRRLKKLSLDENRIIRIPYLQQVQLYDESVDWNGGRG

SEQ ID NO: 98035 - protein, 633 aa, Homo sapiens
  Payload ID: 19560
  Gene Name: X-ray repair complementing defective repair in Chinese hamster cells 1
  Uniprot ID: P18887
  ENSP ID: ENSP00000262887
MPEIRLRHVVSCSSQDSTHCAENLLKADTYRKWRAAKAGEKTISVVLQLEKEEQIHSVDIGNDGSAFVEVLVGSSAGGAGEQDYEVLLVTSSFMSPSESRSGSNPNRVRMFGPDKLVRAAAEKRWDRVKIVCSQPYSKDSPFGLSFVRFHSPPDKDEAEAPSQKVTVTKLGQFRVKEEDESANSLRPGALFFSRINKTSPVTASDPAGPSYAAATLQASSAASSASPVSRAIGSTSKPQESPKGKRKLDLNQEEKKTPSKPPAQLSPSVPKRPKLPAPTRTPATAPVPARAQGAVTGKPRGEGTEPRRPRAGPEELGKILQGVVVVLSGFQNPFRSELRDKALELGAKYRPDWTRDSTHLICAFANTPKYSQVLGLGGRIVRKEWVLDCHRMRRRLPSQRYLMAGPGSSSEEDEASHSGGSGDEAPKLPQKQPQTKTKPTQAAGPSSPQKPPTPEETKAASPVLQEDIDIEGVQSEGQDNGAEDSGDTEDELRRVAEQKEHRLPPGQEENGEDPYAGSTDENTDSEEHQEPPDLPVPELPDFFQGKHFFLYGEFPGDERRKLIRYVTAFNGELEDYMSDRVQFVITAQEWDPSFEEALMDNPSLAFVRPRWIYSCNEKQKLLPHQLYGVVPQA

SEQ ID NO: 98036 - protein, 602 aa, Homo sapiens
  Payload ID: 19560
  Gene Name: X-ray repair complementing defective repair in Chinese hamster cells 1
  ENSP ID: ENSP00000443671
MPEIRLRHVVSCSSQDSLEKEEQIHSVDIGNDGSAFVEVLVGSSAGGAGEQDYEVLLVTSSFMSPSESRSGSNPNRVRMFGPDKLVRAAAEKRWDRVKIVCSQPYSKDSPFGLSFVRFHSPPDKDEAEAPSQKVTVTKLGQFRVKEEDESANSLRPGALFFSRINKTSPVTASDPAGPSYAAATLQASSAASSASPVSRAIGSTSKPQESPKGKRKLDLNQEEKKTPSKPPAQLSPSVPKRPKLPAPTRTPATAPVPARAQGAVTGKPRGEGTEPRRPRAGPEELGKILQGVVVVLSGFQNPFRSELRDKALELGAKYRPDWTRDSTHLICAFANTPKYSQVLGLGGRIVRKEWVLDCHRMRRRLPSQRYLMAGPGSSSEEDEASHSGGSGDEAPKLPQKQPQTKTKPTQAAGPSSPQKPPTPEETKAASPVLQEDIDIEGVQSEGQDNGAEDSGDTEDELRRVAEQKEHRLPPGQEENGEDPYAGSTDENTDSEEHQEPPDLPVPELPDFFQGKHFFLYGEFPGDERRKLIRYVTAFNGELEDYMSDRVQFVITAQEWDPSFEEALMDNPSLAFVRPRWIYSCNEKQKLLPHQLYGVVPQA

SEQ ID NO: 98037 - protein, 292 aa, Homo sapiens
  Payload ID: 19560
  Gene Name: X-ray repair complementing defective repair in Chinese hamster cells 1
  ENSP ID: ENSP00000470045
MVTPQTSQRGSLAAPLGYFQVLFKTHCAENLLKADTYRKWRAAKAGEKTISVVLQLEKEEQIHSVDIGNDGSAFVEVLVGSSAGGAGEQDYEVLLVTSSFMSPSESRSGSNPNRVRMFGPDKLVRAAAEKRWDRVKIVCSQPYSKDSPFGLSFVRFHSPPDKDEAEAPSQKVTVTKLGQFRVKEEDESANSLRPGALFFSRINKTSPVTASDPAGPSYAAATLQASSAASSASPVSRAIGSTSKPQESPKGKRKLDLNQEEKKTPSKPPAQLSPSVPKRPKLPAPTRTPATA

SEQ ID NO: 98038 - protein, 165 aa, Homo sapiens
  Payload ID: 19560
  Gene Name: X-ray repair complementing defective repair in Chinese hamster cells 1
  ENSP ID: ENSP00000470391
  MOD_RES (1)..(1): Any amino acid
XGSSAGGAGEQDYEVLLVTSSFMSPSESRSGSNPNRVRMFGPDKLVRAAAEKRWDRVKIVCSQPYSKDSPFGLSFVRFHSPPDKDEAEAPSQKVTVTKLGQFRVKEEDESANSLRPGALFFSRINKTSPANHQPSCRHLFPRDLNCQLQLVPQPQPQSLPEHRGQ

SEQ ID NO: 98039 - protein, 172 aa, Homo sapiens
  Payload ID: 19560
  Gene Name: X-ray repair complementing defective repair in Chinese hamster cells 1
  ENSP ID: ENSP00000471159
MPEIRLRHVVSCSSQDSTHCAENLLKADTYRKWRAAKAGEKTISVVLQVLLVTSSFMSPSESRSGSNPNRVRMFGPDKLVRAAAEKRWDRVKIVCSQPYSKDSPFGLSFVRFHSPPDKDEAEAPSQKVTVTKLGQFRVKEEDESANSLRPGALFFSRINKTSPVTASDPAGP

SEQ ID NO: 98040 - protein, 210 aa, Homo sapiens
  Payload ID: 19560
  Gene Name: X-ray repair complementing defective repair in Chinese hamster cells 1
  ENSP ID: ENSP00000472128
  MOD_RES (1)..(1): Any amino acid
XVTPQTSQRGSLAAPLGYFQVLFKLEKEEQIHSVDIGNDGSAFVEVLVGSSAGGAGEQDYEVLLVTSSFMSPSESRSGSNPNRVRMFGPDKLVRAAAEKRWDRVKIVCSQPYSKDSPFGLSFVRFHSPPDKDEAEAPSQKVTVTKLGQFRVKEEDESANSLRPGALFFSRINKTSPVTASDPAGPSYAAATLQASSAASSASPVSRAIGS

SEQ ID NO: 98041 - protein, 280 aa, Homo sapiens
  Payload ID: 19561
  Gene Name: X-ray repair complementing defective repair in Chinese hamster cells 2
  Uniprot ID: O43543
  ENSP ID: ENSP00000352271
MCSAFHRAESGTELLARLEGRSSLKEIEPNLFADEDSPVHGDILEFHGPEGTGKTEMLYHLTARCILPKSEGGLEVEVLFIDTDYHFDMLRLVTILEHRLSQSSEEIIKYCLGRFFLVYCSSSTHLLLTLYSLESMFCSHPSLCLLILDSLSAFYWIDRVNGGESVNLQESTLRKCSQCLEKLVNDYRLVLFATTQTIMQKASSSSEEPSHASRRLCDVDIDYRPYLCKAWQQLVKHRMFFSKQDDSQSSNQFSLVSRCLKSNSLKKHFFIIGESGVEFC

SEQ ID NO: 98042 - protein, 346 aa, Homo sapiens
  Payload ID: 19562
  Gene Name: X-ray repair complementing defective repair in Chinese hamster cells 3
  Uniprot ID: O43542
  ENSP ID: ENSP00000343392
MDLDLLDLNPRIIAAIKKAKLKSVKEVLHFSGPDLKRLTNLSSPEVWHLLRTASLHLRGSSILTALQLHQQKERFPTQHQRLSLGCPVLDALLRGGLPLDGITELAGRSSAGKTQLALQLCLAVQFPRQHGGLEAGAVYICTEDAFPHKRLQQLMAQQPRLRTDVPGELLQKLRFGSQIFIEHVADVDTLLECVNKKVPVLLSRGMARLVVIDSVAAPFRCEFDSQASAPRARHLQSLGATLRELSSAFQSPVLCINQVTEAMEEQGAAHGPLGFWDERVSPALGITWANQLLVRLLADRLREEEAALGCPARTLRVLSAPHLPPSSCSYTISAEGVRGTPGTQSH

SEQ ID NO: 98043 - protein, 45 aa, Homo sapiens
  Payload ID: 19562
  Gene Name: X-ray repair complementing defective repair in Chinese hamster cells 3
  ENSP ID: ENSP00000450738
MDLDLLDLNPRIIAAIKKAKLKSVKEVLHFSGPDLKRLTNLSSPE

SEQ ID NO: 98044 - protein, 47 aa, Homo sapiens
  Payload ID: 19562
  Gene Name: X-ray repair complementing defective repair in Chinese hamster cells 3
  ENSP ID: ENSP00000450780
MDLDLLDLNPRIIAAIKKAKLKSVKEVLHFSGPDLKRLTNLSSPEVW

SEQ ID NO: 98045 - protein, 150 aa, Homo sapiens
  Payload ID: 19562
  Gene Name: X-ray repair complementing defective repair in Chinese hamster cells 3
  ENSP ID: ENSP00000451118
MDLDLLDLNPRIIAAIKKAKLKSVKEVLHFSGPDLKRLTNLSSPEVWHLLRTASLHLRGSSILTALQLHQQKERFPTQHQRLSLGCPVLDALLRGGLPLDGITELAGRSSAGKTQLALQLCLAVQFPRQHGGLEAEWQYFFIGGTSEHIC

SEQ ID NO: 98046 - protein, 102 aa, Homo sapiens
  Payload ID: 19562
  Gene Name: X-ray repair complementing defective repair in Chinese hamster cells 3
  ENSP ID: ENSP00000451173
MDLDLLDLNPRIIAAIKKAKLKSVKEVLHFSGPDLKRLTNLSSPEVWHLLRTASLHLRGSSILTALQLHQQKERFPTQHQRLSLGCPVLDALLRGGLPLDGI

SEQ ID NO: 98047 - protein, 112 aa, Homo sapiens
  Payload ID: 19562
  Gene Name: X-ray repair complementing defective repair in Chinese hamster cells 3
  ENSP ID: ENSP00000451252
MDLDLLDLNPRIIAAIKKAKLKSVKEVLHFSGPDLKRLTNLSSPEVWHLLRTASLHLRGSSILTALQLHQQKERFPTQHQRLSLGCPVLDALLRGGLPLDGITELAGRSSAG

SEQ ID NO: 98048 - protein, 141 aa, Homo sapiens
  Payload ID: 19562
  Gene Name: X-ray repair complementing defective repair in Chinese hamster cells 3
  ENSP ID: ENSP00000451361
MARLVVIDSVAAPFRCEFDSQASAPRARHLQSLGATLRELSSAFQSPVLCINQVTEAMEEQGAAHGPLGFWDERVSPALGITWANQLLVRLLADRLREEEAALGCPARTLRVLSAPHLPPSSCSYTISAEGVRGTPGTQSH

SEQ ID NO: 98049 - protein, 346 aa, Homo sapiens; identical to SEQ ID NO: 98042
  Payload ID: 19562
  Gene Name: X-ray repair complementing defective repair in Chinese hamster cells 3
  Uniprot ID: O43542
  ENSP ID: ENSP00000451362

SEQ ID NO: 98050 - protein, 346 aa, Homo sapiens; identical to SEQ ID NO: 98042
  Payload ID: 19562
  Gene Name: X-ray repair complementing defective repair in Chinese hamster cells 3
  Uniprot ID: O43542
  ENSP ID: ENSP00000451974

SEQ ID NO: 98051 - protein, 61 aa, Homo sapiens
  Payload ID: 19562
  Gene Name: X-ray repair complementing defective repair in Chinese hamster cells 3
  ENSP ID: ENSP00000452389
MDLDLLDLNPRIIAAIKKAKLKSVKEVLHFSGPDLKRLTNLSSPEVWHLLRTASLHLRGSS

SEQ ID NO: 98052 - protein, 346 aa, Homo sapiens; identical to SEQ ID NO: 98042
  Payload ID: 19562
  Gene Name: X-ray repair complementing defective repair in Chinese hamster cells 3
  Uniprot ID: O43542
  ENSP ID: ENSP00000452598

SEQ ID NO: 98053 - protein, 150 aa, Homo sapiens; identical to SEQ ID NO: 98045
  Payload ID: 19562
  Gene Name: X-ray repair complementing defective repair in Chinese hamster cells 3
  ENSP ID: ENSP00000473569

SEQ ID NO: 98054 - protein, 334 aa, Homo sapiens
  Payload ID: 19563
  Gene Name: X-ray repair complementing defective repair in Chinese hamster cells 4
  Uniprot ID: Q13426
  ENSP ID: ENSP00000282268
MERKISRIHLVSEPSITHFLQVSWEKTLESGFVITLTDGHSAWTGTVSESEISQEADDMAMEKGKYVGELRKALLSGAGPADVYTFNFSKESCYFFFEKNLKDVSFRLGSFNLEKVENPAEVIRELICYCLDTIAENQAKNEHLQKENERLLRDWNDVQGRFEKCVSAKEALETDLYKRFILVLNEKKTKIRSLHNKLLNAAQEREKDIKQEGETAICSEMTADRDPVYDESTDEESENQTDLSGLASAAVSKDDSIISSLDVTDIAPSRKRRQRMQRNLGTEPKMAPQENQLQEKEKPDSSLPETSKKEHISAENMSLETLRNSSPEDLFDEI

SEQ ID NO: 98055 - protein, 336 aa, Homo sapiens
  Payload ID: 19563
  Gene Name: X-ray repair complementing defective repair in Chinese hamster cells 4
  Uniprot ID: Q13426
  ENSP ID: ENSP00000342011
MERKISRIHLVSEPSITHFLQVSWEKTLESGFVITLTDGHSAWTGTVSESEISQEADDMAMEKGKYVGELRKALLSGAGPADVYTFNFSKESCYFFFEKNLKDVSFRLGSFNLEKVENPAEVIRELICYCLDTIAENQAKNEHLQKENERLLRDWNDVQGRFEKCVSAKEALETDLYKRFILVLNEKKTKIRSLHNKLLNAAQEREKDIKQEGETAICSEMTADRDPVYDESTDEESENQTDLSGLASAAVSKDDSIISSLDVTDIAPSRKRRQRMQRNLGTEPKMAPQENQLQEKENSRPDSSLPETSKKEHISAENMSLETLRNSSPEDLFDEI

SEQ ID NO: 98056 - protein, 334 aa, Homo sapiens; identical to SEQ ID NO: 98054
  Payload ID: 19563
  Gene Name: X-ray repair complementing defective repair in Chinese hamster cells 4
  Uniprot ID: Q13426
  ENSP ID: ENSP00000379344

SEQ ID NO: 98057 - protein, 336 aa, Homo sapiens; identical to SEQ ID NO: 98055
  Payload ID: 19563
  Gene Name: X-ray repair complementing defective repair in Chinese hamster cells 4
  Uniprot ID: Q13426
  ENSP ID: ENSP00000421491

SEQ ID NO: 98058 - protein, 732 aa, Homo sapiens
  Payload ID: 19564
  Gene Name: X-ray repair complementing defective repair in Chinese hamster cells 5 (double-strand-break rejoining)
  Uniprot ID: P13010
  ENSP ID: ENSP00000375977
MVRSGNKAAVVLCMDVGFTMSNSIPGIESPFEQAKKVITMFVQRQVFAENKDEIALVLFGTDGTDNPLSGGDQYQNITVHRHLMLPDFDLLEDIESKIQPGSQQADFLDALIVSMDVIQHETIGKKFEKRHIEIFTDLSSRFSKSQLDIIIHSLKKCDISLQFFLPFSLGKEDGSGDRGDGPFRLGGHGPSFPLKGITEQQKEGLEIVKMVMISLEGEDGLDEIYSFSESLRKLCVFKKIERHSIHWPCRLTIGSNLSIRIAAYKSILQERVKKTWTVVDAKTLKKEDIQKETVYCLNDDDETEVLKEDIIQGFRYGSDIVPFSKVDEEQMKYKSEGKCFSVLGFCKSSQVQRRFFMGNQVLKVFAARDDEAAAVALSSLIHALDDLDMVAIVRYAYDKRANPQVGVAFPHIKHNYECLVYVQLPFMEDLRQYMFSSLKNSKKYAPTEAQLNAVDALIDSMSLAKKDEKTDTLEDLFPTTKIPNPRFQRLFQCLLHRALHPREPLPPIQQHIWNMLNPPAEVTTKSQIPLSKIKTLFPLIEAKKKDQVTAQEIFQDNHEDGPTAKKLKTEQGGAHFSVSSLAEGSVTSVGSVNPAENFRVLVKQKKASFEEASNQLINHIEQFLDTNETPYFMKSIDCIRAFREEAIKFSEEQRFNNFLKALQEKVEIKQLNHFWEIVVQDGITLITKEEASGSSVTAEEAKKFLAPKDKPSGDTAAVFEEGGDVDDLLDMI

SEQ ID NO: 98059 - protein, 732 aa, Homo sapiens; identical to SEQ ID NO: 98058
  Payload ID: 19564
  Gene Name: X-ray repair complementing defective repair in Chinese hamster cells 5 (double-strand-break rejoining)
  Uniprot ID: P13010
  ENSP ID: ENSP00000375978

SEQ ID NO: 98060 - protein, 19 aa, Homo sapiens
  Payload ID: 19564
  Gene Name: X-ray repair complementing defective repair in Chinese hamster cells 5 (double-strand-break rejoining)
  ENSP ID: ENSP00000395108
  MOD_RES (1)..(1): Any amino acid
XAKKVITMFVQRQPSDIFF

SEQ ID NO: 98061 - protein, 131 aa, Homo sapiens
  Payload ID: 19564
  Gene Name: X-ray repair complementing defective repair in Chinese hamster cells 5 (double-strand-break rejoining)
  ENSP ID: ENSP00000401318
MDVGFTMSNSIPGIESPFEQAKKVITMFVQRQVFAENKDEIALVLFGTDGTDNPLSGGDQYQNITVHRHLMLPDFDLLEDIESKIQPGSQQADFLDALIVSMDVIQHETIGKKFEKRHIEIFTDLSSRFSK

SEQ ID NO: 98062 - protein, 609 aa, Homo sapiens
  Payload ID: 19565
  Gene Name: X-ray repair complementing defective repair in Chinese hamster cells 6
  Uniprot ID: P12956
  ENSP ID: ENSP00000352257
MSGWESYYKTEGDEEAEEEQEENLEASGDYKYSGRDSLIFLVDASKAMFESQSEDELTPFDMSIQCIQSVYISKIISSDRDLLAVVFYGTEKDKNSVNFKNIYVLQELDNPGAKRILELDQFKGQQGQKRFQDMMGHGSDYSLSEVLWVCANLFSDVQFKMSHKRIMLFTNEDNPHGNDSAKASRARTKAGDLRDTGIFLDLMHLKKPGGFDISLFYRDIISIAEDEDLRVHFEESSKLEDLLRKVRAKETRKRALSRLKLKLNKDIVISVGIYNLVQKALKPPPIKLYRETNEPVKTKTRTFNTSTGGLLLPSDTKRSQIYGSRQIILEKEETEELKRFDDPGLMLMGFKPLVLLKKHHYLRPSLFVYPEESLVIGSSTLFSALLIKCLEKEVAALCRYTPRRNIPPYFVALVPQEEELDDQKIQVTPPGFQLVFLPFADDKRKMPFTEKIMATPEQVGKMKAIVEKLRFTYRSDSFENPVLQQHFRNLEALALDLMEPEQAVDLTLPKVEAMNKRLGSLVDEFKELVYPPDYNPEGKVTKRKHDNEGSGSKRPKVEYSEEELKTHISKGTLGKFTVPMLKEACRAYGLKSGLKKQELLEALTKHFQD

SEQ ID NO: 98063 - protein, 609 aa, Homo sapiens; identical to SEQ ID NO: 98062
  Payload ID: 19565
  Gene Name: X-ray repair complementing defective repair in Chinese hamster cells 6
  Uniprot ID: P12956
  ENSP ID: ENSP00000353192

SEQ ID NO: 98064 - protein, 559 aa, Homo sapiens
  Payload ID: 19565
  Gene Name: X-ray repair complementing defective repair in Chinese hamster cells 6
  ENSP ID: ENSP00000384082
MKKQRKNKKRTLKQVCIQSVYISKIISSDRDLLAVVFYGTEKDKNSVNFKNIYVLQELDNPGAKRILELDQFKGQQGQKRFQDMMGHGSDYSLSEVLWVCANLFSDVQFKMSHKRIMLFTNEDNPHGNDSAKASRARTKAGDLRDTGIFLDLMHLKKPGGFDISLFYRDIISIAEDEDLRVHFEESSKLEDLLRKVRAKETRKRALSRLKLKLNKDIVISVGIYNLVQKALKPPPIKLYRETNEPVKTKTRTFNTSTGGLLLPSDTKRSQIYGSRQIILEKEETEELKRFDDPGLMLMGFKPLVLLKKHHYLRPSLFVYPEESLVIGSSTLFSALLIKCLEKEVAALCRYTPRRNIPPYFVALVPQEEELDDQKIQVTPPGFQLVFLPFADDKRKMPFTEKIMATPEQVGKMKAIVEKLRFTYRSDSFENPVLQQHFRNLEALALDLMEPEQAVDLTLPKVEAMNKRLGSLVDEFKELVYPPDYNPEGKVTKRKHDNEGSGSKRPKVEYSEEELKTHISKGTLGKFTVPMLKEACRAYGLKSGLKKQELLEALTKHFQD

SEQ ID NO: 98065 - protein, 609 aa, Homo sapiens; identical to SEQ ID NO: 98062
  Payload ID: 19565
  Gene Name: X-ray repair complementing defective repair in Chinese hamster cells 6
  Uniprot ID: P12956
  ENSP ID: ENSP00000384257

SEQ ID NO: 98066 - protein, 568 aa, Homo sapiens
  Payload ID: 19565
  Gene Name: X-ray repair complementing defective repair in Chinese hamster cells 6
  Uniprot ID: P12956
  ENSP ID: ENSP00000384941
MSGWESYYKTEGDEEAEEEQEENLEASGDYKYSGRDSLIFLVDASKAMFESQSEDELTPFDMSIQELDNPGAKRILELDQFKGQQGQKRFQDMMGHGSDYSLSEVLWVCANLFSDVQFKMSHKRIMLFTNEDNPHGNDSAKASRARTKAGDLRDTGIFLDLMHLKKPGGFDISLFYRDIISIAEDEDLRVHFEESSKLEDLLRKVRAKETRKRALSRLKLKLNKDIVISVGIYNLVQKALKPPPIKLYRETNEPVKTKTRTFNTSTGGLLLPSDTKRSQIYGSRQIILEKEETEELKRFDDPGLMLMGFKPLVLLKKHHYLRPSLFVYPEESLVIGSSTLFSALLIKCLEKEVAALCRYTPRRNIPPYFVALVPQEEELDDQKIQVTPPGFQLVFLPFADDKRKMPFTEKIMATPEQVGKMKAIVEKLRFTYRSDSFENPVLQQHFRNLEALALDLMEPEQAVDLTLPKVEAMNKRLGSLVDEFKELVYPPDYNPEGKVTKRKHDNEGSGSKRPKVEYSEEELKTHISKGTLGKFTVPMLKEACRAYGLKSGLKKQELLEALTKHFQD

SEQ ID NO: 98067 - protein, 559 aa, Homo sapiens; identical to SEQ ID NO: 98064
  Payload ID: 19565
  Gene Name: X-ray repair complementing defective repair in Chinese hamster cells 6
  ENSP ID: ENSP00000403679

SEQ ID NO: 98068 - protein, 246 aa, Homo sapiens
  Payload ID: 19566
  Gene Name: XRCC6 binding protein 1
  Uniprot ID: Q9Y6H3
  ENSP ID: ENSP00000300145
MAGAPDERRRGPAAGEQLQQQHVSCQVFPERLAQGNPQQGFFSSFFTSNQKCQLRLLKTLETNPYVKLLLDAMKHSGCAVNKDRHFSCEDCNGNVSGGFDASTSQIVLCQNNIHNQAHMNRVVTHELIHAFDHCRAHVDWFTNIRHLACSEVRAANLSGDCSLVNEIFRLHFGLKQHHQTCVRDRATLSILAVRNISKEVAKKAVDEVFESCFNDHEPFGRIPHNKTYARYAHRDFENRDRYYSNI

SEQ ID NO: 98069 - protein, 37 aa, Homo sapiens
  Payload ID: 19566
  Gene Name: XRCC6 binding protein 1
  ENSP ID: ENSP00000449550
  MOD_RES (1)..(1): Any amino acid
XAQGNPQQGFFSSFFTSNQKCQLRLLKTLETNSFVPE

SEQ ID NO: 98070 - protein, 246 aa, Homo sapiens; identical to SEQ ID NO: 98068
  Payload ID: 19566
  Gene Name: XRCC6 binding protein 1
  Uniprot ID: Q9Y6H3
  ENSP ID: ENSP00000460944

SEQ ID NO: 98071 - protein, 37 aa, Homo sapiens; identical to SEQ ID NO: 98069
  Payload ID: 19566
  Gene Name: XRCC6 binding protein 1
  ENSP ID: ENSP00000461300
  MOD_RES (1)..(1): Any amino acid

SEQ ID NO: 98072 - protein, 65 aa, Homo sapiens
  Payload ID: 19567
  Gene Name: XXbac-B562F10.12
  ENSP ID: ENSP00000392268
  MOD_RES (1)..(1): Any amino acid
XRGEDYLKETHCYDPGSNTWHTLADGPVRRAWHGMATLLNKLYVIGGSNNDAGYRRDVHQVRDQV

SEQ ID NO: 98073 - protein, 301 aa, Homo sapiens
  Payload ID: 19568
  Gene Name: XXbac-BCX105D18.9
  ENSP ID: ENSP00000454948
MLGLWGQRLPAAWVLLLLPFLPLLLLAAPAPHRESYKPVIVVHGLFDSSYSFRHLLEYINETHPGTVVTVLDLFDGRESLRPLWEQVQGFREAVVPIMAKAPQGVHLICYSQGGLVCRALLSVMDDHNVDSFISLSSPQMGQYGDTDYLKWLFPTSMRSNLYRICYSPWGQEFSICNYWHDPHHDDLYLNASSFLALINGERDHPNATVWRKNFLRVGHLVLIGGPDDGVITPWQSSFFGFYDANETVLEMEEQLPARPTHQSELLLLRLVCLKPPRRKKPACRVQRQSESWGPGLSCALS

SEQ ID NO: 98074 - protein, 301 aa, Homo sapiens; identical to SEQ ID NO: 98073
  Payload ID: 19568
  Gene Name: XXbac-BCX105D18.9
  ENSP ID: ENSP00000456236

SEQ ID NO: 98075 - protein, 127 aa, Homo sapiens; identical to SEQ ID NO: 22457
  Payload ID: 19568
  Gene Name: XXbac-BCX105D18.9
  ENSP ID: ENSP00000456424
  MOD_RES (1)..(1): Any amino acid

SEQ ID NO: 98076 - protein, 1266 aa, Homo sapiens
  Payload ID: 19569
  Gene Name: XXbac-BPG116M5.17
  ENSP ID: ENSP00000410815
MGPLMVLFCLLFLYPGLADSAPSCPQNVNISGGTFTLSHGWAPGSLLTYSCPQGLYPSPASRLCKSSGQWQTPGATRSLSKAVCKPGHCPNPGISLGAVRTGFRFGHGDKVRYRCSSNLVLTGSSERECQGNGVWSGTEPICRQPYSYDFPEDVAPALGTSFSHMLGATNPTQKTKDHENGTGTNTYAALNSVYLMMNNQMRLLGMETMAWQEIRHAIILLTDGKSNMGGSPKTAVDHIREILNINQKRNDYLDIYAIGVGKLDVDWRELNELGSKKDGERHAFILQDTKALHQVFEHMLDVSKLTDTICGVGNMSANASDQERTPWHVTIKPKSQETCRGALISDQWVLTAAHCFRDGNDHSLWRVNVGDPKSQWGKEFLIEKAVISPGFDVFAKKNQGILEFYGDDIALLKLAQKVKMSTHARPICLPCTMEANLALRRPQGSTCRDHENELLNKQSVPAHFVALNGSKLNINLKMGVEWTSCAEVVSQEKTMFPNLTDVREVVTDQFLCSGTQEDESPCKGVTTTPWSLARPQGSCSLEGVEIKGGSFRLLQEGQALEYVCPSGFYPYPVQTRTCRSTGSWSTLKTQDQKTVRKAECRAIHCPRPHDFENGEYWPRSPYYNVSDEISFHCYDGYTLRGSANRTCQVNGRWSGQTAICDNGAGYCSNPGIPIGTRKVGSQYRLEDSVTYHCSRGLTLRGSQRRTCQEGGSWSGTEPSCQDSFMYDTPQEVAEAFLSSLTETIEGVDAEDGHGPGEQQKRKIVLDPSGSMNIYLVLDGSDSIGASNFTGAKKCLVNLIEKVASYGVKPRYGLVTYATYPKIWVKVSEADSSNADWVTKQLNEINYEDHKLKSGTNTKKALQAVYSMMSWPDDVPPEGWNRTRHVIILMTDGLHNMGGDPITVIDEIRDLLYIGKDRKNPREDYLDVYVFGVGPLVNQVNINALASKKDNEQHVFKVKDMENLEDVFYQMIDESQSLSLCGMVWEHRKGTDYHKQPWQAKISVIRPSKGHESCMGAVVSEYFVLTAAHCFTVDDKEHSIKVSVGGEKRDLEIEVVLFHPNYNINGKKEAGIPEFYDYDVALIKLKNKLKYGQTIRPICLPCTEGTTRALRLPPTTTCQQQKEELLPAQDIKALFVSEEEKKLTRKEVYIKNGDKKGSCERDAQYAPGYDKVKDISEVVTPRFLCTGGVSPYADPNTCRGDSGGPLIVHKRSRFIQVGVISWGVVDVCKNQKRQKQVPAHARDFHINLFQVLPWLKEKLQDEDLGFL

SEQ ID NO: 98077 - protein, 1115 aa, Homo sapiens
  Payload ID: 19569
  Gene Name: XXbac-BPG116M5.17
  ENSP ID: ENSP00000418996
MGPLMVLFCLLFLYPGLADSAPSCPQNVNISGGTFTLSHGWAPGSLLTYSCPQGLYPSPASRLCKSSGQWQTPGATRSLSKAVCKPVRCPAPVSFENGIYTPRLGSYPVGGNVSFECEDGFILRGSPVRQCRPNGMWDGETAVCDNGDHENGTGTNTYAALNSVYLMMNNQMRLLGMETMAWQEIRHAIILLTDGKSNMGGSPKTAVDHIREILNINQKRNDYLDVSKLTDTICGVGNMSANASDQERTPWHVTIKPKSQETCRGALISDQWVLTAAHCFRDGNDHSLWRVNVGDPKSQWGKEFLIEKAVISPGFDVFAKKNQGILEFYGDDIALLKLAQKVKMSTHARPICLPCTMEANLALRRPQGSTCRDHENELLNKQSVPAHFVALNGSKLNINLKMGVEWTSCAEVVSQEKTMFPNLTDVREVVTDQFLCSGTQEDESPCKGGSAIHCPRPHDFENGEYWPRSPYYNVSDEISFHCYDGYTLRGSANRTCQVNGRWSGQTAICDNGAGYCSNPGIPIGTRKVGSQYRLEDSVTYHCSRGLTLRGSQRRTCQEGGSWSGTEPSCQDSFMYDTPQEVAEAFLSSLTETIEGVDAEDGHGPGEQQKRKIVLDPSGSMNIYLVLDGSDSIGASNFTGAKKCLVNLIEKVASYGVKPRYGLVTYATYPKIWVKVSEADSSNADWVTKQLNEINYEDHKLKSGTNTKKALQAVYSMMSWPDDVPPEGWNRTRHVIILMTDGLHNMGGDPITVIDEIRDLLYIGKDRKNPREDYLDVYVFGVGPLVNQVNINALASKKDNEQHVFKVKDMENLEDVFYQMIDESQSLSLCGMVWEHRKGTDYHKQPWQAKISVIRPSKGHESCMGAVVSEYFVLTAAHCFTVDDKEHSIKVSVGGEKRDLEIEVVLFHPNYNINGKKEAGIPEFYDYDVALIKLKNKLKYGQTIRPICLPCTEGTTRALRLPPTTTCQQQKEELLPAQDIKALFVSEEEKKLTRKEVYIKNGDKKGSCERDAQYAPGYDKVKDISEVVTPRFLCTGGVSPYADPNTCRGDSGGPLIVHKRSRFIQVGVISWGVVDVCKNQKRQKQVPAHARDFHINLFQVLPWLKEKLQDEDLGFL

SEQ ID NO: 98078 - protein, 175 aa, Homo sapiens; identical to SEQ ID NO: 48494
  Payload ID: 19570
  Gene Name: XXbac-BPG181M17.5
  ENSP ID: ENSP00000412457

SEQ ID NO: 98079 - protein, 843 aa, Homo sapiens
  Payload ID: 19571
  Gene Name: XXbac-BPG246D15.9
  ENSP ID: ENSP00000391806
MRLPDLRPWTSLLLVDAALLWLLQGPLGTLLPQGLPGLWLEGTLRLGGLWGLLKLRGLLGFVGTLLLPLCLATPLTVSLRALVAGASRAPPARVASAPWSWLLVGYGAAGLSWSLWAVLSPPGAQEKEQDQVNNKVLMWRLLKLSRPDLPLLVAAFFFLVLAVLGETLIPHYSGRVIDILGGDFDPHAFASAIFFMCLFSFGSSLSAGCRGGCFTYTMSRINLRIREQLFSSLLRQDLGFFQETKTGELNSRLSSDTTLMSNWLPLNANVLLRSLVKVVGLYGFMLSISPRLTLLSLLHMPFTIAAEKVYNTRHQEVLREIQDAVARAGQVVREAVGGLQTVRSFGAEEHEVCRYKEALEQCRQLYWRRDLERALYLLVRRVLHLGVQMLMLSCGLQQMQDGELTQGSLLSFMIYQESVGSYVQTLVYIYGDMLSNVGAAEKVFSYMDRQPNLPSPGTLAPTTLQGVVKFQDVSFAYPNRPDRPVLKGLTFTLRPGEVTALVGPNGSGKSTVAALLQNLYQPTGGQVLLDEKPISQYEHCYLHSQVVSVGQEPVLFSGSVRNNIAYGLQSCEDDKVMAAAQAAHADDFIQEMEHGIYTDVGEKGSQLAAGQKQRLAIARALVRDPRVLILDEATSALDVQCEQANGFWVGPLGGGSASESDPTGFLHDSRHRLSSDVGMFVALTKLGQPDAEQWNSRLDLLERSRQAVDGVCRHNYRLGAPFTVGRKVQPEVTVYPERTPLLHQHNLLHCSVTGFYPGDIKIKWFLNGQEERAGVMSTGPIRNGDWTFQTVVMLEMTPELGHVYTCLVDHSSLLSPVSVEWRAQSEYSWRKMLSGIAAFLLGL

SEQ ID NO: 98080 - protein, 382 aa, Homo sapiens; identical to SEQ ID NO: 22401
  Payload ID: 19572
  Gene Name: XXbac-BPG32J3.19
  ENSP ID: ENSP00000421232

SEQ ID NO: 98081 - protein, 63 aa, Homo sapiens
  Payload ID: 19573
  Gene Name: XXbac-BPG32J3.20
  ENSP ID: ENSP00000475702
MGTSSIFLCVLFLCGALGLTMSPARGRLRCYICGFTKPCHPVPTECRDDEACGISIGTSDAHC

SEQ ID NO: 98082 - protein, 228 aa, Homo sapiens; identical to SEQ ID NO: 12141
  Payload ID: 19574
  Gene Name: XXbac-BPG32J3.22
  ENSP ID: ENSP00000365040

SEQ ID NO: 98083 - protein, 212 aa, Homo sapiens; identical to SEQ ID NO: 22403
  Payload ID: 19574
  Gene Name: XXbac-BPG32J3.22
  ENSP ID: ENSP00000387322

SEQ ID NO: 98084 - protein, 304 aa, Homo sapiens; identical to SEQ ID NO: 12174
  Payload ID: 19574
  Gene Name: XXbac-BPG32J3.22
  ENSP ID: ENSP00000483989

SEQ ID NO: 98085 - protein, 50 aa, Homo sapiens
  Payload ID: 19575
  Gene Name: XXcos-LUCA11.5
  ENSP ID: ENSP00000476225
MALSAETESHIYRALRTASGAAAHLVALGFTIFVAVLARPGSTPGILHHQ

SEQ ID NO: 98086 - protein, 393 aa, Homo sapiens
  Payload ID: 19576
  Gene Name: xyloside xylosyltransferase 1
  Uniprot ID: Q8NBI6
  ENSP ID: ENSP00000309640
MGLLRGGLPCARAMARLGAVRSHYCALLLAAALAVCAFYYLGSGRETFSSATKRLKEARAGAPAAPSPPALELARGSVAPAPGAKAKSLEGGGAGPVDYHLLMMFTKAEHNAALQAKARVALRSLLRLAKFEAHEVLNLHFVSEEASREVAKGLLRELLPPAAGFKCKVIFHDVAVLTDKLFPIVEAMQKHFSAGLGTYYSDSIFFLSVAMHQIMPKEILQIIQLDLDLKFKTNIRELFEEFDSFLPGAIIGIAREMQPVYRHTFWQFRHENPQTRVGGPPPEGLPGFNSGVMLLNLEAMRQSPLYSRLLEPAQVQQLADKYHFRGHLGDQDFFTMIGMEHPKLFHVLDCTWNRQLCTWWRDHGYSDVFEAYFRCEGHVKIYHGNCNTPIPED

SEQ ID NO: 98087 - protein, 187 aa, Homo sapiens
  Payload ID: 19576
  Gene Name: xyloside xylosyltransferase 1
  Uniprot ID: Q8NBI6
  ENSP ID: ENSP00000349179
MNGMSVLMKETLKSSVTPSPYEETGERQPSVNWAVSPHQTQNQWARWSWTSQPLELHTFWQFRHENPQTRVGGPPPEGLPGFNSGVMLLNLEAMRQSPLYSRLLEPAQVQQLADKYHFRGHLGDQDFFTMIGMEHPKLFHVLDCTWNRQLCTWWRDHGYSDVFEAYFRCEGHVKIYHGNCNTPIPED

SEQ ID NO: 98088 - protein, 84 aa, Homo sapiens
  Payload ID: 19576
  Gene Name: xyloside xylosyltransferase 1
  ENSP ID: ENSP00000393989
MVRCVPSAVIVCFLRPPQPGRTVIFHDVAVLTDKLFPIVEAMQKHFSAGLGTYYSDSIFFLSVAMHQIMPKECTPLVQGRTSCT

SEQ ID NO: 98089 - protein, 247 aa, Homo sapiens
  Payload ID: 19576
  Gene Name: xyloside xylosyltransferase 1
  ENSP ID: ENSP00000399422
MVRCVPSAVIVCFLRPPQPGRTVIFHDVAVLTDKLFPIVEAMQKHFSAGLGTYYSDSIFFLSVAMHQIMPKEILQIIQLDLDLKFKTNIRELFEEFDSFLPGAIIGIAREMQPVYRHTFWQFRHENPQTRVGGPPPEGLPGFNSGVMLLNLEAMRQSPLYSRLLEPAQVQQLADKYHFRGHLGDQDFFTMIGMEHPKLFHVLDCTWNRQLCTWWRDHGYSDVFEAYFRCEGHVKIYHGNCNTPIPED

SEQ ID NO: 98090 - protein, 114 aa, Homo sapiens
  Payload ID: 19576
  Gene Name: xyloside xylosyltransferase 1
  ENSP ID: ENSP00000405583
  MOD_RES (1)..(1): Any amino acid
XSPPALELARGSVAPAPGAKAKSLEGGGAGPVDYHLLMMFTKAEHNAALQAKARVALRSLLRLAKFEAHEVLNLHFVSEEASREVAKGLLRELLPPAAGFKCKFLTSEDGTGHQ

SEQ ID NO: 98091 - protein, 190 aa, Homo sapiens
  Payload ID: 19576
  Gene Name: xyloside xylosyltransferase 1
  Uniprot ID: Q8NBI6
  ENSP ID: ENSP00000409865
MWPPRCKDPGRQSAEILQIIQLDLDLKFKTNIRELFEEFDSFLPGAIIGIAREMQPVYRHTFWQFRHENPQTRVGGPPPEGLPGFNSGVMLLNLEAMRQSPLYSRLLEPAQVQQLADKYHFRGHLGDQDFFTMIGMEHPKLFHVLDCTWNRQLCTWWRDHGYSDVFEAYFRCEGHVKIYHGNCNTPIPED

SEQ ID NO: 98092 - protein, 327 aa, Homo sapiens
  Payload ID: 19577
  Gene Name: xylosylprotein beta 1,4-galactosyltransferase, polypeptide 7
  Uniprot ID: Q9UBV7
  ENSP ID: ENSP00000029410
MFPSRRKAAQLPWEDGRSGLLSGGLPRKCSVFHLFVACLSLGFFSLLWLQLSCSGDVARAVRGQGQETSGPPRACPPEPPPEHWEEDASWGPHRLAVLVPFRERFEELLVFVPHMRRFLSRKKIRHHIYVLNQVDHFRFNRAALINVGFLESSNSTDYIAMHDVDLLPLNEELDYGFPEAGPFHVASPELHPLYHYKTYVGGILLLSKQHYRLCNGMSNRFWGWGREDDEFYRRIKGAGLQLFRPSGITTGYKTFRHLHDPAWRKRDQKRIAAQKQEQFKVDREGGLNTVKYHVASRTALSVGGAPCTVLNIMLDCDKTATPWCTFS

SEQ ID NO: 98093 - protein, 36 aa, Homo sapiens
  Payload ID: 19577
  Gene Name: xylosylprotein beta 1,4-galactosyltransferase, polypeptide 7
  ENSP ID: ENSP00000420886
MRRFLSRKKIRHHIYVLNQVDHFRFNRAALINVGFL

SEQ ID NO: 98094 - protein, 42 aa, Homo sapiens
  Payload ID: 19577
  Gene Name: xylosylprotein beta 1,4-galactosyltransferase, polypeptide 7
  ENSP ID: ENSP00000423438
MRRFLSRKKIRHHIYVLNQVDHFRFNRAALINVGFLESSNST

SEQ ID NO: 98095 - protein, 77 aa, Homo sapiens
  Payload ID: 19577
  Gene Name: xylosylprotein beta 1,4-galactosyltransferase, polypeptide 7
  ENSP ID: ENSP00000423868
RGQGQETSGPPRACPPEPPPEHWEEDASWGPHRLAVLVPFRERFEELLVFVPHMRRFLSRKKIRHHIYVLNQVDHFR

SEQ ID NO: 98096 - protein, 170 aa, Homo sapiens
  Payload ID: 19577
  Gene Name: xylosylprotein beta 1,4-galactosyltransferase, polypeptide 7
  ENSP ID: ENSP00000425591
MFPSRRKAAQLPWEDGRSGLLSGGLPRKCSVFHLFVACLSLGFFSLLWLQLSCSGDVARAVRGQGQETSGPPRACPPEPPPEHWEEDASWGPHRLAVLVPFRERFEELLVFVPHMRRFLSRKKIRHHIYVLNQVDHFSLAHPAQVQPGSAHQRGLPGEQQQHGLHCHARR

SEQ ID NO: 98097 - protein, 959 aa, Homo sapiens
  Payload ID: 19578
  Gene Name: xylosyltransferase I
  Uniprot ID: Q86Y38
  ENSP ID: ENSP00000261381
MVAAPCARRLARRSHSALLAALTVLLLQTLVVWNFSSLDSGAGERRGGAAVGGGEQPPPAPAPRRERRDLPAEPAAARGGGGGGGGGGGGRGPQARARGGGPGEPRGQQPASRGALPARALDPHPSPLITLETQDGYFSHRPKEKVRTDSNNENSVPKDFENVDNSNFAPRTQKQKHQPELAKKPPSRQKELLKRKLEQQEKGKGHTFPGKGPGEVLPPGDRAAANSSHGKDVSRPPHARKTGGSSPETKYDQPPKCDISGKEAISALSRAKSKHCRQEIGETYCRHKLGLLMPEKVTRFCPLEGKANKNVQWDEDSVEYMPANPVRIAFVLVVHGRASRQLQRMFKAIYHKDHFYYIHVDKRSNYLHRQVLQVSRQYSNVRVTPWRMATIWGGASLLSTYLQSMRDLLEMTDWPWDFFINLSAADYPIRTNDQLVAFLSRYRDMNFLKSHGRDNARFIRKQGLDRLFLECDAHMWRLGDRRIPEGIAVDGGSDWFLLNRRFVEYVTFSTDDLVTKMKQFYSYTLLPAESFFHTVLENSPHCDTMVDNNLRITNWNRKLGCKCQYKHIVDWCGCSPNDFKPQDFHRFQQTARPTFFARKFEAVVNQEIIGQLDYYLYGNYPAGTPGLRSYWENVYDEPDGIHSLSDVTLTLYHSFARLGLRRAETSLHTDGENSCRYYPMGHPASVHLYFLADRFQGFLIKHHATNLAVSKLETLETWVMPKKVFKIASPPSDFGRLQFSEVGTDWDAKERLFRNFGGLLGPMDEPVGMQKWGKGPNVTVTVIWVDPVNVIAATYDILIESTAEFTHYKPPLNLPLRPGVWTVKILHHWVPVAETKFLVAPLTFSNRQPIKPEEALKLHNGPLRNAYMEQSFQSLNPVLSLPINPAQVEQARRNAASTGTALEGWLDSLVGGMWTAMDICATGPTACPVMQTCSQTAWSSFSPDPKSELGAVKPDGRLR

SEQ ID NO: 98098 - protein, 865 aa, Homo sapiens [sequence omitted]

SEQ ID NO: 98099 - protein, 639 aa, Homo sapiens
  Payload ID: 19579
  Gene Name: xylosyltransferase II
  ENSP ID: ENSP00000365733
MVASARVQKLVRRYKLAIATALAILLLQGLVVWSFSGLEEDEAGEKGRQRKPRPLDPGEGSKDTDSSAGRRGSTGRRHGRWRGRAESPGVPVAKVVRAVTSRQRASRRVPPAPPPEAPGRQNLSGAAAGEALVGAAGFPPHGDTGSVEGAPQPTDNGFTPKCEIVGKDALSALARASTKQCQQEIANVVCLHQAGSLMPKAVPRHCQLTGKMSPGIQWDESQAQQPMDGPPVRIAYMLVVHGRAIRQLKRLLKAVYHEQHFFYIHVDKRSDYLHREVVELAQGYDNVRVTPWRMVTIWGGASLLRMYLRSMRDLLEVPGWAWDFFINLSATDYPTRTNEELVAFLSKNRDKNFLKSHGRDNSRFIKKQGLDRLFHECDSHMWRLGERQIPAGIVVDGGSDWFVLTRSFVEYVVYTDDPLVAQLRQFYTYTLLPAESFFHTVLENSLACETLVDNNLRVTNWNRKLGCKCQYKHIVDWCGCSPNDFKPQDFLRLQQVSRPTFFARKFESTVNQEVLEILDFHLYGSYPPGTPALKAYWENTYDAADGPSGLSDVMLTAYTAFARLSLHHAATAAPPMGTPLCRLALIGTPKSVFSGTLGGYWGRWTSLWPCSAGPGAPTSQPQWSGSTQPMWWPHLMTSQ

SEQ ID NO: 98100 - protein, 45 aa, Homo sapiens
  Payload ID: 19579
  Gene Name: xylosyltransferase II
  ENSP ID: ENSP00000425511
MVASARVQKLVRRYKLAIATALAILLLQGLKGRQRKPRPLDPGEG

SEQ ID NO: 98101 - protein, 676 aa, Homo sapiens
  Payload ID: 19579
  Gene Name: xylosyltransferase II
  ENSP ID: ENSP00000426501
MVASARVQKLVRRYKLAIATALAILLLQGLVVWSFSGLEEDEAGEKGRQRKPRPLDPGEGSKDTDSSAGRRGSTGRRHGRWRGRAESPGVPVAKVVRAVTSRQRASRRVPPAPPPEAPGRQNLSGAAAGEALVGAAGFPPHGDTGSVEGAPQPTDNGFTPKCEIVGKDALSALARASTKQCQQEIANVVCLHQAGSLMPKAVPRHCQLTGKMSPGIQWDESQAQQPMDGPPVRIAYMLVVHGRAIRQLKRLLKAVYHEQHFFYIHVDKRSDYLHREVVELAQGYDNVRVTPWRMVTIWGGASLLRMYLRSMRDLLEVPGWAWDFFINLSATDYPTRTNEELVAFLSKNRDKNFLKSHGRDNSRFIKKQGLDRLFHECDSHMWRLGERQIPAGIVVDGGSDWFVLTRSFVEYVVYTDDPLVAQLRQFYTYTLLPAESFFHTVLENSLACETLVDNNLRVTNWNRKLGCKCQYKHIVDWCGCSPNDFKPQDFLRLQQVSRPTFFARKFESTVNQEVLEILDFHLYGSYPPGTPALKAYWENTYDAADGPSGLSDVMLTAYTAFARLSLHHAATAAPPMGTPLCRFEPRGLPSSVHLYFYDDHFQGYLVTQAVQPSAQGPAETLEMWLMPQGSLKLLGRSDQASRLQSLENRGLSMLPRLVSNSWPQAVLPLQPPKALG

SEQ ID NO: 98102 - protein, 117 aa, Homo sapiens
  Payload ID: 19579
  Gene Name: xylosyltransferase II
  ENSP ID: ENSP00000428350
CQYKHIVDWCGCSPNDFKPQDFLRLQQVSRPTFFARKFESTVNQEVLEILDFHLYGSYPPGTPALKAYWENTYDAADGPSGLSDVMLTAYTAFARLSLHHAATAAPPMGTPLCRATW

SEQ ID NO: 98103 - protein, 46 aa, Homo sapiens
  Payload ID: 19579
  Gene Name: xylosyltransferase II
  ENSP ID: ENSP00000460517
ETLEMWLMPQGSLKLLGRSDQASRLQSLEVGQVPHLLSPNPHPDLG

SEQ ID NO: 98104 - protein, 536 aa, Homo sapiens
  Payload ID: 19580
  Gene Name: xylulokinase homolog (H. influenzae)
  Uniprot ID: O75191
  ENSP ID: ENSP00000207870
MAEHAPRRCCLGWDFSTQQVKVVAVDAELNVFYEESVHFDRDLPEFGTQGGVHVHKDGLTVTSPVLMWVQALDIILEKMKASGFDFSQVLALSGAGQQHGSIYWKAGAQQALTSLSPDLRLHQQLQDCFSISDCPVWMDSSTTAQCRQLEAAVGGAQALSCLTGSRAYERFTGNQIAKIYQQNPEAYSHTERISLVSSFAASLFLGSYSPIDYSDGSGMNLLQIQDKVWSQACLGACAPHLEEKLSPPVPSCSVVGAISSYYVQRYGFPPGCKVVAFTGDNPASLAGMRLEEGDIAVSLGTSDTLFLWLQEPMPALEGHIFCNPVDSQHYMALLCFKNGSLMREKIRNESVSRSWSDFSKALQSTEMGNGGNLGFYFDVMEITPEIIGRHRFNTENHKVAAFPGDVEVRALIEGQFMAKRIHAEGLGYRVMSKTKILATGGASHNREILQVLADVFDAPVYVIDTANSACVGSAYRAFHGLAGGTDVPFSEVVKLAPNPRLAATPSPGASQVYEALLPQYAKLEQRILSQTRGPPE

SEQ ID NO: 98105 - protein, 61 aa, Homo sapiens
  Payload ID: 19580
  Gene Name: xylulokinase homolog (H. influenzae)
  ENSP ID: ENSP00000398845
MAEHAPRRCCLGWDFSTQQVKVVAVDAELNVFYEESVHFDRDLPEFGNTEVYTGRLEPSRH

SEQ ID NO: 98106 - protein, 66 aa, Homo sapiens
  Payload ID: 19580
  Gene Name: xylulokinase homolog (H. influenzae)
  ENSP ID: ENSP00000412282
MAEHAPRRCCLGWDFSTQQVKVVAVDAELNVFYEESVHFDRDLPEFGATLEAHVEHDRATINLVPE

SEQ ID NO: 98107 - protein, 324 aa, Homo sapiens
  Payload ID: 19581
  Gene Name: Y box binding protein 1
  Uniprot ID: P67809
  ENSP ID: ENSP00000361626
MSSEAETQQPPAAPPAAPALSAADTKPGTTGSGAGSGGPGGLTSAAPAGGDKKVIATKVLGTVKWFNVRNGYGFINRNDTKEDVFVHQTAIKKNNPRKYLRSVGDGETVEFDVVEGEKGAEAANVTGPGGVPVQGSKYAADRNHYRRYPRRRGPPRNYQQNYQNSESGEKNEGSESAPEGQAQQRRPYRRRRFPPYYMRRPYGRRPQYSNPPVQGEVMEGADNQGAGEQGRPVRQNMYRGYRPRFRRGPPRQRQPREDGNEEDKENQGDETQGQQPPQRRYRRNFNYRRRRPENPKPQDGKETKAADPPAENSSAPEAEQGGAE

SEQ ID NO: 98108 - protein, 374 aa, Homo sapiens
  Payload ID: 19581
  Gene Name: Y box binding protein 1
  ENSP ID: ENSP00000389639
  MOD_RES (1)..(1): Any amino acid
XRVRRGPLPADRPRALGPARRCSRHPHPAPFRVCSEGAAHRLRRPERLPLPSRALRPRPAHTPILGPAPRACPGAPRASDSPTCAAAAATAWPRTRAVERKGCQVAAAAGVRGTGCPSRADLEKDSWNDTKEDVFVHQTAIKKNNPRKYLRSVGDGETVEFDVVEGEKGAEAANVTGPGGVPVQGSKYAADRNHYRRYPRRRGPPRNYQQNYQNSESGEKNEGSESAPEGQAQQRRPYRRRRFPPYYMRRPYGRRPQYSNPPVQGEVMEGADNQGAGEQGRPVRQNMYRGYRPRFRRGPPRQRQPREDGNEEDKENQGDETQGQQPPQRRYRRNFNYRRRRPENPKPQDGKETKAADPPAENSSAPEAEQGGAE

SEQ ID NO: 98109 - protein, 216 aa, Homo sapiens
  Payload ID: 19581
  Gene Name: Y box binding protein 1
  ENSP ID: ENSP00000405937
MSSEAETQQPPAAPPAAPALSAADTKPGTTGSGAGSGGPGGLTSAAPAGGDKKVIATKVLGTVKWFNVRNGYGFINRNDTKEDVFVHQGAEAANVTGPGGVPVQGSKYAADRNHYRRYPRRRGPPRNYQQNYQNSESGEKNEGSESAPEGQAQQRRPYRRRRFPPYYMRRPYGRRPQYSNPPVQGEVMEGADNQGAGEQGRPVRQNMYRGYRPRFR

SEQ ID NO: 98110 - protein, 320 aa, Homo sapiens
  Payload ID: 19581
  Gene Name: Y box binding protein 1
  ENSP ID: ENSP00000484416
MSSEAETQQPPAAPPAAPALSAADTKPGTTGAAQGAVARAAHIGGAGGDKKVIATKVLGTVKWFNVRNGYGFINRNDTKEDVFVHQTAIKKNNPRKYLRSVGDGETVEFDVVEGEKGAEAANVTGPGGVPVQGSKYAADRNHYRRYPRRRGPPRNYQQNYQNSESGEKNEGSESAPEARPNNAGPTQAKVPTLLHAETYGRRPQYSNPPVQGEVMEGADNQGAGEQGRPVRQICIGDIDHDSAGALRQRQPREDGNEEDKENQGDETQGQQPPQRRYRRNFNYRRRRPENPKPQDGKETKAADPPAENSSAPEAEQGGAE

SEQ ID NO: 98111 - protein, 364 aa, Homo sapiens
  Payload ID: 19582
  Gene Name: Y box binding protein 2
  Uniprot ID: Q9Y2T7
  ENSP ID: ENSP00000007699
MSEVEAAAGATAVPAATVPATAAGVVAVVVPVPAGEPQKGGGAGGGGGAASGPAAGTPSAPGSRTPGNPATAVSGTPAPPARSQADKPVLAIQVLGTVKWFNVRNGYGFINRNDTKEDVFVHQTAIKRNNPRKFLRSVGDGETVEFDVVEGEKGAEATNVTGPGGVPVKGSRYAPNRRKSRRFIPRPPSVAPPPMVAEIPSAGTGPGSKGERAEDSGQRPRRWCPPPFFYRRRFVRGPRPPNQQQPIEGTDRVEPKETAPLEGHQQQGDERVPPPRFRPRYRRPFRPRPRQQPTTEGGDGETKPSQGPADGSRPEPQRPRNRPYFQRRRQQAPGPQQAPGPRQPAAPETSAPVNSGDPTTTILE

SEQ ID NO: 98112 - protein, 164 aa, Homo sapiens
  Payload ID: 19582
  Gene Name: Y box binding protein 2
  ENSP ID: ENSP00000459587
  MOD_RES (1)..(1): Any amino acid
XAGTGPGSKGERAEDSGQRPRRWCPPPFFYRRRFVRGPRPPNQQQPIEGTDRVEPKETAPLEGHQQQGDERVPPPRFRPRYRRPFRPRPRQQPTTEGGDGETKPSQGPADGSRPEPQRPRNRPYFQRRRQQAPGPQQAPGPRQPAAPETSAPVNSGDPTTTILE

SEQ ID NO: 98113 - protein, 372 aa, Homo sapiens
  Payload ID: 19583
  Gene Name: Y box binding protein 3
  Uniprot ID: P16989
  ENSP ID: ENSP00000228251
MSEAGEATTTTTTTLPQAPTEAAAAAPQDPAPKSPVGSGAPQAAAPAPAAHVAGNPGGDAAPAATGTAAAASLATAAGSEDAEKKVLATKVLGTVKWFNVRNGYGFINRNDTKEDVFVHQTAIKKNNPRKYLRSVGDGETVEFDVVEGEKGAEAANVTGPDGVPVEGSRYAADRRRYRRGYYGRRRGPPRNYAGEEEEEGSGSSEGFDPPATDRQFSGARNQLRRPQYRPQYRQRRFPPYHVGQTFDRRSRVLPHPNRIQAGEIGEMKDGVPEGAQLQGPVHRNPTYRPRYRSRGPPRPRPAPAVGEAEDKENQQATSGPNQPSVRRGYRRPYNYRRRPRPPNAPSQDGKEAKAGEAPTENPAPPTQQSSAE

SEQ ID NO: 98114 - protein, 303 aa, Homo sapiens
  Payload ID: 19583
  Gene Name: Y box binding protein 3
  Uniprot ID: P16989
  ENSP ID: ENSP00000279550
MSEAGEATTTTTTTLPQAPTEAAAAAPQDPAPKSPVGSGAPQAAAPAPAAHVAGNPGGDAAPAATGTAAAASLATAAGSEDAEKKVLATKVLGTVKWFNVRNGYGFINRNDTKEDVFVHQTAIKKNNPRKYLRSVGDGETVEFDVVEGEKGAEAANVTGPDGVPVEGSRYAADRRRYRRGYYGRRRGPPRNAGEIGEMKDGVPEGAQLQGPVHRNPTYRPRYRSRGPPRPRPAPAVGEAEDKENQQATSGPNQPSVRRGYRRPYNYRRRPRPPNAPSQDGKEAKAGEAPTENPAPPTQQSSAE

SEQ ID NO: 98115 - protein, 92 aa, Homo sapiens
  Payload ID: 19583
  Gene Name: Y box binding protein 3
  ENSP ID: ENSP00000485718
  MOD_RES (1)..(1): Any amino acid
XNDTKEDVFVHQTAIKKNNPRKYLRSVGDGETVEFDVVEGEKGAEAANVTGPDGVPVEGSRYAADRRRYRRGYYGRRRGPPRNISDVWFNRR

SEQ ID NO: 98116 - protein, 226 aa, Homo sapiens
  Payload ID: 19584
  Gene Name: Yae1 domain containing 1
  Uniprot ID: Q9NRH1
  ENSP ID: ENSP00000223273
MSWVQAASLIQGPGDKGDVFDEEADESLLAQREWQSNMQRRVKEGYRDGIDAGKAVTLQQGFNQGYKKGAEVILNYGRLRGTLSALLSWCHLHNNNSTLINKINNLLDAVGQCEEYVLKHLKSITPPSHVVDLLDSIEDMDLCHVVPAEKKIDEAKDERLCENNAEFNKNCSKSHSGIDCSYVECCRTQEHAHSENPSPTWILEQTASLVKQLGLSVDVLQHLKQL

SEQ ID NO: 98117 - protein, 206 aa, Homo sapiens
  Payload ID: 19584
  Gene Name: Yae1 domain containing 1
  Uniprot ID: Q9NRH1
  ENSP ID: ENSP00000395777
MSWVQAASLIQGPGDKGDVFDEEADESLLAQREWQSNMQRRVKEGYRDGIDAGKAVTLQQGFNQGYKKGAEVILNYGRLRGTLRNSTDWSLLGLRAPLRSPEVGTQLLPRPLPVPGHMASGATPKQPTELEATLLSLVPQSGRATPRFPARLRAPGPGTPSHRRRFRRKPHRDPAAACPAWPPEAPSNSETHFSTYNRIIIRGGHI

SEQ ID NO: 98118 - protein, 87 aa, Homo sapiens
  Payload ID: 19584
  Gene Name: Yae1 domain containing 1
  ENSP ID: ENSP00000400511
MSWVQAASLIQGPGDKGDVFDEEADESLLAQREWQSNMQRRVKEGYRDGIDAGKAVTLQQGFNQGYKKGAEVILNYGRLRGTLSWPV

SEQ ID NO: 98119 - protein, 167 aa, Homo sapiens
  Payload ID: 19585
  Gene Name: ybeY metallopeptidase (putative)
  Uniprot ID: P58557
  ENSP ID: ENSP00000329614
MSLVIRNLQRVIPIRRAPLRSKIEIVRRILGVQKFDLGIICVDNKNIQHINRIYRDRNVPTDVLSFPFHEHLKAGEFPQPDFPDDYNLGDIFLGVEYIFHQCKENEDYNDVLTVTATHGLCHLLGFTHGTEAEWQQMFQKEKAVLDELGRRTGTRLQPLTRGLFGGS

SEQ ID NO: 98120 - protein, 124 aa, Homo sapiens
  Payload ID: 19585
  Gene Name: ybeY metallopeptidase (putative)
  Uniprot ID: P58557
  ENSP ID: ENSP00000340675
MSLVIRNLQRVIPIRRAPLRSKIEIVRRILGVQKFDLGIICVDNKNIQHINRIYRDRNVPTDVLSFPFHEVTATHGLCHLLGFTHGTEAEWQQMFQKEKAVLDELGRRTGTRLQPLTRGLFGGS

SEQ ID NO: 98121 - protein, 167 aa, Homo sapiens; identical to SEQ ID NO: 98119
  Payload ID: 19585
  Gene Name: ybeY metallopeptidase (putative)
  Uniprot ID: P58557
  ENSP ID: ENSP00000380805

SEQ ID NO: 98122 - protein, 79 aa, Homo sapiens
  Payload ID: 19585
  Gene Name: ybeY metallopeptidase (putative)
  Uniprot ID: P58557
  ENSP ID: ENSP00000380806
MSLVIRNLQRVIPIRRAPLRSKIEIVTATHGLCHLLGFTHGTEAEWQQMFQKEKAVLDELGRRTGTRLQPLTRGLFGGS

SEQ ID NO: 98123 - protein, 122 aa, Homo sapiens
  Payload ID: 19585
  Gene Name: ybeY metallopeptidase (putative)
  Uniprot ID: P58557
  ENSP ID: ENSP00000380808
MSLVIRNLQRVIPIRRAPLRSKIEIHLKAGEFPQPDFPDDYNLGDIFLGVEYIFHQCKENEDYNDVLTVTATHGLCHLLGFTHGTEAEWQQMFQKEKAVLDELGRRTGTRLQPLTRGLFGGS

SEQ ID NO: 98124 - protein, 167 aa, Homo sapiens; identical to SEQ ID NO: 98119
  Payload ID: 19585
  Gene Name: ybeY metallopeptidase (putative)
  Uniprot ID: P58557
  ENSP ID: ENSP00000380813

SEQ ID NO: 98125 - protein, 323 aa, Homo sapiens
  Payload ID: 19586
  Gene Name: YdjC homolog (bacterial)
  Uniprot ID: A8MPS7
  ENSP ID: ENSP00000292778
MSRPRMRLVVTADDFGYCPRRDEGIVEAFLAGAVTSVSLLVNGAATESAAELARRHSIPTGLHANLSEGRPVGPARRGASSLLGPEGFFLGKMGFREAVAAGDVDLPQVREELEAQLSCFRELLGRAPTHADGHQHVHVLPGVCQVFAEALQAYGVRFTRLPLERGVGGCTWLEAPARAFACAVERDARAAVGPFSRHGLRWTDAFVGLSTCGRHMSAHRVSGALARVLEGTLAGHTLTAELMAHPGYPSVPPTGGCGEGPDAFSCSWERLHELRVLTAPTLRAQLAQDGVQLCALDDLDSKRPGEEVPCEPTLEPFLEPSLL

SEQ ID NO: 98126 - protein, 149 aa, Homo sapiens
  Payload ID: 19586
  Gene Name: YdjC homolog (bacterial)
  Uniprot ID: A8MPS7
  ENSP ID: ENSP00000381847
MSRPRMRLVVTADDFGYCPRRDEGIVEAFLAGAVTSVSLLVNGAATESAAELARRHSIPTGLHANLSEGRPVGPARRGASSLLGPEGFFLGKMGFREAVAAGDVDLPQVREELEAQLSCFRELLGRAPTHADGHQHVHVLPGGQTPSWA

SEQ ID NO: 98127 - protein, 136 aa, Homo sapiens
  Payload ID: 19586
  Gene Name: YdjC homolog (bacterial)
  Uniprot ID: A8MPS7
  ENSP ID: ENSP00000402481
MSRPRMRLVVTADDFGYCPRRDEGIVEAFLAGAVTSVSLLVNGAATESAAELARRHSIPTGLHANLSEGRPVGPARRGASSLLGPEGFFLGKMGFREAVAAGDVDLPQVRSRSYRRMLARTPRAPPGGCGRSSRPN

SEQ ID NO: 98128 - protein, 1422 aa, Homo sapiens
  Payload ID: 19587
  Gene Name: YEATS domain containing 2
  Uniprot ID: Q9ULM3
  ENSP ID: ENSP00000306983
MSGIKRTIKETDPDYEDVSVALPNKRHKAIENSARDAAVQKIETIIKEQFALEMKNKEHEIEVIDQRLIEARRMMDKLRACIVANYYASAGLLKVSEGSKTCDTMVFNHPAIKKFLESPSRSSSPANQRAETPSANHSESDSLSQHNDFLSDKDNNSNMDIEERLSNNMEQRPSRNTGRDTSRITGSHKTEQRNADLTDETSRLFVKKTIVVGNVSKYIPPDKREENDQSTHKWMVYVRGSRREPSINHFVKKVWFFLHPSYKPNDLVEVREPPFHLTRRGWGEFPVRVQVHFKDSQNKRIDIIHNLKLDRTYTGLQTLGAETVVDVELHRHSLGEDCIYPQSSESDISDAPPSLPLTIPAPVKASSPIKQSHEPVPDTSVEKGFPASTEAERHTPFYALPSSLERTPTKMTTSQKVTFCSHGNSAFQPIASSCKIVPQSQVPNPESPGKSFQPITMSCKIVSGSPISTPSPSPLPRTPTSTPVHVKQGTAGSVINNPYVIMDKQPGQVIGATTPSTGSPTNKISTASQVSQGTGSPVPKIHGSSFVTSTVKQEDSLFASMPPLCPIGSHPKVQSPKPITGGLGAFTKVIIKQEPGEAPHVPATGAASQSPLPQYVTVKGGHMIAVSPQKQVITPGEGIAQSAKVQPSKVVGVPVGSALPSTVKQAVAISGGQILVAKASSSVSKAVGPKQVVTQGVAKAIVSGGGGTIVAQPVQTLTKAQVTAAGPQKSGSQGSVMATLQLPATNLANLANLPPGTKLYLTTNSKNPSGKGKLLLIPQGAILRATNNANLQSGSAASGGSGAGGGGGGGGGGGSGSGGGGSTGGGGGTAGGGTQSTAGPGGISQHLTYTSYILKQTPQGTFLVGQPSPQTSGKQLTTGSVVQGTLGVSTSSAQGQQTLKVISGQKTTLFTQAAHGGQASLMKISDSTLKTVPATSQLSKPGTTMLRVAGGVITTATSPAVALSANGPAQQSEGMAPVSSSTVSSVTKTSGQQQVCVSQATVGTCKAATPTVVSATSLVPTPNPISGKATVSGLLKIHSSQSSPQQAVLTIPSQLKPLSVNTSGGVQTILMPVNKVVQSFSTSKPPAILPVAAPTPVVPSSAPAAVAKVKTEPETPGPSCLSQEGQTAVKTEESSELGNYVIKIDHLETIQQLLTAVVKKIPLITAKSEDASCFSAKSVEQYYGWNIGKRRAAEWQRAMTMRKVLQEILEKNPRFHHLTPLKTKHIAHWCRCHGYTPPDPESLRNDGDSIEDVLTQIDSEPECPSSFSSADNLCRKLEDLQQFQKREPENEEEVDILSLSEPVKINIKKEQEEKQEEVKFYLPPTPGSEFIGDVTQKIGITLQPVALHRNVYASVVEDMILKATEQLVNDILRQALAVGYQTASHNRIPKEITVSNIHQAICNIPFLDFLTNKHMGILNEDQ

SEQ ID NO: 98129 - protein, 219 aa, Homo sapiens
  Payload ID: 19587
  Gene Name: YEATS domain containing 2
  ENSP ID: ENSP00000406477
  MOD_RES (1)..(1): Any amino acid
XGSGGGGSTGGGGGTAGGGTQSTAGPGGISQHLTYTSYILKQTPQGTFLVGQPSPQTSGKQLTTGSVVQGTLGVSTSSAQGQQTLKVISGQKTTLFTQAAHGGQASLMKISDSTLKTVPATSQLSKPGTTMLRVAGGVITTATSPAVALSANGPAQQSEGMAPVSSSTVSSVTKTSGQQQVCVSQATVGTCKAATPTVVSATSLVPTPNPISGKATVSD

SEQ ID NO: 98130 - protein, 227 aa, Homo sapiens
  Payload ID: 19588
  Gene Name: YEATS domain containing 4
  Uniprot ID: O95619
  ENSP ID: ENSP00000247843
MFKRMAEFGPDSGGRVKGVTIVKPIVYGNVARYFGKKREEDGHTHQWTVYVKPYRNEDMSAYVKKIQFKLHESYGNPLRVVTKPPYEITETGWGEFEIIIKIFFIDPNERPVTLYHLLKLFQSDTNAMLGKKTVVSEFYDEMIFQDPTAMMQQLLTTSRQLTLGAYKHETEFAELEVKTREKLEAAKKKTSFEIAELKERLKASRETINCLKNEIRKLEEDDQAKDI

SEQ ID NO: 98131 - protein, 211 aa, Homo sapiens
  Payload ID: 19588
  Gene Name: YEATS domain containing 4
  ENSP ID: ENSP00000446985
MFKRMAEFGPDSGGRVKGVTIVKPIVYGNVARYFGKKREEDGHTHQWTVYVKPYRNEAKWLIPVISALWEAQAGGSLEPRSLRPDWQHSKTPSLQKKKDMSAYVKKIQFKLHESYGNPLRVVTKPPYEITETGWGEFEIIIKIFFIDPNERPVTLYHLLKLFQSDTNAMLGKKTVVSEFYDEMIFQDPTAMMQQLLTTSRQLTLGAYKHET

SEQ ID NO: 98132 - protein, 173 aa, Homo sapiens
  Payload ID: 19588
  Gene Name: YEATS domain containing 4
  ENSP ID: ENSP00000447199
MFKRMAEFGPDSGGRVKGVTIVKPIVYGNVARYFGKKREEDGHTHQWTVYVKPYRNEVTLYHLLKLFQSDTNAMLGKKTVVSEFYDEMIFQDPTAMMQQLLTTSRQLTLGAYKHETEFAELEVKTREKLEAAKKKTSFEIAELKERLKASRETINCLKNEIRKLEEDDQAKDI

SEQ ID NO: 98133 - protein, 113 aa, Homo sapiens
  Payload ID: 19588
  Gene Name: YEATS domain containing 4
  ENSP ID: ENSP00000448106
MSAYVKKIQFKLHESYGNPLRVVTKPPYEITETGWGEFEIIIKIFFIDPNERPVTLYHLLKLFQSDTNAMLGKKTVVSEFYDEMIFQDPTAMMQQLLTTSRQLTLGAYKHETE

SEQ ID NO: 98134 - protein, 543 aa, Homo sapiens
  Payload ID: 19589
  Gene Name: YES proto-oncogene 1, Src family tyrosine kinase
  Uniprot ID: P07947
  ENSP ID: ENSP00000324740
MGCIKSKENKSPAIKYRPENTPEPVSTSVSHYGAEPTTVSPCPSSSAKGTAVNFSSLSMTPFGGSSGVTPFGGASSSFSVVPSSYPAGLTGGVTIFVALYDYEARTTEDLSFKKGERFQIINNTEGDWWEARSIATGKNGYIPSNYVAPADSIQAEEWYFGKMGRKDAERLLLNPGNQRGIFLVRESETTKGAYSLSIRDWDEIRGDNVKHYKIRKLDNGGYYITTRAQFDTLQKLVKHYTEHADGLCHKLTTVCPTVKPQTQGLAKDAWEIPRESLRLEVKLGQGCFGEVWMGTWNGTTKVAIKTLKPGTMMPEAFLQEAQIMKKLRHDKLVPLYAVVSEEPIYIVTEFMSKGSLLDFLKEGDGKYLKLPQLVDMAAQIADGMAYIERMNYIHRDLRAANILVGENLVCKIADFGLARLIEDNEYTARQGAKFPIKWTAPEAALYGRFTIKSDVWSFGILQTELVTKGRVPYPGMVNREVLEQVERGYRMPCPQGCPESLHELMNLCWKKDPDERPTFEYIQSFLEDYFTATEPQYQPGENL

SEQ ID NO: 98135 - protein, 543 aa, Homo sapiens; identical to SEQ ID NO: 98134
  Payload ID: 19589
  Gene Name: YES proto-oncogene 1, Src family tyrosine kinase
  Uniprot ID: P07947
  ENSP ID: ENSP00000462468

SEQ ID NO: 98136 - protein, 548 aa, Homo sapiens
  Payload ID: 19589
  Gene Name: YES proto-oncogene 1, Src family tyrosine kinase
  ENSP ID: ENSP00000464380
MLDLIMGCIKSKENKSPAIKYRPENTPEPVSTSVSHYGAEPTTVSPCPSSSAKGTAVNFSSLSMTPFGGSSGVTPFGGASSSFSVVPSSYPAGLTGGVTIFVALYDYEARTTEDLSFKKGERFQIINNTEGDWWEARSIATGKNGYIPSNYVAPADSIQAEEWYFGKMGRKDAERLLLNPGNQRGIFLVRESETTKGAYSLSIRDWDEIRGDNVKHYKIRKLDNGGYYITTRAQFDTLQKLVKHYTEHADGLCHKLTTVCPTVKPQTQGLAKDAWEIPRESLRLEVKLGQGCFGEVWMGTWNGTTKVAIKTLKPGTMMPEAFLQEAQIMKKLRHDKLVPLYAVVSEEPIYIVTEFMSKGSLLDFLKEGDGKYLKLPQLVDMAAQIADGMAYIERMNYIHRDLRAANILVGENLVCKIADFGLARLIEDNEYTARQGAKFPIKWTAPEAALYGRFTIKSDVWSFGILQTELVTKGRVPYPGMVNREVLEQVERGYRMPCPQGCPESLHELMNLCWKKDPDERPTFEYIQSFLEDYFTATEPQYQPGENL

SEQ ID NO: 98137 - protein, 504 aa, Homo sapiens
  Payload ID: 19590
  Gene Name: Yes-associated protein 1
  Uniprot ID: P46937
  ENSP ID: ENSP00000282441
MDPGQQPPPQPAPQGQGQPPSQPPQGQGPPSGPGQPAPAATQAAPQAPPAGHQIVHVRGDSETDLEALFNAVMNPKTANVPQTVPMRLRKLPDSFFKPPEPKSHSRQASTDAGTAGALTPQHVRAHSSPASLQLGAVSPGTLTPTGVVSGPAATPTAQHLRQSSFEIPDDVPLPAGWEMAKTSSGQRYFLNHIDQTTTWQDPRKAMLSQMNVTAPTSPPVQQNMMNSASGPLPDGWEQAMTQDGEIYYINHKNKTTSWLDPRLDPRFAMNQRISQSAPVKQPPPLAPQSPQGGVMGGSNSNQQQQMRLQQLQMEKERLRLKQQELLRQAMRNINPSTANSPKCQELALRSQLPTLEQDGGTQNPVSSPGMSQELRTMTTNSSDPFLNSGTYHSRDESTDSGLSMSSYSVPRTPDDFLNSVDEMDTGDTINQSTLPSQQNRFPDYLEAIPGTNVDLGTLEGDGMNIEGEELMPSLQEALSSDILNDMESVLAATKLDKESFLTWL

SEQ ID NO: 98138 - protein, 470 aa, Homo sapiens
  Payload ID: 19590
  Gene Name: Yes-associated protein 1
  Uniprot ID: P46937
  ENSP ID: ENSP00000331023
MDPGQQPPPQPAPQGQGQPPSQPPQGQGPPSGPGQPAPAATQAAPQAPPAGHQIVHVRGDSETDLEALFNAVMNPKTANVPQTVPMRLRKLPDSFFKPPEPKSHSRQASTDAGTAGALTPQHVRAHSSPASLQLGAVSPGTLTPTGVVSGPAATPTAQHLRQSSFEIPDDVPLPAGWEMAKTSSGQRYFLNHIDQTTTWQDPRKAMLSQMNVTAPTSPPVQQNMMNSASAMNQRISQSAPVKQPPPLAPQSPQGGVMGGSNSNQQQQMRLQQLQMEKERLRLKQQELLRQVRPQAMRNINPSTANSPKCQELALRSQLPTLEQDGGTQNPVSSPGMSQELRTMTTNSSDPFLNSGTYHSRDESTDSGLSMSSYSVPRTPDDFLNSVDEMDTGDTINQSTLPSQQNRFPDYLEAIPGTNVDLGTLEGDGMNIEGEELMPSLQEALSSDILNDMESVLAATKLDKESFLTWL

SEQ ID NO: 98139 - protein, 488 aa, Homo sapiens
  Payload ID: 19590
  Gene Name: Yes-associated protein 1
  Uniprot ID: P46937
  ENSP ID: ENSP00000431574
MDPGQQPPPQPAPQGQGQPPSQPPQGQGPPSGPGQPAPAATQAAPQAPPAGHQIVHVRGDSETDLEALFNAVMNPKTANVPQTVPMRLRKLPDSFFKPPEPKSHSRQASTDAGTAGALTPQHVRAHSSPASLQLGAVSPGTLTPTGVVSGPAATPTAQHLRQSSFEIPDDVPLPAGWEMAKTSSGQRYFLNHIDQTTTWQDPRKAMLSQMNVTAPTSPPVQQNMMNSASGPLPDGWEQAMTQDGEIYYINHKNKTTSWLDPRLDPRFAMNQRISQSAPVKQPPPLAPQSPQGGVMGGSNSNQQQQMRLQQLQMEKERLRLKQQELLRQELALRSQLPTLEQDGGTQNPVSSPGMSQELRTMTTNSSDPFLNSGTYHSRDESTDSGLSMSSYSVPRTPDDFLNSVDEMDTGDTINQSTLPSQQNRFPDYLEAIPGTNVDLGTLEGDGMNIEGEELMPSLQEALSSDILNDMESVLAATKLDKESFLTWL

SEQ ID NO: 98140 - protein, 258 aa, Homo sapiens
  Payload ID: 19590
  Gene Name: Yes-associated protein 1
  ENSP ID: ENSP00000431626
  MOD_RES (1)..(1): Any amino acid
XKNKTTSWLDPRLDPRFAMNQRISQSAPVKQPPPLAPQSPQGGVMGGSNSNQQQQMRLQQLQMEKERLRLKQQELLRQVRPQAMRNINPSTANSPKCQELALRSQLPTLEQDGGTQNPVSSPGMSQELRTMTTNSSDPFLNSGTYHSRDESTDSGLSMSSYSVPRTPDDFLNSVDEMDTGDTINQSTLPSQQNRFPDYLEAIPGTNVDLGTLEGDGMNIEGEELMPSLQEALSSDILNDMESVLAATKLDKESFLTWL

SEQ ID NO: 98141 - protein, 450 aa, Homo sapiens
  Payload ID: 19590
  Gene Name: Yes-associated protein 1
  Uniprot ID: P46937
  ENSP ID: ENSP00000434134
MDPGQQPPPQPAPQGQGQPPSQPPQGQGPPSGPGQPAPAATQAAPQAPPAGHQIVHVRGDSETDLEALFNAVMNPKTANVPQTVPMRLRKLPDSFFKPPEPKSHSRQASTDAGTAGALTPQHVRAHSSPASLQLGAVSPGTLTPTGVVSGPAATPTAQHLRQSSFEIPDDVPLPAGWEMAKTSSGQRYFLNHIDQTTTWQDPRKAMLSQMNVTAPTSPPVQQNMMNSASAMNQRISQSAPVKQPPPLAPQSPQGGVMGGSNSNQQQQMRLQQLQMEKERLRLKQQELLRQELALRSQLPTLEQDGGTQNPVSSPGMSQELRTMTTNSSDPFLNSGTYHSRDESTDSGLSMSSYSVPRTPDDFLNSVDEMDTGDTINQSTLPSQQNRFPDYLEAIPGTNVDLGTLEGDGMNIEGEELMPSLQEALSSDILNDMESVLAATKLDKESFLTWL

SEQ ID NO: 98142 - protein, 326 aa, Homo sapiens
  Payload ID: 19590
  Gene Name: Yes-associated protein 1
  Uniprot ID: P46937
  ENSP ID: ENSP00000435602
MAKTSSGQRYFLNHIDQTTTWQDPRKAMLSQMNVTAPTSPPVQQNMMNSASGPLPDGWEQAMTQDGEIYYINHKNKTTSWLDPRLDPRFAMNQRISQSAPVKQPPPLAPQSPQGGVMGGSNSNQQQQMRLQQLQMEKERLRLKQQELLRQAMRNINPSTANSPKCQELALRSQLPTLEQDGGTQNPVSSPGMSQELRTMTTNSSDPFLNSGTYHSRDESTDSGLSMSSYSVPRTPDDFLNSVDEMDTGDTINQSTLPSQQNRFPDYLEAIPGTNVDLGTLEGDGMNIEGEELMPSLQEALSSDILNDMESVLAATKLDKESFLTWL

SEQ ID NO: 98143 - protein, 492 aa, Homo sapiens
  Payload ID: 19590
  Gene Name: Yes-associated protein 1
  Uniprot ID: P46937
  ENSP ID: ENSP00000445635
MDPGQQPPPQPAPQGQGQPPSQPPQGQGPPSGPGQPAPAATQAAPQAPPAGHQIVHVRGDSETDLEALFNAVMNPKTANVPQTVPMRLRKLPDSFFKPPEPKSHSRQASTDAGTAGALTPQHVRAHSSPASLQLGAVSPGTLTPTGVVSGPAATPTAQHLRQSSFEIPDDVPLPAGWEMAKTSSGQRYFLNHIDQTTTWQDPRKAMLSQMNVTAPTSPPVQQNMMNSASGPLPDGWEQAMTQDGEIYYINHKNKTTSWLDPRLDPRFAMNQRISQSAPVKQPPPLAPQSPQGGVMGGSNSNQQQQMRLQQLQMEKERLRLKQQELLRQVRPQELALRSQLPTLEQDGGTQNPVSSPGMSQELRTMTTNSSDPFLNSGTYHSRDESTDSGLSMSSYSVPRTPDDFLNSVDEMDTGDTINQSTLPSQQNRFPDYLEAIPGTNVDLGTLEGDGMNIEGEELMPSLQEALSSDILNDMESVLAATKLDKESFLTWL

SEQ ID NO: 98144 - protein, 508 aa, Homo sapiens
  Payload ID: 19590
  Gene Name: Yes-associated protein 1
  Uniprot ID: P46937
  ENSP ID: ENSP00000478927
MDPGQQPPPQPAPQGQGQPPSQPPQGQGPPSGPGQPAPAATQAAPQAPPAGHQIVHVRGDSETDLEALFNAVMNPKTANVPQTVPMRLRKLPDSFFKPPEPKSHSRQASTDAGTAGALTPQHVRAHSSPASLQLGAVSPGTLTPTGVVSGPAATPTAQHLRQSSFEIPDDVPLPAGWEMAKTSSGQRYFLNHIDQTTTWQDPRKAMLSQMNVTAPTSPPVQQNMMNSASGPLPDGWEQAMTQDGEIYYINHKNKTTSWLDPRLDPRFAMNQRISQSAPVKQPPPLAPQSPQGGVMGGSNSNQQQQMRLQQLQMEKERLRLKQQELLRQVRPQAMRNINPSTANSPKCQELALRSQLPTLEQDGGTQNPVSSPGMSQELRTMTTNSSDPFLNSGTYHSRDESTDSGLSMSSYSVPRTPDDFLNSVDEMDTGDTINQSTLPSQQNRFPDYLEAIPGTNVDLGTLEGDGMNIEGEELMPSLQEALSSDILNDMESVLAATKLDKESFLTWL

SEQ ID NO: 98145 - protein, 454 aa, Homo sapiens
  Payload ID: 19590
  Gene Name: Yes-associated protein 1
  Uniprot ID: P46937
  ENSP ID: ENSP00000487519
MDPGQQPPPQPAPQGQGQPPSQPPQGQGPPSGPGQPAPAATQAAPQAPPAGHQIVHVRGDSETDLEALFNAVMNPKTANVPQTVPMRLRKLPDSFFKPPEPKSHSRQASTDAGTAGALTPQHVRAHSSPASLQLGAVSPGTLTPTGVVSGPAATPTAQHLRQSSFEIPDDVPLPAGWEMAKTSSGQRYFLNHIDQTTTWQDPRKAMLSQMNVTAPTSPPVQQNMMNSASAMNQRISQSAPVKQPPPLAPQSPQGGVMGGSNSNQQQQMRLQQLQMEKERLRLKQQELLRQVRPQELALRSQLPTLEQDGGTQNPVSSPGMSQELRTMTTNSSDPFLNSGTYHSRDESTDSGLSMSSYSVPRTPDDFLNSVDEMDTGDTINQSTLPSQQNRFPDYLEAIPGTNVDLGTLEGDGMNIEGEELMPSLQEALSSDILNDMESVLAATKLDKESFLTWL

SEQ ID NO: 98146 - protein, 306 aa, Homo sapiens
  Payload ID: 19591
  Gene Name: Yip1 domain family, member 1
  Uniprot ID: Q9Y548
  ENSP ID: ENSP00000072644
MAAVDDLQFEEFGNAATSLTANPDATTVNIEDPGETPKHQPGSPRGSGREEDDELLGNDDSDKTELLAGQKKSSPFWTFEYYQTFFDVDTYQVFDRIKGSLLPIPGKNFVRLYIRSNPDLYGPFWICATLVFAIAISGNLSNFLIHLGEKTYHYVPEFRKVSIAATIIYAYAWLVPLALWGFLMWRNSKVMNIVSYSFLEIVCVYGYSLFIYIPTAILWIIPQKAVRWILVMIALGISGSLLAMTFWPAVREDNRRVALATIVTIVLLHMLLSVGCLAYFFDAPEMDHLPTTTATPNQTVAAAKSS

SEQ ID NO: 98147 - protein, 123 aa, Homo sapiens
  Payload ID: 19591
  Gene Name: Yip1 domain family, member 1
  Uniprot ID: Q9Y548
  ENSP ID: ENSP00000360452
MWRNSKVMNIVSYSFLEIVCVYGYSLFIYIPTAILWIIPQKAVRWILVMIALGISGSLLAMTFWPAVREDNRRVALATIVTIVLLHMLLSVGCLAYFFDAPEMDHLPTTTATPNQTVAAAKSS

SEQ ID NO: 98148 - protein, 217 aa, Homo sapiens
  Payload ID: 19591
  Gene Name: Yip1 domain family, member 1
  ENSP ID: ENSP00000416507
MAAVDDLQFEEFGNAATSLTANPDATTVNIEDPGETPKHQPGSPRGSGREEDDELLGNDDSDKTELLAGQKKSSPFWTFEYYQTFFDVDTYQVFDRIKGSLLPIPGKNFVRLYIRSNPDLYGPFWICATLVFAIAISGNLSNFLIHLGEKTYHYVPEFRKVSIAATIIYAYAWLVPLALWGFLMWRNSKVMNIVSYSFLEIVCVYGYSLFIYIPTAV

SEQ ID NO: 98149 - protein, 306 aa, Homo sapiens; identical to SEQ ID NO: 98146
  Payload ID: 19591
  Gene Name: Yip1 domain family, member 1
  Uniprot ID: Q9Y548
  ENSP ID: ENSP00000432266

SEQ ID NO: 98150 - protein, 316 aa, Homo sapiens
  Payload ID: 19592
  Gene Name: Yip1 domain family, member 2
  Uniprot ID: Q9BWQ6
  ENSP ID: ENSP00000253031
MASADELTFHEFEEATNLLADTPDAATTSRSDQLTPQGHVAVAVGSGGSYGAEDEVEEESDKAALLQEQQQQQQPGFWTFSYYQSFFDVDTSQVLDRIKGSLLPRPGHNFVRHHLRNRPDLYGPFWICATLAFVLAVTGNLTLVLAQRRDPSIHYSPQFHKVTVAGISIYCYAWLVPLALWGFLRWRKGVQERMGPYTFLETVCIYGYSLFVFIPMVVLWLIPVPWLQWLFGALALGLSAAGLVFTLWPVVREDTRLVATVLLSVVVLLHALLAMGCKLYFFQSLPPENVAPPPQITSLPSNIALSPTLPQSLAPS

SEQ ID NO: 98151 - protein, 186 aa, Homo sapiens
  Payload ID: 19592
  Gene Name: Yip1 domain family, member 2
  ENSP ID: ENSP00000464839
MASADELTFHEFEEATNLLADTPDAATTSRSDQLTPQGHVAVAVGSGGSYGAEDEVEEESDKAAVLDRIKGSLLPRPGHNFVRHHLRNRPDLYGPFWICATLAFVLAVTGNLTLVLAQRRDPSIHYSPQFHKVTVAGISIYCYAWLVPLALWGFLRWRKGVQERMGPYTFLETVCIYGYSLFVFIP

SEQ ID NO: 98152 - protein, 79 aa, Homo sapiens
  Payload ID: 19592
  Gene Name: Yip1 domain family, member 2
  ENSP ID: ENSP00000465257
LSAAGLVFTLWPVVREDTRLVATVLLSVVVLLHALLAMGCKLYFFQSLPPENVAPPPQITSLPSNIALSPTLPQSLAPS

SEQ ID NO: 98153 - protein, 84 aa, Homo sapiens
  Payload ID: 19592
  Gene Name: Yip1 domain family, member 2
  ENSP ID: ENSP00000465943
MGPYTFLETVCIYGYSLFVFIPMVVLWLIPVPWLQWLFGALALGLSAAGLVFTLWPVVREDTRLVATVLLSVVVLLHALLAMGC

SEQ ID NO: 98154 - protein, 316 aa, Homo sapiens; identical to SEQ ID NO: 98150
  Payload ID: 19592
  Gene Name: Yip1 domain family, member 2
  Uniprot ID: Q9BWQ6
  ENSP ID: ENSP00000466055

SEQ ID NO: 98155 - protein, 103 aa, Homo sapiens
  Payload ID: 19592
  Gene Name: Yip1 domain family, member 2
  ENSP ID: ENSP00000466408
MGPYTFLETVCIYGYSLFVFIPMVVLWLIPVPWLQWLFGALALGLSAAGLVFTLWPVVREDTRLVATVLLSVVVLLHALLAMGCKLYFFQSLPPENVAPPPQI

SEQ ID NO: 98156 - protein, 277 aa, Homo sapiens
  Payload ID: 19592
  Gene Name: Yip1 domain family, member 2
  ENSP ID: ENSP00000467019
MASADELTFHEFEEATNLLADTPDAATTSRSDQLTPQGHVAVAVGSGGSYGAEDEVEEESDKAALLQEQQQQQQPGFWTFSYYQSFFDVDTSQVLDRIKGSLLPRPGHNFVRHHLRNRPDLYVTVAGISIYCYAWLVPLALWGFLRWRKGVQERMGPYTFLETVCIYGYSLFVFIPMVVLWLIPVPWLQWLFGALALGLSAAGLVFTLWPVVREDTRLVATVLLSVVVLLHALLAMGCKLYFFQSLPPENVAPPPQITSLPSNIALSPTLPQSLAPS

SEQ ID NO: 98157 - protein, 206 aa, Homo sapiens
  Payload ID: 19592
  Gene Name: Yip1 domain family, member 2
  ENSP ID: ENSP00000467156
  MOD_RES (1)..(1): Any amino acid
XGNLTLVLAQRRDPSIHYSPQFHKASTAMRGWCPWPCGASCGGARVSRSAWGPTPSWRLCASTATPSLSSSPWWSCGSSLCLGCSGSLGRWPWACQPPGWYSPSGPWSVRTPGWWPQCCCPWSCCSTPSWPWAVSCTSSSRCLRRTWLLHPKSHLCPQTSRCPLPCRSPWPPPRKARVPQATPKWTNPSACPAPQTMTEGSFDTLR

SEQ ID NO: 98158 - protein, 169 aa, Homo sapiens
  Payload ID: 19592
  Gene Name: Yip1 domain family, member 2
  ENSP ID: ENSP00000467829
  MOD_RES (1)..(1): Any amino acid
XRDPSIHYSPQFHKVTVAGISIYCYAWLVPLALWGFLRWRKGVQERMGPYTFLETVCIYGYSLFVFIPMVVLWLIPVPWLQWLFGALALGLSAAGLVFTLWPVVREDTRLVATVLLSVVVLLHALLAMGCKLYFFQSLPPENVAPPPQITSLPSNIALSPTLPQSLAPS

SEQ ID NO: 98159 - protein, 217 aa, Homo sapiens
  Payload ID: 19592
  Gene Name: Yip1 domain family, member 2
  ENSP ID: ENSP00000468436
MASADELTFHEFEEATNLLADTPDAATTSRSDQLTPQGHVAVAVGSGGSYGAEDEVEEESDKAALLQEQQQQQQPGFWTFSYYQSFFDVDTSQVLDRIKGSLLPRPGHNFVRHHLRNRPDLYGPFWICATLAFVLAVTGNLTLVLAQRRDPSIHYSPQFHKVTVAGISIYCYAWLVPLALWGFLRWRKGVQERMGPYTFLETVCIYGYSLFVFIPMV

SEQ ID NO: 98160 - protein, 350 aa, Homo sapiens
  Payload ID: 19593
  Gene Name: Yip1 domain family, member 3
  Uniprot ID: Q9GZM5
  ENSP ID: ENSP00000361499
MATTAAPAGGARNGAGPEWGGFEENIQGGGSAVIDMENMDDTSGSSFEDMGELHQRLREEEVDADAADAAAAEEEDGEFLGMKGFKGQLSRQVADQMWQAGKRQASRAFSLYANIDILRPYFDVEPAQVRSRLLESMIPIKMVNFPQKIAGELYGPLMLVFTLVAILLHGMKTSDTIIREGTLMGTAIGTCFGYWLGVSSFIYFLAYLCNAQITMLQMLALLGYGLFGHCIVLFITYNIHLHALFYLFWLLVGGLSTLRMVAVLVSRTVGPTQRLLLCGTLAALHMLFLLYLHFAYHKVVEGILDTLEGPNIPPIQRVPRDIPAMLPAARLPTTVLNATAKAVAVTLQSH

SEQ ID NO: 98161 - protein, 63 aa, Homo sapiens
  Payload ID: 19593
  Gene Name: Yip1 domain family, member 3
  ENSP ID: ENSP00000390056
MATTAAPAGGARNGAGPEWGGFEENIQWKNKALNPGMSRGLNGWNRKVLHSRSHCLHRAEAQL

SEQ ID NO: 98162 - protein, 45 aa, Homo sapiens
  Payload ID: 19593
  Gene Name: Yip1 domain family, member 3
  ENSP ID: ENSP00000392699
MATTAAPAGGARNGAGPEWGGFEENIQALASRIWVSCISACARKK

SEQ ID NO: 98163 - protein, 63 aa, Homo sapiens; identical to SEQ ID NO: 98161
  Payload ID: 19593
  Gene Name: Yip1 domain family, member 3
  ENSP ID: ENSP00000421053

SEQ ID NO: 98164 - protein, 109 aa, Homo sapiens
  Payload ID: 19593
  Gene Name: Yip1 domain family, member 3
  ENSP ID: ENSP00000421094
MENMDDTSGSSFEDMGELHQRLREEEVDADAADAAAAEEEDGEFLGMKGFKGQLSRQVADQMWQAGKRQASRAFSLYANIDILRPYFDVEPAQVRSRLLESMIPIKMVN

SEQ ID NO: 98165 - protein, 262 aa, Homo sapiens
  Payload ID: 19593
  Gene Name: Yip1 domain family, member 3
  ENSP ID: ENSP00000421461
MATTAAPAGGARNGAGPEWGGFEENIQGGGSAVIDMENMDDTSGSSFEDMGELHQRLREEEVDADAADAAAAEEEDGEFLGMKGFKGQLSRQVADQMWQAGKRQASRAFSLYANIDILRPYFDVEPAQVRSRLLESMIPIKMVNFPQKIAGELYGPLMLVFTLVAILLHGMKTSDTIIITMLQMLALLGYGLFGHCIVLFITYNIHLHALFYLFWLLVGGLSTLRMVAVLVSRTVGPTQRLLLCGTLAALHMLFLLYLHFAY

SEQ ID NO: 98166 - protein, 135 aa, Homo sapiens
  Payload ID: 19593
  Gene Name: Yip1 domain family, member 3
  ENSP ID: ENSP00000423544
  MOD_RES (1)..(1): Any amino acid
XKRQASRAFSLYANIDILRPYFDVEPAQVRSRTLCLPAGHGGSRLESQHFGRPRRADHKVRRSRPSWLTRLLESMIPIKMVNFPQKIAGELYGPLMLVFTLVAILLHGMKTSDTIIREGTLMGTAIGTCFGYWLG

SEQ ID NO: 98167 - protein, 64 aa, Homo sapiens
  Payload ID: 19593
  Gene Name: Yip1 domain family, member 3
  ENSP ID: ENSP00000424629
MATTAAPAGGARNGAGPEWGGFEENIQQWKNKALNPGMSRGLNGWNRKVLHSRSHCLHRAEAQL

SEQ ID NO: 98168 - protein, 356 aa, Homo sapiens
  Payload ID: 19593
  Gene Name: Yip1 domain family, member 3
  ENSP ID: ENSP00000425494
MATTAAPAGGARNGAGPEWGGFEENIQEPLSSQGGGSAVIDMENMDDTSGSSFEDMGELHQRLREEEVDADAADAAAAEEEDGEFLGMKGFKGQLSRQVADQMWQAGKRQASRAFSLYANIDILRPYFDVEPAQVRSRLLESMIPIKMVNFPQKIAGELYGPLMLVFTLVAILLHGMKTSDTIIREGTLMGTAIGTCFGYWLGVSSFIYFLAYLCNAQITMLQMLALLGYGLFGHCIVLFITYNIHLHALFYLFWLLVGGLSTLRMVAVLVSRTVGPTQRLLLCGTLAALHMLFLLYLHFAYHKVVEGILDTLEGPNIPPIQRVPRDIPAMLPAARLPTTVLNATAKAVAVTLQSH

SEQ ID NO: 98169 - protein, 63 aa, Homo sapiens; identical to SEQ ID NO: 98161
  Payload ID: 19593
  Gene Name: Yip1 domain family, member 3
  ENSP ID: ENSP00000427207

SEQ ID NO: 98170 - protein, 244 aa, Homo sapiens
  Payload ID: 19594
  Gene Name: Yip1 domain family, member 4
  Uniprot ID: Q9BSR8
  ENSP ID: ENSP00000238831
MQPPGPPPAYAPTNGDFTFVSSADAEDLSGSIASPDVKLNLGGDFIKESTATTFLRQRGYGWLLEVEDDDPEDNKPLLEELDIDLKDIYYKIRCVLMPMPSLGFNRQVVRDNPDFWGPLAVVLFFSMISLYGQFRVVSWIITIWIFGSLTIFLLARVLGGEVAYGQVLGVIGYSLLPLIVIAPVLLVVGSFEVVSTLIKLFGVFWAAYSAASLLVGEEFKTKKPLLIYPIFLLYIYFLSLYTGV

SEQ ID NO: 98171 - protein, 58 aa, Homo sapiens
  Payload ID: 19594
  Gene Name: Yip1 domain family, member 4
  ENSP ID: ENSP00000394339
EDLSGSIASPDVKLNLGGDFIKESTATTFLRQRGYGWLLEVEDDDPEDNKPLLWSHGL

SEQ ID NO: 98172 - protein, 33 aa, Homo sapiens
  Payload ID: 19594
  Gene Name: Yip1 domain family, member 4
  ENSP ID: ENSP00000414267
  MOD_RES (1)..(1): Any amino acid
XPVLLVVGSFEVVSTLIKVRSTRGTGLLEVRII

SEQ ID NO: 98173 - protein, 257 aa, Homo sapiens
  Payload ID: 19595
  Gene Name: Yip1 domain family, member 5
  Uniprot ID: Q969M3
  ENSP ID: ENSP00000274496
MSGFENLNTDFYQTSYSIDDQSQQSYDYGGSGGPYSKQYAGYDYSQQGRFVPPDMMQPQQPYTGQIYQPTQAYTPASPQPFYGNNFEDEPPLLEELGINFDHIWQKTLTVLHPLKVADGSIMNETDLAGPMVFCLAFGATLLLAGKIQFGYVYGISAIGCLGMFCLLNLMSMTGVSFGCVASVLGYCLLPMILLSSFAVIFSLQGMVGIILTAGIIGWCSFSASKIFISALAMEGQQLLVAYPCALLYGVFALISVF

SEQ ID NO: 98174 - protein, 257 aa, Homo sapiens; identical to SEQ ID NO: 98173
  Payload ID: 19595
  Gene Name: Yip1 domain family, member 5
  Uniprot ID: Q969M3
  ENSP ID: ENSP00000397704

SEQ ID NO: 98175 - protein, 203 aa, Homo sapiens
  Payload ID: 19595
  Gene Name: Yip1 domain family, member 5
  Uniprot ID: Q969M3
  ENSP ID: ENSP00000425422
MMQPQQPYTGQIYQPTQAYTPASPQPFYGNNFEDEPPLLEELGINFDHIWQKTLTVLHPLKVADGSIMNETDLAGPMVFCLAFGATLLLAGKIQFGYVYGISAIGCLGMFCLLNLMSMTGVSFGCVASVLGYCLLPMILLSSFAVIFSLQGMVGIILTAGIIGWCSFSASKIFISALAMEGQQLLVAYPCALLYGVFALISVF

SEQ ID NO: 98176 - protein, 101 aa, Homo sapiens
  Payload ID: 19595
  Gene Name: Yip1 domain family, member 5
  ENSP ID: ENSP00000428715
MMQPQQPYTGQIYQPTQAYTPASPQPFYGNNFEDEPPLLEELGINFDHIWQKTLTVLHPLKVADGSIMNETDLAGPMVFCLAFGATLLLAGKIQFGYVYGI

SEQ ID NO: 98177 - protein, 177 aa, Homo sapiens
  Payload ID: 19595
  Gene Name: Yip1 domain family, member 5
  ENSP ID: ENSP00000429777
MMQPQQPYTGQIYQPTQAYTPASPQPFYGNNFEDEPPLLEELGINFDHIWQKTLTVLHPLKVADGSIMNETDLAGPMVFCLAFGATLLLAGKIQFGYVYGISAIGCLGMFCLLNLMSMTGVSFGCVASVLGYCLLPMILLSSFAVIFSLQGMVGIILTAGIIGWCSFSASKIFISAL

SEQ ID NO: 98178 - protein, 193 aa, Homo sapiens
  Payload ID: 19596
  Gene Name: Yip1 domain family, member 6
  Uniprot ID: Q96EC8
  ENSP ID: ENSP00000363751
MAEAEESPGDPGTASPRPLMRDLKAVGKKFMHVLYPRKSNTLLRDWDLWGPLILCVTLALMLQRDSADSEKDGGPQFAEVFVIVWFGAVTITLNSKLLGGNISFFQSLCVLGYCILPLTVAMLICRLVLLADPGPVNFMVRLFVVIVMFAWSIVASTAFLADSQPPNRRALAVYPVFLFYFVISWMILTFTPQ

SEQ ID NO: 98179 - protein, 188 aa, Homo sapiens
  Payload ID: 19596
  Gene Name: Yip1 domain family, member 6
  ENSP ID: ENSP00000401799
MAEAEESPGDPGTASPRPLMRDLKAVGKKFMHVLYPRKSNTLLRDWDLWGPLILCVTLALMLQRDSADSEKDGGPQFAEVFVIVWFGAVTITLNSKLLGGNISFFQSLCVLGYCILPLTVAMLICRLVLLADPGPVNFMVRLFVVIVMFAWSIVASTAFLADSQPPNRRALAVYPVFLFYFVISWMIL

SEQ ID NO: 98180 - protein, 236 aa, Homo sapiens
  Payload ID: 19596
  Gene Name: Yip1 domain family, member 6
  Uniprot ID: Q96EC8
  ENSP ID: ENSP00000417573
MAEAEESPGDPGTASPRPLFAGLSDISISQDIPVEGEITIPMRSRIREFDSSTLNESVRNTIMRDLKAVGKKFMHVLYPRKSNTLLRDWDLWGPLILCVTLALMLQRDSADSEKDGGPQFAEVFVIVWFGAVTITLNSKLLGGNISFFQSLCVLGYCILPLTVAMLICRLVLLADPGPVNFMVRLFVVIVMFAWSIVASTAFLADSQPPNRRALAVYPVFLFYFVISWMILTFTPQ

SEQ ID NO: 98181 - protein, 280 aa, Homo sapiens
  Payload ID: 19597
  Gene Name: Yip1 domain family, member 7
  Uniprot ID: Q8N8F6
  ENSP ID: ENSP00000332772
MDLLKISHTKLHLLEDLSIKNKQRMSNLAQFDSDFYQSNFTIDNQEQSGNDSNAYGNLYGSRKQQAGEQPQPASFVPSEMLMSSGYAGQFFQPASNSDYYSQSPYIDSFDEEPPLLEELGIHFDHIWQKTLTVLNPMKPVDGSIMNETDLTGPILFCVALGATLLLAGKVQFGYVYGMSAIGCLVIHALLNLMSSSGVSYGCVASVLGYCLLPMVILSGCAMFFSLQGIFGIMSSLVIIGWCSLSASKIFIAALHMEGQQLLVAYPCAILYGLFALLTIF

SEQ ID NO: 98182 - protein, 256 aa, Homo sapiens
  Payload ID: 19597
  Gene Name: Yip1 domain family, member 7
  ENSP ID: ENSP00000412696
MSNLAQFDSDFYQSNFTIDNQEQSGNDSNAYGNLYGSRKQQAGEQPQPASFVPSEMLMSSGYAGQFFQPASNSDYYSQSPYIDSFDEEPPLLEELGIHFDHIWQKTLTVLNPMKPVDGSIMNETDLTGPILFCVALGATLLLAGKVQFGYVYGMSAIGCLVIHALLNLMSSSGVSYGCVASVLGYCLLPMVILSGCAMFFSLQGIFGIMSSLVIIGWCSLSASKIFIAALHMEGQQLLVAYPCAILYGLFALLTIF

SEQ ID NO: 98183 - protein, 39 aa, Homo sapiens
  Payload ID: 19597
  Gene Name: Yip1 domain family, member 7
  ENSP ID: ENSP00000477355
MSNLAQFDSDFYQSNFTIDNQEQSGNDSNAYGNLYGSRK

SEQ ID NO: 98184 - protein, 241 aa, Homo sapiens
  Payload ID: 19598
  Gene Name: Yip1 interacting factor homolog A (S. cerevisiae)
  ENSP ID: ENSP00000352437
MAYHSGYGAHGSKHRARAAPDPPPLFDDTSGGYSSQPGGYPATGADVAFSVNHLLGDPMANVAMAYGSSIASHGKDMVHKELHRFVSVSKLKYFFAVDTAYVAKKLGLLVFPYTHQNWEVQYSRDAPLPPRQDLNAPDLYIPTMAFITYVLLAGMALGIQKRMILSVLTGLLFGSDGYYVALAWTSSALMYFIVRSLRTAALGPDSMGGPVPRQRLQLYLTLGAAAFQPLIIYWLTFHLVR

SEQ ID NO: 98185 - protein, 293 aa, Homo sapiens
  Payload ID: 19598
  Gene Name: Yip1 interacting factor homolog A (S. cerevisiae)
  Uniprot ID: O95070
  ENSP ID: ENSP00000366098
MAYHSGYGAHGSKHRARAAPDPPPLFDDTSGGYSSQPGGYPATGADVAFSVNHLLGDPMANVAMAYGSSIASHGKDMVHKELHRFVSVSKLKYFFAVDTAYVAKKLGLLVFPYTHQNWEVQYSRDAPLPPRQDLNAPDLYIPTMAFITYVLLAGMALGIQKRFSPEVLGLCASTALVWVVMEVLALLLGLYLATVRSDLSTFHLLAYSGYKYVGMILSVLTGLLFGSDGYYVALAWTSSALMYFIVRSLRTAALGPDSMGGPVPRQRLQLYLTLGAAAFQPLIIYWLTFHLVR

SEQ ID NO: 98186 - protein, 199 aa, Homo sapiens
  Payload ID: 19598
  Gene Name: Yip1 interacting factor homolog A (S. cerevisiae)
  ENSP ID: ENSP00000401953
MAYHSGYGAHGSKHRARAAPDPPPLFDDTSGGYSSQPGGYPATGADVAFSVNHLLGDPMANVAMAYGSSIASHGKDMVHKELHRFVSVSKLKYFFAVDTAYVAKKLGLLVFPYTHQNWEVQYSRDAPLPPRQDLNAPDLYIPTMAFITYVLLAGMALGIQKRMPGSEPPLLWRRFSPEVLGLCASTALVWVVMEVLALL

SEQ ID NO: 98187 - protein, 53 aa, Homo sapiens
  Payload ID: 19598
  Gene Name: Yip1 interacting factor homolog A (S. cerevisiae)
  ENSP ID: ENSP00000431665
MAYHSGYGAHAAPFCVCEQTQVFFCCGHSLRGQEARAAGLPLHTPELGSAVQS

SEQ ID NO: 98188 - protein, 160 aa, Homo sapiens
  Payload ID: 19598
  Gene Name: Yip1 interacting factor homolog A (S. cerevisiae)
  ENSP ID: ENSP00000431935
MAYHSGYGAHGSKHRARAAPDPPPLFDDTSGGYSSQPGGYPATGADVAFSVNHLLGDPMANVAMAYGSSIASHGKDMVHKELHRFVSVSKLKYFFAVDTAYVAKKLGLLVFPYTHQNWEVQYSRDAPLPPRQDLNAPDLYIPSSPRRCWACVQAQRWCGW

SEQ ID NO: 98189 - protein, 79 aa, Homo sapiens
  Payload ID: 19598
  Gene Name: Yip1 interacting factor homolog A (S. cerevisiae)
  ENSP ID: ENSP00000432185
MILSVLTGLLFGSDGYYVALAWTSSALMYFIVRSLRTAALGPDSMGGPVPRQRLQLYLTLGAAAFQPLIIYWLTFHLVR

SEQ ID NO: 98190 - protein, 158 aa, Homo sapiens
  Payload ID: 19598
  Gene Name: Yip1 interacting factor homolog A (S. cerevisiae)
  ENSP ID: ENSP00000437042
MAFITYVLLAGMALGIQKRFSPEVLGLCASTALVWVVMEVLALLLGLYLATVRSDLSTFHLLAYSGYKYVGMILSVLTGLLFGSDGYYVALAWTSSALMYFIVSLVHPPIPLPSLEGKPPPPGQASVLLSSRCALCGQQPWAPTAWGAPSPGSVSSST

SEQ ID NO: 98191 - protein, 118 aa, Homo sapiens
  Payload ID: 19598
  Gene Name: Yip1 interacting factor homolog A (S. cerevisiae)
  ENSP ID: ENSP00000478815
GSKHRARAAPDPPPLFDDTSGGYSSQPGGYPATGADVAFSVNHLLGDPMANVAMAYGSSIASHGKDMVHKELHRFVSVSKLKYFFAVDTAYVAEARAAGLPYTHPELGSAVQSMLLCP

SEQ ID NO: 98192 - protein, 299 aa, Homo sapiens
  Payload ID: 19599
  Gene Name: Yip1 interacting factor homolog B (S. cerevisiae)
  Uniprot ID: Q5BJH7
  ENSP ID: ENSP00000329559
MPGSASKRRIPVSQPGMADPHQLFDDTSSAQSRGYGAQRAPGGLSYPAASPTPHAAFLADPVSNMAMAYGSSLAAQGKELVDKNIDRFIPITKLKYYFAVDTMYVGRKLGLLFFPYLHQDWEVQYQQDTPVAPRFDVNAPDLYIPAMAFITYVLVAGLALGTQDRFSPDLLGLQASSALAWLTLEVLAILLSLYLVTVNTDLTTIDLVAFLGYKYVGMIGGVLMGLLFGKIGYYLVLGWCCVAIFVFMIRTLRLKILADAAAEGVPVRGARNQLRMYLTMAVAAAQPMLMYWLTFHLVR

SEQ ID NO: 98193 - protein, 291 aa, Homo sapiens
  Payload ID: 19599
  Gene Name: Yip1 interacting factor homolog B (S. cerevisiae)
  Uniprot ID: Q5BJH7
  ENSP ID: ENSP00000337411
MHPAGLAAAAAGTPRLPSKRRIPVSQPGMADPHQLFDDTSSAQSRGYGAQRAPGGLSYPAASPTPHAAFLADPVSNMAMAYGSSLAAQGKELVDKNIDRFIPITKLKYYFAVDTMYVGRKLGLLFFPYLHQDWEVQYQQDTPVAPRFDVNAPDLYIPAMAFITYVLVAGLALGTQDRFSPDLLGLQASSALAWLTLEVLAILLSLYLVTVNTDLTTIDLVAFLGYKYVGMIGGVLMGLLFGKIGYYLVLGWCCVAIFVFMFPLLPGAVAHACNPSTLGGRGGRITRSGRCG

SEQ ID NO: 98194 - protein, 314 aa, Homo sapiens
  Payload ID: 19599
  Gene Name: Yip1 interacting factor homolog B (S. cerevisiae)
  Uniprot ID: Q5BJH7
  ENSP ID: ENSP00000343435
MHPAGLAAAAAGTPRLRKWPSKRRIPVSQPGMADPHQLFDDTSSAQSRGYGAQRAPGGLSYPAASPTPHAAFLADPVSNMAMAYGSSLAAQGKELVDKNIDRFIPITKLKYYFAVDTMYVGRKLGLLFFPYLHQDWEVQYQQDTPVAPRFDVNAPDLYIPAMAFITYVLVAGLALGTQDRFSPDLLGLQASSALAWLTLEVLAILLSLYLVTVNTDLTTIDLVAFLGYKYVGMIGGVLMGLLFGKIGYYLVLGWCCVAIFVFMIRTLRLKILADAAAEGVPVRGARNQLRMYLTMAVAAAQPMLMYWLTFHLVR

SEQ ID NO: 98195 - protein, 283 aa, Homo sapiens
  Payload ID: 19599
  Gene Name: Yip1 interacting factor homolog B (S. cerevisiae)
  Uniprot ID: Q5BJH7
  ENSP ID: ENSP00000375971
MADPHQLFDDTSSAQSRGYGAQRAPGGLSYPAASPTPHAAFLADPVSNMAMAYGSSLAAQGKELVDKNIDRFIPITKLKYYFAVDTMYVGRKLGLLFFPYLHQDWEVQYQQDTPVAPRFDVNAPDLYIPAMAFITYVLVAGLALGTQDRFSPDLLGLQASSALAWLTLEVLAILLSLYLVTVNTDLTTIDLVAFLGYKYVGMIGGVLMGLLFGKIGYYLVLGWCCVAIFVFMIRTLRLKILADAAAEGVPVRGARNQLRMYLTMAVAAAQPMLMYWLTFHLVR

SEQ ID NO: 98196 - protein, 283 aa, Homo sapiens; identical to SEQ ID NO: 98195
  Payload ID: 19599
  Gene Name: Yip1 interacting factor homolog B (S. cerevisiae)
  Uniprot ID: Q5BJH7
  ENSP ID: ENSP00000465230

SEQ ID NO: 98197 - protein, 103 aa, Homo sapiens
  Payload ID: 19599
  Gene Name: Yip1 interacting factor homolog B (S. cerevisiae)
  ENSP ID: ENSP00000465277
MADPHQLFDDTSSAQSRGYGAQRAPGGLSYPAASPTPHAAFLADPVSNMAMAYGSSLAAQGKELVDKNIDRFIPITKLKYYFAVDTMYVGRKLGLLFFPYLHQ

SEQ ID NO: 98198 - protein, 294 aa, Homo sapiens
  Payload ID: 19599
  Gene Name: Yip1 interacting factor homolog B (S. cerevisiae)
  Uniprot ID: Q5BJH7
  ENSP ID: ENSP00000465446
MHPAGLAAAAAGTPRLPSKRRIPVSQPGMADPHQLFDDTSSAQSRGYGAQRAPGGLSYPAASPTPHAAFLADPVSNMAMAYGSSLAAQGKELVDKNIDRFIPITKLKYYFAVDTMYVGRKLGLLFFPYLHQDWEVQYQQDTPVAPRFDVNAPDLYIPAMAFITYVLVAGLALGTQDRFSPDLLGLQASSALAWLTLEVLAILLSLYLVTVNTDLTTIDLVAFLGYKYVGMIGGVLMGLLFGKIGYYLVLGWCCVAIFVFMFPLLPGAVAHACNPSTLGGRGGRITRSGDQDHPG

SEQ ID NO: 98199 - protein, 283 aa, Homo sapiens; identical to SEQ ID NO: 98195
  Payload ID: 19599
  Gene Name: Yip1 interacting factor homolog B (S. cerevisiae)
  Uniprot ID: Q5BJH7
  ENSP ID: ENSP00000466428

SEQ ID NO: 98200 - protein, 248 aa, Homo sapiens
  Payload ID: 19599
  Gene Name: Yip1 interacting factor homolog B (S. cerevisiae)
  ENSP ID: ENSP00000467489
MADPHQLFDDTSSAQSRGYGAQRAPGGLSYPAASPTPHAAFLADPVSNMAMAYGSSLAAQGKELVDKNDWEVQYQQDTPVAPRFDVNAPDLYIPAMAFITYVLVAGLALGTQDRFSPDLLGLQASSALAWLTLEVLAILLSLYLVTVNTDLTTIDLVAFLGYKYVGMIGGVLMGLLFGKIGYYLVLGWCCVAIFVFMIRTLRLKILADAAAEGVPVRGARNQLRMYLTMAVAAAQPMLMYWLTFHLVR

SEQ ID NO: 98201 - protein, 192 aa, Homo sapiens
  Payload ID: 19599
  Gene Name: Yip1 interacting factor homolog B (S. cerevisiae)
  ENSP ID: ENSP00000468358
  MOD_RES (1)..(1): Any amino acid
XSKRRIPVSQPGMADPHQLFDDTSSAQSRGYGAQRAPGGLSYPAASPTPHAAFLADPVSNMAMAYGSSLAAQGKELVDKNIDRFIPITKLKYYFAVDTMYVGRKLGLLFFPYLHQDWEVQYQQDTPVAPRFDVNAPDLYIPAMAFITYVLVAGLALGTQDRMIGGVLMGLLFGKIGYYLVLGWCCVAIFVFM

SEQ ID NO: 98202 - protein, 231 aa, Homo sapiens
  Payload ID: 19599
  Gene Name: Yip1 interacting factor homolog B (S. cerevisiae)
  ENSP ID: ENSP00000468463
MPASKRRIPVSQPGMADPHQLFDDTSSAQSRGYGAQRAPGGLSYPAASPTPHAAFLADPVSNMAMAYGSSLAAQGKELVDKNIDRFIPITKLKYYFAVDTMYVGRKLGLLFFPYLHQDWEVQYQQDTPVAPRFDVNAPDLYIPAMAFITYVLVAGLALGTQDRFSPDLLGLQASSALAWLTLEVLAILLSLYLVTVNTDLTTIDLVAFLGYKYVGMIGGVLMGLLFGKIGY

SEQ ID NO: 98203 - protein, 119 aa, Homo sapiens
  Payload ID: 19600
  Gene Name: yippee-like 1
  Uniprot ID: O60688
  ENSP ID: ENSP00000342832
MVKMTKSKTFQAYLPNCHRTYSCIHCRAHLANHDELISKSFQGSQGRAYLFNSVVNVGCGPAEERVLLTGLHAVADIYCENCKTTLGWKYEHAFESSQKYKEGKFIIELAHMIKDNGWE

SEQ ID NO: 98204 - protein, 44 aa, Homo sapiens
  Payload ID: 19600
  Gene Name: yippee-like 1
  ENSP ID: ENSP00000386014
MVKMTKSKTFQAYLPNCHRTYSCIHCRAHLANHDELISKSLAEC

SEQ ID NO: 98205 - protein, 119 aa, Homo sapiens
  Payload ID: 19601
  Gene Name: yippee-like 2
  Uniprot ID: Q96QA6
  ENSP ID: ENSP00000312272
MVKMTRSKTFQAYLPSCHRTYSCIHCRAHLANHDELISKSFQGSQGRAYLFNSVVNVGCGPAEERVLLTGLHAVADIYCENCKTTLGWKYEHAFESSQKYKEGKYIIELAHMIKDNGWD

SEQ ID NO: 98206 - protein, 119 aa, Homo sapiens; identical to SEQ ID NO: 98205
  Payload ID: 19601
  Gene Name: yippee-like 2
  Uniprot ID: Q96QA6
  ENSP ID: ENSP00000464285

SEQ ID NO: 98207 - protein, 119 aa, Homo sapiens
  Payload ID: 19602
  Gene Name: yippee-like 3
  Uniprot ID: P61236
  ENSP ID: ENSP00000381818
MVRISKPKTFQAYLDDCHRRYSCAHCRAHLANHDDLISKSFQGSQGRAYLFNSVVNVGCGPAEERVLLTGLHAVADIHCENCKTTLGWKYEQAFESSQKYKEGKYIIELNHMIKDNGWD

SEQ ID NO: 98208 - protein, 157 aa, Homo sapiens
  Payload ID: 19602
  Gene Name: yippee-like 3
  Uniprot ID: P61236
  ENSP ID: ENSP00000381821
MCVAQVLTAHLLPPRQALGSLCSPWAAPRVGPLPPAPAMVRISKPKTFQAYLDDCHRRYSCAHCRAHLANHDDLISKSFQGSQGRAYLFNSVVNVGCGPAEERVLLTGLHAVADIHCENCKTTLGWKYEQAFESSQKYKEGKYIIELNHMIKDNGWD

SEQ ID NO: 98209 - protein, 103 aa, Homo sapiens
  Payload ID: 19602
  Gene Name: yippee-like 3
  ENSP ID: ENSP00000454350
MVRISKPKTFQAYLDDCHRRYSCAHCRAHLANHDDLISKSFQGSQGRAYLFNSVVNVGCGPAEERVLLTGLHAVADIHCENCKTTLGWKYEQAFESSQKYKEG

SEQ ID NO: 98210 - protein, 31 aa, Homo sapiens
  Payload ID: 19602
  Gene Name: yippee-like 3
  ENSP ID: ENSP00000454949
  MOD_RES (1)..(1): Any amino acid
XPAEERVLLTGLHAVADIHCENCKTTLGWKY

SEQ ID NO: 98211 - protein, 54 aa, Homo sapiens
  Payload ID: 19602
  Gene Name: yippee-like 3
  ENSP ID: ENSP00000456212
MVRISKPKTFQAYLDDCHRRYSCAHCRAHLANHDDLISKSFQGSQGRAYLFNSV

SEQ ID NO: 98212 - protein, 119 aa, Homo sapiens; identical to SEQ ID NO: 98207
  Payload ID: 19602
  Gene Name: yippee-like 3
  Uniprot ID: P61236
  ENSP ID: ENSP00000456427

SEQ ID NO: 98213 - protein, 137 aa, Homo sapiens
  Payload ID: 19602
  Gene Name: yippee-like 3
  ENSP ID: ENSP00000456825
MCVAQVLTAHLLPPRQALGSLCSPWAAPRVGPLPPAPAMVRISKPKTFQAYLDDCHRRYSCAHCRAHLANHDDLISKSFQGSQGRAYLFNSVVNVGCGPAEERVLLTGLHAVADIHCENCKTTLGWKYVSHPPLTPG

SEQ ID NO: 98214 - protein, 75 aa, Homo sapiens
  Payload ID: 19602
  Gene Name: yippee-like 3
  ENSP ID: ENSP00000457598
MVRISKPKTFQAYLDDCHRRYSCAHCRAHLANHDDLISKSFQGSQGRAYLFNSVNRPLRAARSTKRGSTSLNSTT

SEQ ID NO: 98215 - protein, 119 aa, Homo sapiens; identical to SEQ ID NO: 98207
  Payload ID: 19602
  Gene Name: yippee-like 3
  Uniprot ID: P61236
  ENSP ID: ENSP00000457976

SEQ ID NO: 98216 - protein, 127 aa, Homo sapiens
  Payload ID: 19603
  Gene Name: yippee-like 4
  Uniprot ID: Q96NS1
  ENSP ID: ENSP00000300022
MPSCDPGPGPACLPTKTFRSYLPRCHRTYSCVHCRAHLAKHDELISKSFQGSHGRAYLFNSVVNVGCGPAEQRLLLTGLHSVADIFCESCKTTLGWKYEQAFETSQKYKEGKYIIEMSHMVKDNGWD

SEQ ID NO: 98217 - protein, 127 aa, Homo sapiens; identical to SEQ ID NO: 98216
  Payload ID: 19603
  Gene Name: yippee-like 4
  Uniprot ID: Q96NS1
  ENSP ID: ENSP00000432165

SEQ ID NO: 98218 - protein, 127 aa, Homo sapiens; identical to SEQ ID NO: 98216
  Payload ID: 19603
  Gene Name: yippee-like 4
  Uniprot ID: Q96NS1
  ENSP ID: ENSP00000432648

SEQ ID NO: 98219 - protein, 80 aa, Homo sapiens
  Payload ID: 19603
  Gene Name: yippee-like 4
  ENSP ID: ENSP00000432826
MPSCDPGPGPACLPTKTFRSYLPRCHRTYSCVHCRAHLAKHDELISKSFQGSHGRAYLFNSVVNVGCGPAEQRLLLTGLH

SEQ ID NO: 98220 - protein, 55 aa, Homo sapiens
  Payload ID: 19603
  Gene Name: yippee-like 4
  ENSP ID: ENSP00000434238
MPSCDPGPGPACLPTKTFRSYLPRCHRTYSCVHCRAHLAKHDELISKGQRGLRAS

SEQ ID NO: 98221 - protein, 121 aa, Homo sapiens
  Payload ID: 19604
  Gene Name: yippee-like 5
  Uniprot ID: P62699
  ENSP ID: ENSP00000261353
MGRIFLDHIGGTRLFSCANCDTILTNRSELISTRFTGATGRAFLFNKVVNLQYSEVQDRVMLTGRHMVRDVSCKNCNSKLGWIYEFATEDSQRYKEGRVILERALVRESEGFEEHVPSDNS

SEQ ID NO: 98222 - protein, 121 aa, Homo sapiens; identical to SEQ ID NO: 98221
  Payload ID: 19604
  Gene Name: yippee-like 5
  Uniprot ID: P62699
  ENSP ID: ENSP00000368834

SEQ ID NO: 98223 - protein, 121 aa, Homo sapiens; identical to SEQ ID NO: 98221
  Payload ID: 19604
  Gene Name: yippee-like 5
  Uniprot ID: P62699
  ENSP ID: ENSP00000368835

SEQ ID NO: 98224 - protein, 121 aa, Homo sapiens; identical to SEQ ID NO: 98221
  Payload ID: 19604
  Gene Name: yippee-like 5
  Uniprot ID: P62699
  ENSP ID: ENSP00000383974

SEQ ID NO: 98225 - protein, 121 aa, Homo sapiens; identical to SEQ ID NO: 98221
  Payload ID: 19604
  Gene Name: yippee-like 5
  Uniprot ID: P62699
  ENSP ID: ENSP00000385278

SEQ ID NO: 98226 - protein, 249 aa, Homo sapiens
  Payload ID: 19605
  Gene Name: YjeF N-terminal domain containing 3
  Uniprot ID: A6XGL0
  ENSP ID: ENSP00000398520
MSSAAGPDPSEAPEERHFLSTAEAAALERELLEDYRFGRQQLVELCGHASAVAVTKAFPLPALSRKQRTVLVVCGPEQNGAVGLVCARHLRVFEYEPTIFYPTRSLDLLHRDLTTQCEKMDIPFLSYLPTEVQLINEAYGLVVDAVLGPGVEPGEVGGPCTRALATLKLLSIPLVSLDIPSGWDAETGSDSEDGLRPDVLVSLAAPKRCAGRFSGRHHFVAGRFVPDDVRRKFALRLPGYTGTDCVAAL

SEQ ID NO: 98227 - protein, 299 aa, Homo sapiens
  Payload ID: 19605
  Gene Name: YjeF N-terminal domain containing 3
  Uniprot ID: A6XGL0
  ENSP ID: ENSP00000426964
MSSAAGPDPSEAPEERHFLRALELQPPLADMGRAELSSNATTSLVQRRKQAWGRQSWLEQIWNAGPVCQSTAEAAALERELLEDYRFGRQQLVELCGHASAVAVTKAFPLPALSRKQRTVLVVCGPEQNGAVGLVCARHLRVFEYEPTIFYPTRSLDLLHRDLTTQCEKMDIPFLSYLPTEVQLINEAYGLVVDAVLGPGVEPGEVGGPCTRALATLKLLSIPLVSLDIPSGWDAETGSDSEDGLRPDVLVSLAAPKRCAGRFSGRHHFVAGRFVPDDVRRKFALRLPGYTGTDCVAAL

SEQ ID NO: 98228 - protein, 98 aa, Homo sapiens
  Payload ID: 19605
  Gene Name: YjeF N-terminal domain containing 3
  ENSP ID: ENSP00000478505
MSSAAGPDPSEAPEERHFLSTAEAAALERELLEDYRFGRQQLVELCGHASAVAVTKVGKLKLRGGEGPALGQRGMEAELQPRCVWLWSKPPHLEGPGG

SEQ ID NO: 98229 - protein, 198 aa, Homo sapiens
  Payload ID: 19606
  Gene Name: YKT6 v-SNARE homolog (S. cerevisiae)
  Uniprot ID: O15498
  ENSP ID: ENSP00000223369
MKLYSLSVLYKGEAKVVLLKAAYDVSSFSFFQRSSVQEFMTFTSQLIVERSSKGTRASVKEQDYLCHVYVRNDSLAGVVIADNEYPSRVAFTLLEKVLDEFSKQVDRIDWPVGSPATIHYPALDGHLSRYQNPREADPMTKVQAELDETKIILHNTMESLLERGEKLDDLVSKSEVLGTQSKAFYKTARKQNSCCAIM

SEQ ID NO: 98230 - protein, 29 aa, Homo sapiens
  Payload ID: 19606
  Gene Name: YKT6 v-SNARE homolog (S. cerevisiae)
  ENSP ID: ENSP00000412414
PREADPMTKVQAELDETKIILVLFHPLGQ

SEQ ID NO: 98231 - protein, 164 aa, Homo sapiens
  Payload ID: 19606
  Gene Name: YKT6 v-SNARE homolog (S. cerevisiae)
  Uniprot ID: O15498
  ENSP ID: ENSP00000420805
MKLYSLSVLYKGEAKVVLLKAAYDVSSFSFFQRSSVQEFMTFTSQLIVERSSKGTRASVKEQDYLCHVYVRNDSLAGVVIADNEYPSRVAFTLLEKVLDEFSKQVDRIDWPVGSPATIHYPALDGHLSRYQNPREADPMTKVQAELDETKIILARKQNSCCAIM

SEQ ID NO: 98232 - protein, 2146 aa, Homo sapiens
  Payload ID: 19607
  Gene Name: YLP motif containing 1
  Uniprot ID: P49750
  ENSP ID: ENSP00000324463
MYPNWGRYGGSSHYPPPPVPPPPPVALPEASPGPGYSSSTTPAAPSSSGFMSFREQHLAQLQQLQQMHQKQMQCVLQPHHLPPPPLPPPPVMPGGGYGDWQPPPPPMPPPPGPALSYQKQQQYKHQMLHHQRDGPPGLVPMELESPPESPPVPPGSYMPPSQSYMPPPQPPPSYYPPTSSQPYLPPAQPSPSQSPPSQSYLAPTPSYSSSSSSSQSYLSHSQSYLPSSQASPSRPSQGHSKSQLLAPPPPSAPPGNKTTVQQEPLESGAKNKSTEQQQAAPEPDPSTMTPQEQQQYWYRQHLLSLQQRTKVHLPGHKKGPVVAKDTPEPVKEEVTVPATSQVPESPSSEEPPLPPPNEEVPPPLPPEEPQSEDPEEDARLKQLQAAAAHWQQHQQHRVGFQYQGIMQKHTQLQQILQQYQQIIQPPPHIQTMSVDMQLRHYEMQQQQFQHLYQEWEREFQLWEEQLHSYPHKDQLQEYEKQWKTWQGHMKATQSYLQEKVNSFQNMKNQYMGNMSMPPPFVPYSQMPPPLPTMPPPVLPPSLPPPVMPPALPATVPPPGMPPPVMPPSLPTSVPPPGMPPSLSSAGPPPVLPPPSLSSAGPPPVLPPPSLSSTAPPPVMPLPPLSSATPPPGIPPPGVPQGIPPQLTAAPVPPASSSQSSQVPEKPRPALLPTPVSFGSAPPTTYHPPLQSAGPSEQVNSKAPLSKSALPYSSFSSDQGLGESSAAPSQPITAVKDMPVRSGGLLPDPPRSSYLESPRGPRFDGPRRFEDLGSRCEGPRPKGPRFEGNRPDGPRPRYEGHPAEGTKSKWGMIPRGPASQFYITPSTSLSPRQSGPQWKGPKPAFGQQHQQQPKSQAEPLSGNKEPLADTSSNQQKNFKMQSAAFSIAADVKDVKAAQSNENLSDSQQEPPKSEVSEGPVEPSNWDQNVQSMETQIDKAQAVTQPVPLANKPVPAQSTFPSKTGGMEGGTAVATSSLTADNDFKPVGIGLPHSENNQDKGLPRPDNRDNRLEGNRGNSSSYRGPGQSRMEDTRDKGLVNRGRGQAISRGPGLVKQEDFRDKMMGRREDSREKMNRGEGSRDRGLVRPGSSREKVPGGLQGSQDRGAAGSRERGPPRRAGSQERGPLRRAGSRERIPPRRAGSRERGPPRGPGSRERGLGRSDFGRDRGPFRPEPGDGGEKMYPYHRDEPPRAPWNHGEERGHEEFPLDGRNAPMERERLDDWDRERYWRECERDYQDDTLELYNREDRFSAPPSRSHDGDRRGPWWDDWERDQDMDEDYNREMERDMDRDVDRISRPMDMYDRSLDNEWDRDYGRPLDEQESQFRERDIPSLPPLPPLPPLPPLDRYRDDRWREERNREHGYDRDFRDRGELRIREYPERGDTWREKRDYVPDRMDWERERLSDRWYPSDVDRHSPMAEHMPSSHHSSEMMGSDASLDSDQGLGGVMVLSQRQHEIILKAAQELKMLREQKEQLQKMKDFGSEPQMADHLPPQESRLQNTSSRPGMYPPPGSYRPPPPMGKPPGSIVRPSAPPARSSVPVTRPPVPIPPPPPPPPLPPPPPVIKPQTSAVEQERWDEDSFYGLWDTNDEQGLNSEFKSETAAIPSAPVLPPPPVHSSIPPPGPVPMGMPPMSKPPPVQQTVDYGHGRDISTNKVEQIPYGERITLRPDPLPERSTFETEHAGQRDRYDRERDREPYFDRQSNVIADHRDFKRDRETHRDRDRDRGVIDYDRDRFDRERRPRDDRAQSYRDKKDHSSSRRGGFDRPSYDRKSDRPVYEGPSMFGGERRTYPEERMPLPAPSLSHQPPPAPRVEKKPESKNVDDILKPPGRESRPERIVVIMRGLPGSGKTHVAKLIRDKEVEFGGPAPRVLSLDDYFITEVEKEEKDPDSGKKVKKKVMEYEYEAEMEETYRTSMFKTFKKTLDDGFFPFIILDAINDRVRHFDQFWSAAKTKGFEVYLAEMSADNQTCGKRNIHGRKLKEINKMADHWETAPRHMMRLDIRSLLQDAAIEEVEMEDFDANIEEQKEEKKDAEEEESELGYIPKSKWEMDTSEAKLDKLDGLRTGTKRKRDWEAIASRMEDYLQLPDDYDTRASEPGKKRVRWADLEEKKDADRKRAIGFVVGQTDWEKITDESGHLAEKALNRTKYI

SEQ ID NO: 98233 - protein, 1440 aa, Homo sapiens
  Payload ID: 19607
  Gene Name: YLP motif containing 1
  ENSP ID: ENSP00000447921
MYPNWGRYGGSSHYPPPPVPPPPPVALPEASPGPGYSSSTTPAAPSSSGFMSFREQHLAQLQQLQQMHQKQMQCVLQPHHLPPPPLPPPPVMPGGGYGDWQPPPPPMPPPPGPALSYQKQQQYKHQMLHHQRDGPPGLVPMELESPPESPPVPPGSYMPPSQSYMPPPQPPPSYYPPTSSQPYLPPAQPSPSQSPPSQSYLAPTPSYSSSSSSSQSYLSHSQSYLPSSQASPSRPSQGHSKSQLLAPPPPSAPPGNKTTVQQEPLESGAKNKSTEQQQAAPEPDPSTMTPQEQQQYWYRQHLLSLQQRTKVHLPGHKKGPVVAKDTPEPVKEEVTVPATSQVPESPSSEEPPLPPPNEEVPPPLPPEEPQSEDPEEDARLKQLQAAAAHWQQHQQHRVGFQYQGIMQKHTQLQQILQQYQQIIQPPPHIQTMSVDMQLRHYEMQQQQFQHLYQEWEREFQLWEEQLHSYPHKDQLQEYEKQWKTWQGHMKATQSYLQEKVNSFQNMKNQYMGNMSMPPPFVPYSQMPPPLPTMPPPVLPPSLPPPVMPPALPATVPPPGMPPPVMPPSLPTSVPPPGMPPSLSSAGPPPVLPPPSLSSAGPPPVLPPPSLSSTAPPPVMPLPPLSSATPPPGIPPPGVPQGIPPQLTAAPVPPASSSQSSQVPEKPRPALLPTPVSFGSAPPTTYHPPLQSAGPSEQVNSKAPLSKSALPYSSFSSDQGLGESSAAPSQPITAVKDMPVRSGGLLPDPPRSSYLESPRGPREQKEQLQKMKDFGSEPQMADHLPPQESRLQNTSSRPGMYPPPGSYRPPPPMGKPPGSIVRPSAPPARSSVPVTRPPVPIPPPPPPPPLPPPPPVIKPQTSAVEQERWDEDSFYGLWDTNDEQGLNSEFKSETAAIPSAPVLPPPPVHSSIPPPGPVPMGMPPMSKPPPVQQTVDYGHGRDISTNKVEQIPYGERITLRPDPLPERSTFETEHAGQRDRYDRERDREPYFDRQSNVIADHRDFKRDRETHRDRDRDRGVIDYDRDRFDRERRPRDDRAQSYRDKKDHSSSRRGGFDRPSYDRKSDRPVYEGPSMFGGERRTYPEERMPLPAPSLSHQPPPAPRVEKKPESKNVDDILKPPGRESRPERIVVIMRGLPGSGKTHVAKLIRDKEVEFGGPAPRVLSLDDYFITEVEKEEKDPDSGKKVKKKVMEYEYEAEMEETYRTSMFKTFKKTLDDGFFPFIILDAINDRVRHFDQFWSAAKTKGFEVYLAEMSADNQTCGKRNIHGRKLKEINKMADHWETAPRHMMRLDIRSLLQDAAIEEVEMEDFDANIEEQKEEKKDAEEEESELGYIPKSKWEMDTSEAKLDKLDGLRTGTKRKRDWEAIASRMEDYLQLPDDYDTRASEPGKKRVRWADLEEKKDADRKRAIGFVVGQTDWEKITDESGHLAEKALNRTKYI

SEQ ID NO: 98234 - protein, 466 aa, Homo sapiens
  Payload ID: 19607
  Gene Name: YLP motif containing 1
  ENSP ID: ENSP00000448367
NSEFKSETAAIPSAPVLPPPPVHSSIPPPGPVPMGMPPMSKPPPVQQTVDYGHGRDISTNKVEQIPYGERITLRPDPLPERSTFETEHAGQRDRYDRERDREPYFDRQSNVIADHRDFKRDRETHRDRDRDRGVIDYDRDRFDRERRPRDDRAQSYRDKKDHSSSRRGGFDRPSYDRKSDRPVYEGPSMFGGERRTYPEERMPLPAPSLSHQPPPAPRVEKKPESKNVDDILKPPGRESRPERIVVIMRGLPGSGKTHVAKLIRDKEVEFGGPAPRVLSLDDYFITEVEKEEKDPDSGKKVKKKVMEYEYEAEMEETYRTSMFKTFKKTLDDGFFPFIILDAINDRVRHFDQFWSAAKTKGFEVYLAEMSADNQTCGKRNIHGRKLKEINKMADHWETAPRHMMRLDIRSLLQDAAIEEVEMEDFDANIEEQKEEKKDAEEEESELVGDRPTTLNSVSLLKFLKKV

SEQ ID NO: 98235 - protein, 1595 aa, Homo sapiens
  Payload ID: 19607
  Gene Name: YLP motif containing 1
  ENSP ID: ENSP00000449860
FQHLYQEWEREFQLWEEQLHSYPHKDQLQEYEKQWKTWQGHMKATQSYLQEKVNSFQNMKNQYMGNMSMPPPFVPYSQMPPPLPTMPPPVLPPSLPPPVMPPALPATVPPPGMPPPVMPPSLPTSVPPPGMPPSLSSAGPPPVLPPPSLSSAGPPPVLPPPSLSSTAPPPVMPLPPLSSATPPPGIPPPGVPQGIPPQLTAAPVPPASSSQSSQVPEKPRPALLPTPVSFGSAPPTTYHPPLQSAGPSEQVNSKAPLSKSALPYSSFSSDQGLGESSAAPSQPITAVKDMPVRSGGLLPDPPRSSYLESPRGPRFDGPRRFEDLGSRCEGPRPKGPRFEGNRPDGPRPRYEGHPAEGTKSKWGMIPRGPASQFYITPSTSLSPRQSGPQWKGPKPAFGQQHQQQPKSQAEPLSGNKEPLADTSSNQQKNFKMQSAAFSIAADVKDVKAAQSNENLSDSQQEPPKSEVSEGPVEPSNWDQNVQSMETQIDKAQAVTQPVPLANKPVPAQSTFPSKTGGMEGGTAVATSSLTADNDFKPVGIGLPHSENNQDKGLPRPDNRDNRLEGNRGNSSSYRGPGQSRMEDTRDKGLVNRGRGQAISRGPGLVKQEDFRDKMMGRREDSREKMNRGEGSRDRGLVRPGSSREKVPGGLQGSQDRGAAGSRERGPPRRAGSQERGPLRRAGSRERIPPRRAGSRERGPPRGPGSRERGLGRSDFGRDRGPFRPEPGDGGEKMYPYHRDEPPRAPWNHGEERGHEEFPLDGRNAPMERERLDDWDRERYWRECERDYQDDTLELYNREDRFSAPPSRSHDGDRRGPWWDDWERDQDMDEDYNREMERDMDRDVDRISRPMDMYDRSLDNEWDRDYGRPLDEQESQFRERDIPSLPPLPPLPPLPPLDRYRDDRWREERNREHGYDRDFRDRGELRIREYPERGDTWREKRDYVPDRMDWERERLSDRWYPSDVDRHSPMAEHMPSSHHSSEMMGSDASLDSDQGLGGVMVLSQRQHEIILKAAQELKMLREQKEQLQKMKDFGSEPQMADHLPPQESRLQNTSSRPGMYPPPGSYRPPPPMGKPPGSIVRPSAPPARSSVPVTRPPVPIPPPPPPPPLPPPPPVIKPQTSAVEQERWDEDSFYGLWDTNDEQGLNSEFKSETAAIPSAPVLPPPPVHSSIPPPGPVPMGMPPMSKPPPVQQTVDYGHGRDISTNKVEQIPYGERITLRPDPLPERSTFETEHAGQRDRYDRERDREPYFDRQSNVIADHRDFKRDRETHRDRDRDRGVIDYDRDRFDRERRPRDDRAQSYRDKKDHSSSRRGGFDRPSYDRKSDRPVYEGPSMFGGERRTYPEERMPLPAPSLSHQPPPAPRVEKKPESKNVDDILKPPGRESRPERIVVIMRGLPGSGKTHVAKLIRDKEVEFGGPAPRVLSLDDYFITEVEKEEKDPDSGKKVKKKVMEYEYEAEMEETYRTSMFKTFKKTLDDGFFPFIILDAINDRVRHFDQFWSAAKTKGFEVYLAEMSADNQTCGKRNIHGRKLKEINKMADHWETAPRHMMRLDIRSLLQDAAIEEVEMEDFDANIEEQKEEKKDAEEEESELTSWMA

SEQ ID NO: 98236 - protein, 110 aa, Homo sapiens
  Payload ID: 19607
  Gene Name: YLP motif containing 1
  ENSP ID: ENSP00000476212
  MOD_RES (1)..(1): Any amino acid
XRNIHGRKLKEINKMADHWETAPRHMMRLDIRSLLQDAAIEEVEMEDFDANIEEQKEEKKDAEEEESELEGSESLPAETALKNSCNVKLAISKKQSGTCISKETHKKEKT

SEQ ID NO: 98237 - protein, 773 aa, Homo sapiens
  Payload ID: 19608
  Gene Name: YME1-like 1 ATPase
  Uniprot ID: Q96TA2
  ENSP ID: ENSP00000318480
MFSLSSTVQPQVTVPLSHLINAFHTPKNTSVSLSGVSVSQNQHRDVVPEHEAPSSECMFSDFLTKLNIVSIGKGKIFEGYRSMFMEPAKRMKKSLDTTDNWHIRPEPFSLSIPPSLNLRDLGLSELKIGQIDQLVENLLPGFCKGKNISSHWHTSHVSAQSFFENKYGNLDIFSTLRSSCLYRHHSRALQSICSDLQYWPVFIQSRGFKTLKSRTRRLQSTSERLAETQNIAPSFVKGFLLRDRGSDVESLDKLMKTKNIPEAHQDAFKTGFAEGFLKAQALTQKTNDSLRRTRLILFVLLLFGIYGLLKNPFLSVRFRTTTGLDSAVDPVQMKNVTFEHVKGVEEAKQELQEVVEFLKNPQKFTILGGKLPKGILLVGPPGTGKTLLARAVAGEADVPFYYASGSEFDEMFVGVGASRIRNLFREAKANAPCVIFIDELDSVGGKRIESPMHPYSRQTINQLLAEMDGFKPNEGVIIIGATNFPEALDNALIRPGRFDMQVTVPRPDVKGRTEILKWYLNKIKFDQSVDPEIIARGTVGFSGAELENLVNQAALKAAVDGKEMVTMKELEFSKDKILMGPERRSVEIDNKNKTITAYHESGHAIIAYYTKDAMPINKATIMPRGPTLGHVSLLPENDRWNETRAQLLAQMDVSMGGRVAEELIFGTDHITTGASSDFDNATKIAKRMVTKFGMSEKLGVMTYSDTGKLSPETQSAIEQEIRILLRDSYERAKHILKTHAKEHKNLAEALLTYETLDAKEIQIVLEGKKLEVR

SEQ ID NO: 98238 - protein, 740 aa, Homo sapiens
  Payload ID: 19608
  Gene Name: YME1-like 1 ATPase
  ENSP ID: ENSP00000365139
MFSLSSTVQPQVTVPLSHLINAFHTPKNTSVSLSGVSVSQNQHRDVVPEHEAPSSECMFSDFLTKLNIVSIGKGKIFEGYRSMFMEPAKRMKKSLDTTDNWHIRPEPFSLSIPPSLNLRDLGLSELKIGQIDQLVENLLPGFCKGKNISSHWHTSHVSAQSFFENKYGNLDIFSTLRSSCLYRHHSRALQSICSDLQYWPVFIQSRGFKTLKSRTRRLQSTSERLAETQNIAPSFVKGFLLRDRGSDVESLDKLMKTKNIPEAHQDAFKTGFAEGFLKAQALTQKTNDSLRRTRLILFVLLLFGIYGLLKNPFLSVRFRTTTGLDSAVDPVQMKNVTFEHVKGVEEAKQELQEVVEFLKNPQKFTILGGKLPKGILLVGPPGTGKTLLARAVAGEADVPFYYASGSEFDEMFVGVGASRIRNLFREAKANAPCVIFIDELDSVGGKRIESPMHPYSRQTINQLLAEMDGFKPNEGVIIIGATNFPEALDNALIRPGRFDMQVTVPRPDVKGRTEILKWYLNKIKFDQSVDPEIIARGTVGFSGAELENLVNQAALKAAVDGKEMVTMKELEFSKDKILMGPERRSVEIDNKNKTITAYHESGHAIIAYYTKDAMPINKATIMPRGPTLGHVSLLPENDRWNETRAQLLAQMDVSMGGRVAEELIFGTDHITTGASSDFDNATKIAKRMVTKFGMSEKLGVMTYSDTGKLSPETQSAIEQEIRILLRDSYERAKHILKTHS

SEQ ID NO: 98239 - protein, 716 aa, Homo sapiens
  Payload ID: 19608
  Gene Name: YME1-like 1 ATPase
  Uniprot ID: Q96TA2
  ENSP ID: ENSP00000365184
MFSLSSTVQPQVTVPLSHLINAFHTPKNTSVSLSGVSVSQNQHRDVVPEHEAPSSEPSLNLRDLGLSELKIGQIDQLVENLLPGFCKGKNISSHWHTSHVSAQSFFENKYGNLDIFSTLRSSCLYRHHSRALQSICSDLQYWPVFIQSRGFKTLKSRTRRLQSTSERLAETQNIAPSFVKGFLLRDRGSDVESLDKLMKTKNIPEAHQDAFKTGFAEGFLKAQALTQKTNDSLRRTRLILFVLLLFGIYGLLKNPFLSVRFRTTTGLDSAVDPVQMKNVTFEHVKGVEEAKQELQEVVEFLKNPQKFTILGGKLPKGILLVGPPGTGKTLLARAVAGEADVPFYYASGSEFDEMFVGVGASRIRNLFREAKANAPCVIFIDELDSVGGKRIESPMHPYSRQTINQLLAEMDGFKPNEGVIIIGATNFPEALDNALIRPGRFDMQVTVPRPDVKGRTEILKWYLNKIKFDQSVDPEIIARGTVGFSGAELENLVNQAALKAAVDGKEMVTMKELEFSKDKILMGPERRSVEIDNKNKTITAYHESGHAIIAYYTKDAMPINKATIMPRGPTLGHVSLLPENDRWNETRAQLLAQMDVSMGGRVAEELIFGTDHITTGASSDFDNATKIAKRMVTKFGMSEKLGVMTYSDTGKLSPETQSAIEQEIRILLRDSYERAKHILKTHAKEHKNLAEALLTYETLDAKEIQIVLEGKKLEVR

SEQ ID NO: 98240 - protein, 248 aa, Homo sapiens
  Payload ID: 19608
  Gene Name: YME1-like 1 ATPase
  ENSP ID: ENSP00000379590
MYQVTVPLSHLINAFHTPKNTSVSLSGVSVSQNQHRDVVPEHEAPSSEPSLNLRDLGLSELKIGQIDQLVENLLPGFCKGKNISSHWHTSHVSAQSFFENKYGNLDIFSTLRSSCLYRHHSRALQSICSDLQYWPVFIQSRGFKTLKSRTRRLQSTSERLAETQNIAPSFVKGFLLRDRGSDVESLDKLMKTKNIPEAHQDAFKTGFAEGFLKAQALTQKTNDSLRRTRLILFVLLLFGIYGLLKNPF

SEQ ID NO: 98241 - protein, 253 aa, Homo sapiens
  Payload ID: 19608
  Gene Name: YME1-like 1 ATPase
  ENSP ID: ENSP00000398713
MFSLSSTVQPQVTVPLSHLINAFHTPKNTSVSLSGVSVSQNQHRDVVPEHEAPSSEPSLNLRDLGLSELKIGQIDQLVENLLPGFCKGKNISSHWHTSHVSAQSFFENKYVFIQSRGFKTLKSRTRRLQSTSERLAETQNIAPSFVKGFLLRDRGSDVESLDKLMKTKNIPEAHQDAFKTGFAEGFLKAQALTQKTNDSLRRTRLILFVLLLFGIYGLLKNPFLSVRFRTTTGLDSAVDPVQMKNVTFEHVKG

SEQ ID NO: 98242 - protein, 136 aa, Homo sapiens
  Payload ID: 19608
  Gene Name: YME1-like 1 ATPase
  ENSP ID: ENSP00000473302
MFSLSSTVQPQVTVPLSHLINAFHTPKNTSVSLSGVSVSQNQHRDVVPEHEAPSSECMFSDFLTKLNIVSIGKGKIFEGYRSMFMEPAKRMKKSLDTTDNWHIRPEPFSLSIPVHCGFLQMPIVYDLFCPSFLVTA

SEQ ID NO: 98243 - protein, 243 aa, Homo sapiens
  Payload ID: 19608
  Gene Name: YME1-like 1 ATPase
  ENSP ID: ENSP00000473557
MFSLSSTVQPQVTVPLSHLINAFHTPKNTSVSLSGVSVSQNQHRDVVPEHEAPSSEGFLLRDRGSDVESLDKLMKTKNIPEAHQDAFKTGFAEGFLKAQALTQKTNDSLRRTRLILFVLLLFGIYGLLKNPFLSVRFRTTTGLDSAVDPVQMKNVTFEHVKGVEEAKQELQEVVEFLKNPQKFTILGGKLPKGILLVGPPGTGKTLLARAVAGEADVPFYYASGSEFDEMFVGVGASRIRNLF

SEQ ID NO: 98244 - protein, 683 aa, Homo sapiens
  Payload ID: 19608
  Gene Name: YME1-like 1 ATPase
  Uniprot ID: Q96TA2
  ENSP ID: ENSP00000481724
MFSLSSTVQPQVTVPLSHLINAFHTPKNTSVSLSGVSVSQNQHRDVVPEHEAPSSEPSLNLRDLGLSELKIGQIDQLVENLLPGFCKGKNISSHWHTSHVSAQSFFENKYVFIQSRGFKTLKSRTRRLQSTSERLAETQNIAPSFVKGFLLRDRGSDVESLDKLMKTKNIPEAHQDAFKTGFAEGFLKAQALTQKTNDSLRRTRLILFVLLLFGIYGLLKNPFLSVRFRTTTGLDSAVDPVQMKNVTFEHVKGVEEAKQELQEVVEFLKNPQKFTILGGKLPKGILLVGPPGTGKTLLARAVAGEADVPFYYASGSEFDEMFVGVGASRIRNLFREAKANAPCVIFIDELDSVGGKRIESPMHPYSRQTINQLLAEMDGFKPNEGVIIIGATNFPEALDNALIRPGRFDMQVTVPRPDVKGRTEILKWYLNKIKFDQSVDPEIIARGTVGFSGAELENLVNQAALKAAVDGKEMVTMKELEFSKDKILMGPERRSVEIDNKNKTITAYHESGHAIIAYYTKDAMPINKATIMPRGPTLGHVSLLPENDRWNETRAQLLAQMDVSMGGRVAEELIFGTDHITTGASSDFDNATKIAKRMVTKFGMSEKLGVMTYSDTGKLSPETQSAIEQEIRILLRDSYERAKHILKTHAKEHKNLAEALLTYETLDAKEIQIVLEGKKLEVR

SEQ ID NO: 98245 - protein, 348 aa, Homo sapiens
  Payload ID: 19609
  Gene Name: YOD1 deubiquitinase
  Uniprot ID: Q5VVQ6
  ENSP ID: ENSP00000326813
MFGPAKGRHFGVHPAPGFPGGVSQQAAGTKAGPAGAWPVGSRTDTMWRLRCKAKDGTHVLQGLSSRTRVRELQGQIAAITGIAPGGQRILVGYPPECLDLSNGDTILEDLPIQSGDMLIIEEDQTRPRSSPAFTKRGASSYVRETLPVLTRTVVPADNSCLFTSVYYVVEGGVLNPACAPEMRRLIAQIVASDPDFYSEAILGKTNQEYCDWIKRDDTWGGAIEISILSKFYQCEICVVDTQTVRIDRFGEDAGYTKRVLLIYDGIHYDPLQRNFPDPDTPPLTIFSSNDDIVLVQALELADEARRRRQFTDVNRFTLRCMVCQKGLTGQAEAREHAKETGHTNFGEV

SEQ ID NO: 98246 - protein, 304 aa, Homo sapiens
  Payload ID: 19609
  Gene Name: YOD1 deubiquitinase
  Uniprot ID: Q5VVQ6
  ENSP ID: ENSP00000356051
METLHIIYSEAKSFTVEGLSSRTRVRELQGQIAAITGIAPGGQRILVGYPPECLDLSNGDTILEDLPIQSGDMLIIEEDQTRPRSSPAFTKRGASSYVRETLPVLTRTVVPADNSCLFTSVYYVVEGGVLNPACAPEMRRLIAQIVASDPDFYSEAILGKTNQEYCDWIKRDDTWGGAIEISILSKFYQCEICVVDTQTVRIDRFGEDAGYTKRVLLIYDGIHYDPLQRNFPDPDTPPLTIFSSNDDIVLVQALELADEARRRRQFTDVNRFTLRCMVCQKGLTGQAEAREHAKETGHTNFGEV

SEQ ID NO: 98247 - protein, 279 aa, Homo sapiens
  Payload ID: 19610
  Gene Name: yrdC N(6)-threonylcarbamoyltransferase domain containing
  Uniprot ID: Q86U90
  ENSP ID: ENSP00000362135
MSPARRCRGMRAAVAASVGLSEGPAGSRSGRLFRPPSPAPAAPGARLLRLPGSGAVQAASPERAGWTEALRAAVAELRAGAVVAVPTDTLYGLACAASCSAALRAVYRLKGRSEAKPLAVCLGRVADVYRYCRVRVPEGLLKDLLPGPVTLVMERSEELNKDLNPFTPLVGIRIPDHAFMQDLAQMFEGPLALTSANLSSQASSLNVEEFQDLWPQLSLVIDGGQIGDGQSPECRLGSTVVDLSVPGKFGIIRPGCALESTTAILQQKYGLLPSHASYL

SEQ ID NO: 98248 - protein, 727 aa, Homo sapiens
  Payload ID: 19611
  Gene Name: YTH domain containing 1
  Uniprot ID: Q96MU7
  ENSP ID: ENSP00000339245
MAADSREEKDGELNVLDDILTEVPEQDDELYNPESEQDKNEKKGSKRKSDRMESTDTKRQKPSVHSRQLVSKPLSSSVSNNKRIVSTKGKSATEYKNEEYQRSERNKRLDADRKIRLSSSASREPYKNQPEKTCVRKRDPERRAKSPTPDGSERIGLEVDRRASRSSQSSKEEVNSEEYGSDHETGSSGSSDEQGNNTENEEEGVEEDVEEDEEVEEDAEEDEEVDEDGEEEEEEEEEEEEEEEEEEEEYEQDERDQKEEGNDYDTRSEASDSGSESVSFTDGSVRSGSGTDGSDEKKKERKRARGISPIVFDRSGSSASESYAGSEKKHEKLSSSVRAVRKDQTSKLKYVLQDARFFLIKSNNHENVSLAKAKGVWSTLPVNEKKLNLAFRSARSVILIFSVRESGKFQGFARLSSESHHGGSPIHWVLPAGMSAKMLGGVFKIDWICRRELPFTKSAHLTNPWNEHKPVKIGRDGQEIELECGTQLCLLFPPDESIDLYQVIHKMRHKRRMHSQPRSRGRPSRREPVRDVGRRRPEDYDIHNSRKKPRIDYPPEFHQRPGYLKDPRYQEVDRRFSGVRRDVFLNGSYNDYVREFHNMGPPPPWQGMPPYPGMEQPPHHPYYQHHAPPPQAHPPYSGHHPVPHEARYRDKRVHDYDMRVDDFLRRTQAVVSGRRSRPRERDRERERDRPRDNRRDRERDRGRDRERERERLCDRDRDRGERGRYRR

SEQ ID NO: 98249 - protein, 709 aa, Homo sapiens
  Payload ID: 19611
  Gene Name: YTH domain containing 1
  Uniprot ID: Q96MU7
  ENSP ID: ENSP00000347888
MAADSREEKDGELNVLDDILTEVPEQDDELYNPESEQDKNEKKGSKRKSDRMESTDTKRQKPSVHSRQLVSKPLSSSVSNNKRIVSTKGKSATEYKNEEYQRSERNKRLDADRKIRLSSSASREPYKNQPEKTCVRKRDPERRAKSPTPDGSERIGLEVDRRASRSSQSSKEEVNSEEYGSDHETGSSGSSDEQGNNTENEEEGVEEDVEEDEEVEEDAEEDEEVDEDGEEEEEEEEEEEEEEEEEEEEYEQDERDQKEEGNDYDTRSEASDSGSESVSFTDGSVRSGSGTDGSDEKKKERKRARGISPIVFDRSGSSASESYADQTSKLKYVLQDARFFLIKSNNHENVSLAKAKGVWSTLPVNEKKLNLAFRSARSVILIFSVRESGKFQGFARLSSESHHGGSPIHWVLPAGMSAKMLGGVFKIDWICRRELPFTKSAHLTNPWNEHKPVKIGRDGQEIELECGTQLCLLFPPDESIDLYQVIHKMRHKRRMHSQPRSRGRPSRREPVRDVGRRRPEDYDIHNSRKKPRIDYPPEFHQRPGYLKDPRYQEVDRRFSGVRRDVFLNGSYNDYVREFHNMGPPPPWQGMPPYPGMEQPPHHPYYQHHAPPPQAHPPYSGHHPVPHEARYRDKRVHDYDMRVDDFLRRTQAVVSGRRSRPRERDRERERDRPRDNRRDRERDRGRDRERERERLCDRDRDRGERGRYRR

SEQ ID NO: 98250 - protein, 93 aa, Homo sapiens
  Payload ID: 19611
  Gene Name: YTH domain containing 1
  ENSP ID: ENSP00000461990
  MOD_RES (1)..(1): Any amino acid
XGVRRDVFLNGSYNDYVREFHNMGPPPPWQGMPPYPGMEQPPHHPYYQHHAPPPQAHPPYSGHHPVPHEARYRDKRVVSAQGGKGVRELLRIL

SEQ ID NO: 98251 - protein, 12 aa, Homo sapiens
  Payload ID: 19611
  Gene Name: YTH domain containing 1
  ENSP ID: ENSP00000462186
MESTDTKRQKPS

SEQ ID NO: 98252 - protein, 37 aa, Homo sapiens
  Payload ID: 19611
  Gene Name: YTH domain containing 1
  ENSP ID: ENSP00000462238
MESTDTKRQKPSVHSRQLVSKPLSSSVSNNKRIVSTK

SEQ ID NO: 98253 - protein, 735 aa, Homo sapiens
  Payload ID: 19611
  Gene Name: YTH domain containing 1
  ENSP ID: ENSP00000463982
MAADSREEKDGELNVLDDILTEVPEQDDELYNPESEQDKNEKKGSKRKSDRMESTDTKRQKPSVHSRQLVSKPLSSSVSNNKRIVSTKGKSATEYKNEEYQRSERNKRLDADRKIRLSSSASREPYKNQPEKTCVRKRDPERRAKSPTPDGSERIGLEVDRRASRSSQSSKEEVNSEEYGSDHETGSSGSSDEQGNNTENEEEGVEEDVEEDEEVEEDAEEDEEVDEDGEEEEEEEEEEEEEEEEEEEEYEQDERDQKEEGNDYDTRSEASDSGSESVSFTDGSVRSGSGTDGSDEKKKERKRARGISPIVFDRSGSSASESYAGSEKKHEKLSSSVRAVRKDQTSKLKYVLQDARFFLIKSNNHENVSLAKAKGVWSTLPVNEKKLNLAFRSARSVILIFSVRESGKFQGFARLSSESHHGGSPIHWVLPAGMSAKMLGGVFKIDWICRRELPFTKSAHLTNPWNEHKPVKIGRDGQEIELECGTQLCLLFPPDESIDLYQVIHKMRHKRRMHSQPRSRGRPSRREPVRDVGRRRPEDYDIHNSRKKPRIDYPPEFHQRPGYLKDPRYQEVDSFTNLIPNRRFSGVRRDVFLNGSYNDYVREFHNMGPPPPWQGMPPYPGMEQPPHHPYYQHHAPPPQAHPPYSGHHPVPHEARYRDKRVHDYDMRVDDFLRRTQAVVSGRRSRPRERDRERERDRPRDNRRDRERDRGRDRERERERLCDRDRDRGERGRYRR

SEQ ID NO: 98254 - protein, 727 aa, Homo sapiens; identical to SEQ ID NO: 98248
  Payload ID: 19611
  Gene Name: YTH domain containing 1
  Uniprot ID: Q96MU7
  ENSP ID: ENSP00000479213

SEQ ID NO: 98255 - protein, 709 aa, Homo sapiens; identical to SEQ ID NO: 98249
  Payload ID: 19611
  Gene Name: YTH domain containing 1
  Uniprot ID: Q96MU7
  ENSP ID: ENSP00000484604

SEQ ID NO: 98256 - protein, 12 aa, Homo sapiens
  Payload ID: 19611
  Gene Name: YTH domain containing 1
  ENSP ID: ENSP00000486413
MESTDTKRQKPS

SEQ ID NO: 98257 - protein, 93 aa, Homo sapiens; identical to SEQ ID NO: 98250
  Payload ID: 19611
  Gene Name: YTH domain containing 1
  ENSP ID: ENSP00000486660
  MOD_RES (1)..(1): Any amino acid

SEQ ID NO: 98258 - protein, 735 aa, Homo sapiens; identical to SEQ ID NO: 98253
  Payload ID: 19611
  Gene Name: YTH domain containing 1
  ENSP ID: ENSP00000486746

SEQ ID NO: 98259 - protein, 37 aa, Homo sapiens; identical to SEQ ID NO: 98252
  Payload ID: 19611
  Gene Name: YTH domain containing 1
  ENSP ID: ENSP00000486929

SEQ ID NO: 98260 - protein, 1430 aa, Homo sapiens
  Payload ID: 19612
  Gene Name: YTH domain containing 2
  Uniprot ID: Q9H6S0
  ENSP ID: ENSP00000161863
MSRPSSVSPRQPAPGGGGGGGPSPCGPGGGGRAKGLKDIRIDEEVKIAVNIALERFRYGDQREMEFPSSLTSTERAFIHRLSQSLGLVSKSKGKGANRYLTVKKKDGSETAHAMMTCNLTHNTKHAVRSLIQRFPVTNKERTELLPKTERGNVFAVEAENREMSKTSGRLNNGIPQIPVKRGESEFDSFRQSLPVFEKQEEIVKIIKENKVVLIVGETGSGKTTQIPQFLLDDCFKNGIPCRIFCTQPRRLAAIAVAERVAAERRERIGQTIGYQIRLESRVSPKTLLTFCTNGVLLRTLMAGDSTLSTVTHVIVDEVHERDRFSDFLLTKLRDLLQKHPTLKLILSSAALDVNLFIRYFGSCPVIYIQGRPFEVKEMFLEDILRTTGYTNKEMLKYKKEKQQEEKQQTTLTEWYSAQENSFKPESQRQRTVLNVTDEYDLLDDGGDAVFSQLTEKDVNCLEPWLIKEMDACLSDIWLHKDIDAFAQVFHLILTENVSVDYRHSETSATALMVAAGRGFASQVEQLISMGANVHSKASNGWMALDWAKHFGQTEIVDLLESYSATLEFGNLDESSLVQTNGSDLSAEDRELLKAYHHSFDDEKVDLDLIMHLLYNICHSCDAGAVLIFLPGYDEIVGLRDRILFDDKRFADSTHRYQVFMLHSNMQTSDQKKVLKNPPAGVRKIILSTNIAETSITVNDVVFVIDSGKVKEKSFDALNFVTMLKMVWISKASAIQRKGRAGRCRPGICFRLFSRLRFQNMLEFQTPELLRMPLQELCLHTKLLAPVNCPIADFLMKAPEPPPALIVRNAVQMLKTIDAMDTWEDLTELGYHLADLPVEPHLGKMVLCAVVLKCLDPILTIACTLAYRDPFVLPTQASQKRAAMLCRKRFTAGAFSDHMALLRAFQAWQKARSDGWERAFCEKNFLSQATMEIIIGMRTQLLGQLRASGFVRARGGGDIRDVNTNSENWAVVKAALVAGMYPNLVHVDRENLVLTGPKEKKVRFHPASVLSQPQYKKIPPANGQAAAIKALPTDWLIYDEMTRAHRIANIRCCSAVTPVTILVFCGPARLASNALQEPSSFRVDGIPNDSSDSEMEDKTTANLAALKLDEWLHFTLEPEAASLLLQLRQKWHSLFLRRMRAPSKPWSQVDEATIRAIIAVLSTEEQSAGLQQPSGIGQRPRPMSSEELPLASSWRSNNSRKSSADTEFSDECTTAERVLMKSPSPALHPPQKYKDRGILHPKRGTEDRSDQSSLKSTDSSSYPSPCASPSPPSSGKGSKSPSPRPNMPVRYFIMKSSNLRNLEISQQKGIWSTTPSNERKLNRAFWESSIVYLVFSVQGSGHFQGFSRMSSEIGREKSQDWGSAGLGGVFKVEWIRKESLPFQFAHHLLNPWNDNKKVQISRDGQELEPLVGEQLLQLWERLPLGEKNTTD

SEQ ID NO: 98261 - protein, 137 aa, Homo sapiens
  Payload ID: 19612
  Gene Name: YTH domain containing 2
  ENSP ID: ENSP00000422916
MREMEFPSSLTSTERAFIHRLSQSLGLVSKSKGKGANRYLTVKKKDGSETAHAMMTCNLTHNTKHAVRSLIQRFPVTNKERTELLPKTERGNVFAVEAENREMSKTSGRLNNGIPQIPVKRGESEFDSFRQSLPVFE

SEQ ID NO: 98262 - protein, 739 aa, Homo sapiens
  Payload ID: 19612
  Gene Name: YTH domain containing 2
  ENSP ID: ENSP00000423101
MSRPSSVSPRQPAPGGGGGGGPSPCGPGGGGRAKGLKDIRIDEEVKIAVNIALERFRYGDQREMEFPSSLTSTERAFIHRLSQSLGLVSKSKGKGANRYLTVKKKDGSETAHAMMTCNLTHNTKHAVRSLIQRFPVTNKERTELLPKTERGNVFAVEAENREMSKTSGRLNNGIPQIPVKRGESEFDSFRQSLPVFEKQEEIVKIIKENKVVLIVGETGSGKTTQIPQFLLDDCFKNGIPCRIFCTQPRRLAAIAVAERVAAERRERIGQTIGYQIRLESRVSPKTLLTFCTNGVLLRTLMAGDSTLSTVTHVIVDEVHERDRFSDFLLTKLRDLLQKHPTLKLILSSAALDVNLFIRYFGSCPVIYIQGRPFEVKEMFLEDILRTTGYTNKEMLKYKKEKQQEEKQQTTLTEWYSAQENSFKPESQRQRTVLNVTDEYDLLDDGGDAVFSQLTEKDVNCLEPWLIKEMDACLSDIWLHKDIDAFAQVFHLILTENVSVDYRHSETSATALMVAAGRGFASQVEQLISMGANVHSKASNGWMALDWAKHFGQTEIVDLLESYSATLEFGNLDESSLVQTNGSDLSAEDRELLKAYHHSFDDEKVDLDLIMHLLYNICHSCDAGAVLIFLPGYDEIVGLRDRILFDDKRFADSTHRYQVFMLHSNMQTSDQKKVLKNPPAGVRKIILSTNIAETSITVNDVVFVIDSGKVKEKSFDALNFVTMLKMVWISKASAIQRKGR

SEQ ID NO: 98263 - protein, 98 aa, Homo sapiens
  Payload ID: 19612
  Gene Name: YTH domain containing 2
  ENSP ID: ENSP00000426644
MSRPSSVSPRQPAPGGGGGGGPSPCGPGGGGRAKGLKDIRIDEEVKIAVNIALERFRYGDQREMEFPSSLTSTERAFIHRLSQSLGLVSKSKGFLSSF

SEQ ID NO: 98264 - protein, 52 aa, Homo sapiens
  Payload ID: 19613
  Gene Name: YTH N(6)-methyladenosine RNA binding protein 1
  ENSP ID: ENSP00000359359
MSATSVDTQRTKGQDNKVQNGSLHQKDTVHDNDFEPYLTGQSNQERQSRNKQ

SEQ ID NO: 98265 - protein, 559 aa, Homo sapiens
  Payload ID: 19613
  Gene Name: YTH N(6)-methyladenosine RNA binding protein 1
  Uniprot ID: Q9BYJ9
  ENSP ID: ENSP00000359364
MSATSVDTQRTKGQDNKVQNGSLHQKDTVHDNDFEPYLTGQSNQSNSYPSMSDPYLSSYYPPSIGFPYSLNEAPWSTAGDPPIPYLTTYGQLSNGDHHFMHDAVFGQPGGLGNNIYQHRFNFFPENPAFSAWGTSGSQGQQTQSSAYGSSYTYPPSSLGGTVVDGQPGFHSDTLSKAPGMNSLEQGMVGLKIGDVSSSAVKTVGSVVSSVALTGVLSGNGGTNVNMPVSKPTSWAAIASKPAKPQPKMKTKSGPVMGGGLPPPPIKHNMDIGTWDNKGPVPKAPVPQQAPSPQAAPQPQQVAQPLPAQPPALAQPQYQSPQQPPQTRWVAPRNRNAAFGQSGGAGSDSNSPGNVQPNSAPSVESHPVLEKLKAAHSYNPKEFEWNLKSGRVFIIKSYSEDDIHRSIKYSIWCSTEHGNKRLDSAFRCMSSKGPVYLLFSVNGSGHFCGVAEMKSPVDYGTSAGVWSQDKWKGKFDVQWIFVKDVPNNQLRHIRLENNDNKPVTNSRDTQEVPLEKAKQVLKIISSYKHTTSIFDDFAHYEKRQEEEEVVRKERQSRNKQ

SEQ ID NO: 98266 - protein, 579 aa, Homo sapiens
  Payload ID: 19614
  Gene Name: YTH N(6)-methyladenosine RNA binding protein 2
  Uniprot ID: Q9Y5A9
  ENSP ID: ENSP00000362918
MSASSLLEQRPKGQGNKVQNGSVHQKDGLNDDDFEPYLSPQARPNNAYTAMSDSYLPSYYSPSIGFSYSLGEAAWSTGGDTAMPYLTSYGQLSNGEPHFLPDAMFGQPGALGSTPFLGQHGFNFFPSGIDFSAWGNNSSQGQSTQSSGYSSNYAYAPSSLGGAMIDGQSAFANETLNKAPGMNTIDQGMAALKLGSTEVASNVPKVVGSAVGSGSITSNIVASNSLPPATIAPPKPASWADIASKPAKQQPKLKTKNGIAGSSLPPPPIKHNMDIGTWDNKGPVAKAPSQALVQNIGQPTQGSPQPVGQQANNSPPVAQASVGQQTQPLPPPPPQPAQLSVQQQAAQPTRWVAPRNRGSGFGHNGVDGNGVGQSQAGSGSTPSEPHPVLEKLRSINNYNPKDFDWNLKHGRVFIIKSYSEDDIHRSIKYNIWCSTEHGNKRLDAAYRSMNGKGPVYLLFSVNGSGHFCGVAEMKSAVDYNTCAGVWSQDKWKGRFDVRWIFVKDVPNSQLRHIRLENNENKPVTNSRDTQEVPLEKAKQVLKIIASYKHTTSIFDDFSHYEKRQEEEESVKKERQGRGK

SEQ ID NO: 98267 - protein, 529 aa, Homo sapiens
  Payload ID: 19614
  Gene Name: YTH N(6)-methyladenosine RNA binding protein 2
  Uniprot ID: Q9Y5A9
  ENSP ID: ENSP00000439394
MSDSYLPSYYSPSIGFSYSLGEAAWSTGGDTAMPYLTSYGQLSNGEPHFLPDAMFGQPGALGSTPFLGQHGFNFFPSGIDFSAWGNNSSQGQSTQSSGYSSNYAYAPSSLGGAMIDGQSAFANETLNKAPGMNTIDQGMAALKLGSTEVASNVPKVVGSAVGSGSITSNIVASNSLPPATIAPPKPASWADIASKPAKQQPKLKTKNGIAGSSLPPPPIKHNMDIGTWDNKGPVAKAPSQALVQNIGQPTQGSPQPVGQQANNSPPVAQASVGQQTQPLPPPPPQPAQLSVQQQAAQPTRWVAPRNRGSGFGHNGVDGNGVGQSQAGSGSTPSEPHPVLEKLRSINNYNPKDFDWNLKHGRVFIIKSYSEDDIHRSIKYNIWCSTEHGNKRLDAAYRSMNGKGPVYLLFSVNGSGHFCGVAEMKSAVDYNTCAGVWSQDKWKGRFDVRWIFVKDVPNSQLRHIRLENNENKPVTNSRDTQEVPLEKAKQVLKIIASYKHTTSIFDDFSHYEKRQEEEESVKKERQGRGK

SEQ ID NO: 98268 - protein, 579 aa, Homo sapiens; identical to SEQ ID NO: 98266
  Payload ID: 19614
  Gene Name: YTH N(6)-methyladenosine RNA binding protein 2
  Uniprot ID: Q9Y5A9
  ENSP ID: ENSP00000444660

SEQ ID NO: 98269 - protein, 200 aa, Homo sapiens
  Payload ID: 19614
  Gene Name: YTH N(6)-methyladenosine RNA binding protein 2
  ENSP ID: ENSP00000474446
MSASSLLEQRPKGQGNKVQNGSVHQKDGLNDDDFEPYLSPQARPNNAYTAMSDSYLPSYYSPSIGFSYSLGEAAWSTGGDTAMPYLTSYGQLSNGEPHFLPDAMFGQPGALGSTPFLGQHGFNFFPSGIDFSAWGNNSSQGQSTQSSGYSSNYAYAPSSLGGAMIDGQSAFANETLNKAPGMNTIDQGMAALKLGSTEVA

SEQ ID NO: 98270 - protein, 241 aa, Homo sapiens
  Payload ID: 19614
  Gene Name: YTH N(6)-methyladenosine RNA binding protein 2
  ENSP ID: ENSP00000474784
MSASSLLEQRPKGQGNKVQNGSVHQKDGLNDDDFEPYLSPQNNAYTAMSDSYLPSYYSPSIGFSYSLGEAAWSTGGDTAMPYLTSYGQLSNGEPHFLPDAMFGQPGALGSTPFLGQHGFNFFPSGIDFSAWGNNSSQGQSTQSSGYSSNYAYAPSSLGGAMIDGQSAFANETLNKAPGMNTIDQGMAALKLGSTEVASNVPKVVGSAVGSGSITSNIVASNSLPPATIAPPKPASWADIAS

SEQ ID NO: 98271 - protein, 569 aa, Homo sapiens
  Payload ID: 19614
  Gene Name: YTH N(6)-methyladenosine RNA binding protein 2
  ENSP ID: ENSP00000481408
MSASSLLEQRPKGQGNKVQNGSVHQKDGLNDDDFEPYLSPQARPNNAYTAMSDSYLPSYYSPSIGFSYSLGEAAWSTGGDTAMPYLTSYGQLSNGEPHFLPDAMFGQPGALGSTPFLGQHGFNFFPSGIDFSAWGNNSSQGQSTQSSGYSSNYAYAPSSLGGAMIDGQSAFANETLNKAPGMNTIDQGMAALKLGSTEVASNVPKVVGSAVGSGSITSNIVASNSLPPATIAPPKPASWADIASKPAKQQPKLKTKNGIAGSSLPPPPIKHNMDIGTWDNKGPVAKAPSQALVQNIGQPTQGSPQPVGQQANNSPPVAQASVGQQTQPLPPPPPQPAQLSVQQQAAQPTRWVAPRNRGSGFGHNGVDGNGVGQSQAGSGSTPSEPHPVLEKLRSINNYNPKDFDWNLKHGRVFIIKSYSEDDIHRSIKYNIWCSTEHGNKRLDAAYRSMNGKGPVYLLFSVNGSGHFCGVAEMKSAVDYNTCAGVWSQDKWKGRFDVRWIFVKDVPNSQLRHIRLENNENKPVTNSRDTQEVPLEKAKQVLKIIASYKHTTSIFDDFSHYEKRQGRRKC

SEQ ID NO: 98272 - protein, 585 aa, Homo sapiens
  Payload ID: 19615
  Gene Name: YTH N(6)-methyladenosine RNA binding protein 3
  Uniprot ID: Q7Z739
  ENSP ID: ENSP00000473496
MSATSVDQRPKGQGNKVSVQNGSIHQKDAVNDDDFEPYLSSQTNQSNSYPPMSDPYMPSYYAPSIGFPYSLGEAAWSTAGDQPMPYLTTYGQMSNGEHHYIPDGVFSQPGALGNTPPFLGQHGFNFFPGNADFSTWGTSGSQGQSTQSSAYSSSYGYPPSSLGRAITDGQAGFGNDTLSKVPGISSIEQGMTGLKIGGDLTAAVTKTVGTALSSSGMTSIATNSVPPVSSAAPKPTSWAAIARKPAKPQPKLKPKGNVGIGGSAVPPPPIKHNMNIGTWDEKGSVVKAPPTQPVLPPQTIIQQPQPLIQPPPLVQSQLPQQQPQPPQPQQQQGPQPQAQPHQVQPQQQQLQNRWVAPRNRGAGFNQNNGAGSENFGLGVVPVSASPSSVEVHPVLEKLKAINNYNPKDFDWNLKNGRVFIIKSYSEDDIHRSIKYSIWCSTEHGNKRLDAAYRSLNGKGPLYLLFSVNGSGHFCGVAEMKSVVDYNAYAGVWSQDKWKGKFEVKWIFVKDVPNNQLRHIRLENNDNKPVTNSRDTQEVPLEKAKQVLKIIATFKHTTSIFDDFAHYEKRQEEEEAMRRERNRNKQ

SEQ ID NO: 98273 - protein, 52 aa, Homo sapiens
  Payload ID: 19615
  Gene Name: YTH N(6)-methyladenosine RNA binding protein 3
  ENSP ID: ENSP00000473986
MSATSVDQRPKGQGNKVSVQNGSIHQKDAVNDDDFEPYLSSQTNQERNRNKQ

SEQ ID NO: 98274 - protein, 86 aa, Homo sapiens
  Payload ID: 19615
  Gene Name: YTH N(6)-methyladenosine RNA binding protein 3
  ENSP ID: ENSP00000478356
MFYLDLTLFHRAEETGEESFSVQNGSIHQKDAVNDDDFEPYLSSQTNQSNSYPPMSDPYMPSYYAPSIGFPYSLGEAAWSTAGDQP

SEQ ID NO: 98275 - protein, 102 aa, Homo sapiens
  Payload ID: 19615
  Gene Name: YTH N(6)-methyladenosine RNA binding protein 3
  ENSP ID: ENSP00000478398
MSDPYMPSYYAPSIGFPYSLGEAAWSTAGDQPMPYLTTYGQMSNGEHHYIPDGVFSQPGALGNTPPFLGQHGFNFFPGNADFSTWGTSGSQGQSTQSSAYSS

SEQ ID NO: 98276 - protein, 588 aa, Homo sapiens
  Payload ID: 19615
  Gene Name: YTH N(6)-methyladenosine RNA binding protein 3
  ENSP ID: ENSP00000478490
MFYLDLTLFHRAEETGEESFSVQNGSIHQKDAVNDDDFEPYLSSQTNQSNSYPPMSDPYMPSYYAPSIGFPYSLGEAAWSTAGDQPMPYLTTYGQMSNGEHHYIPDGVFSQPGALGNTPPFLGQHGFNFFPGNADFSTWGTSGSQGQSTQSSAYSSSYGYPPSSLGRAITDGQAGFGNDTLSKVPGISSIEQGMTGLKIGGDLTAAVTKTVGTALSSSGMTSIATNSVPPVSSAAPKPTSWAAIARKPAKPQPKLKPKGNVGIGGSAVPPPPIKHNMNIGTWDEKGSVVKAPPTQPVLPPQTIIQQPQPLIQPPPLVQSQLPQQQPQPPQPQQQQGPQPQAQPHQVQPQQQQLQNRWVAPRNRGAGFNQNNGAGSENFGLGVVPVSASPSSVEVHPVLEKLKAINNYNPKDFDWNLKNGRVFIIKSYSEDDIHRSIKYSIWCSTEHGNKRLDAAYRSLNGKGPLYLLFSVNGSGHFCGVAEMKSVVDYNAYAGVWSQDKWKGKFEVKWIFVKDVPNNQLRHIRLENNDNKPVTNSRDTQEVPLEKAKQVLKIIATFKHTTSIFDDFAHYEKRQEEEEAMRRERNRNKQ

SEQ ID NO: 98277 - protein, 534 aa, Homo sapiens
  Payload ID: 19615
  Gene Name: YTH N(6)-methyladenosine RNA binding protein 3
  ENSP ID: ENSP00000478825
MSDPYMPSYYAPSIGFPYSLGEAAWSTAGDQPMPYLTTYGQMSNGEHHYIPDGVFSQPGALGNTPPFLGQHGFNFFPGNADFSTWGTSGSQGQSTQSSAYSSSYGYPPSSLGRAITDGQAGFGNDTLSKVPGISSIEQGMTGLKIGGDLTAAVTKTVGTALSSSGMTSIATNSVPPVSSAAPKPTSWAAIARKPAKPQPKLKPKGNVGIGGSAVPPPPIKHNMNIGTWDEKGSVVKAPPTQPVLPPQTIIQQPQPLIQPPPLVQSQLPQQQPQPPQPQQQQGPQPQAQPHQVQPQQQQLQNRWVAPRNRGAGFNQNNGAGSENFGLGVVPVSASPSSVEVHPVLEKLKAINNYNPKDFDWNLKNGRVFIIKSYSEDDIHRSIKYSIWCSTEHGNKRLDAAYRSLNGKGPLYLLFSVNGSGHFCGVAEMKSVVDYNAYAGVWSQDKWKGKFEVKWIFVKDVPNNQLRHIRLENNDNKPVTNSRDTQEVPLEKAKQVLKIIATFKHTTSIFDDFAHYEKRQEEEEAMRRERNRNKQ

SEQ ID NO: 98278 - protein, 111 aa, Homo sapiens
  Payload ID: 19615
  Gene Name: YTH N(6)-methyladenosine RNA binding protein 3
  ENSP ID: ENSP00000480086
MSDPYMPSYYAPSIGFPYSLGEAAWSTAGDQPMPYLTTYGQMSNGEHHYIPDGVFSQPGALGNTPPFLGQHGFNFFPGNADFSTWGTSGSQGQSTQSSAYSSSYGYPPSSL

SEQ ID NO: 98279 - protein, 588 aa, Homo sapiens; identical to SEQ ID NO: 98276
  Payload ID: 19615
  Gene Name: YTH N(6)-methyladenosine RNA binding protein 3
  ENSP ID: ENSP00000481476

SEQ ID NO: 98280 - protein, 534 aa, Homo sapiens; identical to SEQ ID NO: 98277
  Payload ID: 19615
  Gene Name: YTH N(6)-methyladenosine RNA binding protein 3
  ENSP ID: ENSP00000481497

SEQ ID NO: 98281 - protein, 41 aa, Homo sapiens
  Payload ID: 19615
  Gene Name: YTH N(6)-methyladenosine RNA binding protein 3
  ENSP ID: ENSP00000483267
MSATSVDQRPKGQGNKGAVKPVSEENSFSTKRFDSSKRCCK

SEQ ID NO: 98282 - protein, 583 aa, Homo sapiens
  Payload ID: 19615
  Gene Name: YTH N(6)-methyladenosine RNA binding protein 3
  ENSP ID: ENSP00000483580
MSATSVDQRPKGQGNKVQNGSIHQKDAVNDDDFEPYLSSQTNQSNSYPPMSDPYMPSYYAPSIGFPYSLGEAAWSTAGDQPMPYLTTYGQMSNGEHHYIPDGVFSQPGALGNTPPFLGQHGFNFFPGNADFSTWGTSGSQGQSTQSSAYSSSYGYPPSSLGRAITDGQAGFGNDTLSKVPGISSIEQGMTGLKIGGDLTAAVTKTVGTALSSSGMTSIATNSVPPVSSAAPKPTSWAAIARKPAKPQPKLKPKGNVGIGGSAVPPPPIKHNMNIGTWDEKGSVVKAPPTQPVLPPQTIIQQPQPLIQPPPLVQSQLPQQQPQPPQPQQQQGPQPQAQPHQVQPQQQQLQNRWVAPRNRGAGFNQNNGAGSENFGLGVVPVSASPSSVEVHPVLEKLKAINNYNPKDFDWNLKNGRVFIIKSYSEDDIHRSIKYSIWCSTEHGNKRLDAAYRSLNGKGPLYLLFSVNGSGHFCGVAEMKSVVDYNAYAGVWSQDKWKGKFEVKWIFVKDVPNNQLRHIRLENNDNKPVTNSRDTQEVPLEKAKQVLKIIATFKHTTSIFDDFAHYEKRQEEEEAMRRERNRNKQ

SEQ ID NO: 98283 - protein, 119 aa, Homo sapiens
  Payload ID: 19615
  Gene Name: YTH N(6)-methyladenosine RNA binding protein 3
  ENSP ID: ENSP00000483659
MFYLDLTLFHRAEETGEESFSVQNGSIHQKDAVNDDDFEPYLSSQTNQSNSYPPMSDPYMPSYYAPSIGFPYSLGEAAWSTAGDQPMPYLTTYGQMSNGEHHYIPDGVFSQPGALGNTP

SEQ ID NO: 98284 - protein, 534 aa, Homo sapiens; identical to SEQ ID NO: 98277
  Payload ID: 19615
  Gene Name: YTH N(6)-methyladenosine RNA binding protein 3
  ENSP ID: ENSP00000485046

SEQ ID NO: 98285 - protein, 204 aa, Homo sapiens
  Payload ID: 19616
  Gene Name: YY1 associated factor 2
  Uniprot ID: Q8IY57
  ENSP ID: ENSP00000328004
MGDKKSPTRPKRQPKPSSDEGYWDCSVCTFRNSAEAFKCMMCDVRKGTSTRSTLFEVIVSASRTKEPLKFPISGRKPRPVSQLVAQQVTQQFVPPTQSKKEKKDKVEKEKSEKETTSKKNSHKKTRPRLKNVDRSSAQHLEVTVGDLTVIITDFKEKTKSPPASSAASADQHSQSGSSSDNTERGMSRSSSPRGEASSLNGESH

SEQ ID NO: 98286 - protein, 138 aa, Homo sapiens
  Payload ID: 19616
  Gene Name: YY1 associated factor 2
  Uniprot ID: Q8IY57
  ENSP ID: ENSP00000370167
MGDKKSPTRKPRPVSQLVAQQVTQQFVPPTQSKKEKKDKVEKEKSEKETTSKKNSHKKTRPRLKNVDRSSAQHLEVTVGDLTVIITDFKEKTKSPPASSAASADQHSQSGSSSDNTERGMSRSSSPRGEASSLNGESH

SEQ ID NO: 98287 - protein, 180 aa, Homo sapiens
  Payload ID: 19616
  Gene Name: YY1 associated factor 2
  Uniprot ID: Q8IY57
  ENSP ID: ENSP00000439256
MGDKKSPTRPKRQPKPSSDEGYWDCSVCTFRNSAEAFKCMMCDVRKGTSTRKPRPVSQLVAQQVTQQFVPPTQSKKEKKDKVEKEKSEKETTSKKNSHKKTRPRLKNVDRSSAQHLEVTVGDLTVIITDFKEKTKSPPASSAASADQHSQSGSSSDNTERGMSRSSSPRGEASSLNGESH

SEQ ID NO: 98288 - protein, 44 aa, Homo sapiens
  Payload ID: 19616
  Gene Name: YY1 associated factor 2
  ENSP ID: ENSP00000447217
MGDKKSPTRSTLFEVIVSASRTKEPLKFPISGSSSGCPSGRFSC

SEQ ID NO: 98289 - protein, 34 aa, Homo sapiens
  Payload ID: 19616
  Gene Name: YY1 associated factor 2
  ENSP ID: ENSP00000447686
MMCDVRKGTSTRKPRPVSQLVAQQVTQQFVPPTQ

SEQ ID NO: 98290 - protein, 67 aa, Homo sapiens
  Payload ID: 19616
  Gene Name: YY1 associated factor 2
  ENSP ID: ENSP00000447863
MGDKKSPTRPKRQPKPSSDEGYWDCSVCTFRNSAEAFKCMMCDVRKGTSTREEKAGSLTSNWSSPIG

SEQ ID NO: 98291 - protein, 56 aa, Homo sapiens
  Payload ID: 19616
  Gene Name: YY1 associated factor 2
  ENSP ID: ENSP00000448291
MGDKKSPTRPKRQPKPSSDEGYWDCSVCTFRNSAEAFKCMMCDVRKGTSTRTSKLL

SEQ ID NO: 98292 - protein, 67 aa, Homo sapiens; identical to SEQ ID NO: 98290
  Payload ID: 19616
  Gene Name: YY1 associated factor 2
  ENSP ID: ENSP00000448312

SEQ ID NO: 98293 - protein, 72 aa, Homo sapiens
  Payload ID: 19616
  Gene Name: YY1 associated factor 2
  ENSP ID: ENSP00000448533
MGDKKSPTRPKRQPKPSSDEGYWDCSVCTFRNSAEAFKCMMCDVRKGTSTRDNRKRAWLPFGGTILLAQASA

SEQ ID NO: 98294 - protein, 120 aa, Homo sapiens
  Payload ID: 19616
  Gene Name: YY1 associated factor 2
  ENSP ID: ENSP00000450097
MGDKKSPTRPKRQPKPSSDEGYWDCSVCTFRNSAEAFKCMMCDVRKGTSTRMKNHEIISFLKEGEKKKLDHLPVTGVLLLGNLHRSTLFEVIVSASRTKEPLKFPISGSSSGCPSGRFSC

SEQ ID NO: 98295 - protein, 96 aa, Homo sapiens
  Payload ID: 19616
  Gene Name: YY1 associated factor 2
  ENSP ID: ENSP00000450394
MGDKKSPTRPKRQPKPSSDEGYWDCSVCTFRNSAEAFKCMMCDVRKGTSTRSTLFEVIVSASRTKEPLKFPISGRDNRKRAWLPFGGTILLAQASA

SEQ ID NO: 98296 - protein, 117 aa, Homo sapiens
  Payload ID: 19616
  Gene Name: YY1 associated factor 2
  Uniprot ID: Q8IY57
  ENSP ID: ENSP00000451626
MGDKKSPTRPKRQPKPSSDEGYWDCSVCTFRNSAEAFKCMMCDVRKGTSTRDSKEGGKLVSYSTASLGVRGTLRNRVGGGSSEEKKQAEYLAPGRRRNIVHRGVGPGQRSGPSLKEA

SEQ ID NO: 98297 - protein, 796 aa, Homo sapiens
  Payload ID: 19617
  Gene Name: YY1 associated protein 1
  Uniprot ID: Q9H869
  ENSP ID: ENSP00000295566
MEEEASRSAAATNPGSRLTRWPPPDKREGSAVDPGKRRSLAATPSSSLPCTLIALGLRHEKEANELMEDLFETFQDEMGFSNMEDDGPEEEERVAEPQANFNTPQALRFEELLANLLNEQHQIAKELFEQLKMKKPSAKQQKEVEKVKPQCKEVHQTLILDPAQRKRLQQQMQQHVQLLTQIHLLATCNPNLNPEASSTRICLKELGTFAQSSIALHHQYNPKFQTLFQPCNLMGAMQLIEDFSTHVSIDCSPHKTVKKTANEFPCLPKQVAWILATSKVFMYPELLPVCSLKAKNPQDKILFTKAEDNKYLLTCKTARQLTVRIKNLNMNRAPDNIIKFYKKTKQLPVLGKCCEEIQPHQWKPPIEREEHRLPFWLKASLPSIQEELRHMADGAREVGNMTGTTEINSDQGLEKDNSELGSETRYPLLLPKGVVLKLKPVADRFPKKAWRQKRSSVLKPLLIQPSPSLQPSFNPGKTPAQSTHSEAPPSKMVLRIPHPIQPATVLQTVPGVPPLGVSGGESFESPAALPAMPPEARTSFPLSESQTLLSSAPVPKVMMPSPASSMFRKPYVRRRPSKRRGARAFRCIKPAPVIHPASVIFTVPATTVKIVSLGGGCNMIQPVNAAVAQSPQTIPIATLLVNPTSFPCPLNQPLVASSVSPLIVSGNSVNLPIPSTPEDKAHMNVDIACAVADGENAFQGLEPKLEPQELSPLSATVFPKVEHSPGPPPVDKQCQEGLSENSAYRWTVVKTEEGRQALEPLPQGIQESLNNSSPGDLEEVVKMEPEDATEEISGFL

SEQ ID NO: 98298 - protein, 719 aa, Homo sapiens
  Payload ID: 19617
  Gene Name: YY1 associated protein 1
  Uniprot ID: Q9H869
  ENSP ID: ENSP00000311138
MGFSNMEDDGPEEEERVAEPQANFNTPQALRFEELLANLLNEQHQIAKELFEQLKMKKPSAKQQKEVEKVKPQCKEVHQTLILDPAQRKRLQQQMQQHVQLLTQIHLLATCNPNLNPEASSTRICLKELGTFAQSSIALHHQYNPKFQTLFQPCNLMGAMQLIEDFSTHVSIDCSPHKTVKKTANEFPCLPKQVAWILATSKVFMYPELLPVCSLKAKNPQDKILFTKAEDNKYLLTCKTARQLTVRIKNLNMNRAPDNIIKFYKKTKQLPVLGKCCEEIQPHQWKPPIEREEHRLPFWLKASLPSIQEELRHMADGAREVGNMTGTTEINSDQGLEKDNSELGSETRYPLLLPKGVVLKLKPVADRFPKKAWRQKRSSVLKPLLIQPSPSLQPSFNPGKTPAQSTHSEAPPSKMVLRIPHPIQPATVLQTVPGVPPLGVSGGESFESPAALPAMPPEARTSFPLSESQTLLSSAPVPKVMMPSPASSMFRKPYVRRRPSKRRGARAFRCIKPAPVIHPASVIFTVPATTVKIVSLGGGCNMIQPVNAAVAQSPQTIPIATLLVNPTSFPCPLNQPLVASSVSPLIVSGNSVNLPIPSTPEDKAHMNVDIACAVADGENAFQGLEPKLEPQELSPLSATVFPKVEHSPGPPPVDKQCQEGLSENSAYRWTVVKTEEGRQALEPLPQGIQESLNNSSPGDLEEVVKMEPEDATEEISGFL

SEQ ID NO: 98299 - protein, 750 aa, Homo sapiens
  Payload ID: 19617
  Gene Name: YY1 associated protein 1
  Uniprot ID: Q9H869
  ENSP ID: ENSP00000316079
MEDLFETFQDEMGFSNMEDDGPEEEERVAEPQANFNTPQALRFEELLANLLNEQHQIAKELFEQLKMKKPSAKQQKEVEKVKPQCKEVHQTLILDPAQRKRLQQQMQQHVQLLTQIHLLATCNPNLNPEASSTRICLKELGTFAQSSIALHHQYNPKFQTLFQPCNLMGAMQLIEDFSTHVSIDCSPHKTVKKTANEFPCLPKQVAWILATSKVFMYPELLPVCSLKAKNPQDKILFTKAEDNLLALGLKHFEGTEFLNPLISKYLLTCKTARQLTVRIKNLNMNRAPDNIIKFYKKTKQLPVLGKCCEEIQPHQWKPPIEREEHRLPFWLKASLPSIQEELRHMADGAREVGNMTGTTEINSDQGLEKDNSELGSETRYPLLLPKGVVLKLKPVADRFPKKAWRQKRSSVLKPLLIQPSPSLQPSFNPGKTPAQSTHSEAPPSKMVLRIPHPIQPATVLQTVPGVPPLGVSGGESFESPAALPAMPPEARTSFPLSESQTLLSSAPVPKVMMPSPASSMFRKPYVRRRPSKRRGARAFRCIKPAPVIHPASVIFTVPATTVKIVSLGGGCNMIQPVNAAVAQSPQTIPIATLLVNPTSFPCPLNQPLVASSVSPLIVSGNSVNLPIPSTPEDKAHMNVDIACAVADGENAFQGLEPKLEPQELSPLSATVFPKVEHSPGPPPVDKQCQEGLSENSAYRWTVVKTEEGRQALEPLPQGIQESLNNSSPGDLEEVVKMEPEDATEEISGFL

SEQ ID NO: 98300 - protein, 196 aa, Homo sapiens
  Payload ID: 19617
  Gene Name: YY1 associated protein 1
  ENSP ID: ENSP00000346722
MEDLFETFQDEMGFSNMEDDGPEEEERVAEPQANFNTPQALRFEELLANLLNEQHQIAKELFEQLKMKKPSAKQQKEVEKVKPQCKEVHQTLILDPAQRKRLQQQMQQHVQLLTQIHLLATCNPNLNPEASSTRICLKELGTFAQSSIALHHQYNPKFQTLFQPCNLMGAMQLIEDFSTHVSIDCSPHKTVKKTVC

SEQ ID NO: 98301 - protein, 750 aa, Homo sapiens; identical to SEQ ID NO: 98299
  Payload ID: 19617
  Gene Name: YY1 associated protein 1
  Uniprot ID: Q9H869
  ENSP ID: ENSP00000347686

SEQ ID NO: 98302 - protein, 739 aa, Homo sapiens
  Payload ID: 19617
  Gene Name: YY1 associated protein 1
  Uniprot ID: Q9H869
  ENSP ID: ENSP00000352134
MGFSNMEDDGPEEEERVAEPQANFNTPQALRFEELLANLLNEQHQIAKELFEQLKMKKPSAKQQKEVEKVKPQCKEVHQTLILDPAQRKRLQQQMQQHVQLLTQIHLLATCNPNLNPEASSTRICLKELGTFAQSSIALHHQYNPKFQTLFQPCNLMGAMQLIEDFSTHVSIDCSPHKTVKKTANEFPCLPKQVAWILATSKVFMYPELLPVCSLKAKNPQDKILFTKAEDNLLALGLKHFEGTEFLNPLISKYLLTCKTARQLTVRIKNLNMNRAPDNIIKFYKKTKQLPVLGKCCEEIQPHQWKPPIEREEHRLPFWLKASLPSIQEELRHMADGAREVGNMTGTTEINSDQGLEKDNSELGSETRYPLLLPKGVVLKLKPVADRFPKKAWRQKRSSVLKPLLIQPSPSLQPSFNPGKTPAQSTHSEAPPSKMVLRIPHPIQPATVLQTVPGVPPLGVSGGESFESPAALPAMPPEARTSFPLSESQTLLSSAPVPKVMMPSPASSMFRKPYVRRRPSKRRGARAFRCIKPAPVIHPASVIFTVPATTVKIVSLGGGCNMIQPVNAAVAQSPQTIPIATLLVNPTSFPCPLNQPLVASSVSPLIVSGNSVNLPIPSTPEDKAHMNVDIACAVADGENAFQGLEPKLEPQELSPLSATVFPKVEHSPGPPPVDKQCQEGLSENSAYRWTVVKTEEGRQALEPLPQGIQESLNNSSPGDLEEVVKMEPEDATEEISGFL

SEQ ID NO: 98303 - protein, 165 aa, Homo sapiens
  Payload ID: 19617
  Gene Name: YY1 associated protein 1
  ENSP ID: ENSP00000354716
MEDLFETFQDEMGFSNMEDDGPEEEERVAEPQANFNTPQALRFEELLANLLNEQHQIAKELFEQLKMKKPSAKQQKEVEKVKPQCKEVHQTLILDPAQRKRLQQQMQQHVQLLTQIHLLATCNPNLNPEASSTRICLSWEPLLKAPSPFTISTTPSFRPCSNPVT

SEQ ID NO: 98304 - protein, 739 aa, Homo sapiens; identical to SEQ ID NO: 98302
  Payload ID: 19617
  Gene Name: YY1 associated protein 1
  Uniprot ID: Q9H869
  ENSP ID: ENSP00000355298

SEQ ID NO: 98305 - protein, 750 aa, Homo sapiens; identical to SEQ ID NO: 98299
  Payload ID: 19617
  Gene Name: YY1 associated protein 1
  Uniprot ID: Q9H869
  ENSP ID: ENSP00000357314

SEQ ID NO: 98306 - protein, 888 aa, Homo sapiens
  Payload ID: 19617
  Gene Name: YY1 associated protein 1
  Uniprot ID: Q9H869
  ENSP ID: ENSP00000357323
MAGVGRSGGPWGRTRGGRSGRLGVSLGALSSLPLEELPRPLCCRRCRRHFGFALRGETIPVSVAGSASSQFAPLALHLSLLLSRISASRLTRWPPPDKREGSAVDPGKRRSLAATPSSSLPCTLIALGLRHEKEANELMEDLFETFQDEMGFSNMEDDGPEEEERVAEPQANFNTPQALRFEELLANLLNEQHQIAKELFEQLKMKKPSAKQQKEVEKVKPQCKEVHQTLILDPAQRKRLQQQMQQHVQLLTQIHLLATCNPNLNPEASSTRICLKELGTFAQSSIALHHQYNPKFQTLFQPCNLMGAMQLIEDFSTHVSIDCSPHKTVKKTANEFPCLPKQVAWILATSKVFMYPELLPVCSLKAKNPQDKILFTKAEDNLLALGLKHFEGTEFLNPLISKYLLTCKTARQLTVRIKNLNMNRAPDNIIKFYKKTKQLPVLGKCCEEIQPHQWKPPIEREEHRLPFWLKASLPSIQEELRHMADGAREVGNMTGTTEINSDQGLEKDNSELGSETRYPLLLPKGVVLKLKPVADRFPKKAWRQKRSSVLKPLLIQPSPSLQPSFNPGKTPAQSTHSEAPPSKMVLRIPHPIQPATVLQTVPGVPPLGVSGGESFESPAALPAMPPEARTSFPLSESQTLLSSAPVPKVMMPSPASSMFRKPYVRRRPSKRRGARAFRCIKPAPVIHPASVIFTVPATTVKIVSLGGGCNMIQPVNAAVAQSPQTIPIATLLVNPTSFPCPLNQPLVASSVSPLIVSGNSVNLPIPSTPEDKAHMNVDIACAVADGENAFQGLEPKLEPQELSPLSATVFPKVEHSPGPPPVDKQCQEGLSENSAYRWTVVKTEEGRQALEPLPQGIQESLNNSSPGDLEEVVKMEPEDATEEISGFL

SEQ ID NO: 98307 - protein, 868 aa, Homo sapiens
  Payload ID: 19617
  Gene Name: YY1 associated protein 1
  Uniprot ID: Q9H869
  ENSP ID: ENSP00000357324
MAGVGRSGGPWGRTRGGRSGRLGVSLGALSSLPLEELPRPLCCRRCRRHFGFALRGETIPVSVAGSASSQFAPLALHLSLLLSRISASRLTRWPPPDKREGSAVDPGKRRSLAATPSSSLPCTLIALGLRHEKEANELMEDLFETFQDEMGFSNMEDDGPEEEERVAEPQANFNTPQALRFEELLANLLNEQHQIAKELFEQLKMKKPSAKQQKEVEKVKPQCKEVHQTLILDPAQRKRLQQQMQQHVQLLTQIHLLATCNPNLNPEASSTRICLKELGTFAQSSIALHHQYNPKFQTLFQPCNLMGAMQLIEDFSTHVSIDCSPHKTVKKTANEFPCLPKQVAWILATSKVFMYPELLPVCSLKAKNPQDKILFTKAEDNKYLLTCKTARQLTVRIKNLNMNRAPDNIIKFYKKTKQLPVLGKCCEEIQPHQWKPPIEREEHRLPFWLKASLPSIQEELRHMADGAREVGNMTGTTEINSDQGLEKDNSELGSETRYPLLLPKGVVLKLKPVADRFPKKAWRQKRSSVLKPLLIQPSPSLQPSFNPGKTPAQSTHSEAPPSKMVLRIPHPIQPATVLQTVPGVPPLGVSGGESFESPAALPAMPPEARTSFPLSESQTLLSSAPVPKVMMPSPASSMFRKPYVRRRPSKRRGARAFRCIKPAPVIHPASVIFTVPATTVKIVSLGGGCNMIQPVNAAVAQSPQTIPIATLLVNPTSFPCPLNQPLVASSVSPLIVSGNSVNLPIPSTPEDKAHMNVDIACAVADGENAFQGLEPKLEPQELSPLSATVFPKVEHSPGPPPVDKQCQEGLSENSAYRWTVVKTEEGRQALEPLPQGIQESLNNSSPGDLEEVVKMEPEDATEEISGFL

SEQ ID NO: 98308 - protein, 495 aa, Homo sapiens
  Payload ID: 19617
  Gene Name: YY1 associated protein 1
  ENSP ID: ENSP00000384583
MAGVGRSGGPWGRTRGGRSGRLGVSLGALSSLPLEELPRPLCCRRCRRHFGFALRGETIPVSVAGSASSQFAPLALHLSLLLSRISASRLTRWPPPDKREGSAVDPGKRRSLAATPSSSLPCTLIALGLRHEKEANELMEDLFETFQDEMGFSNMEDDGPEEEERVAEPQANFNTPQALRFEELLANLLNEQHQIAKELFEQLKMKKPSAKQQKEVEKVKPQCKEVHQTLILDPAQRKRLQQQMQQHVQLLTQIHLLATCNPNLNPEASSTRICLKELGTFAQSSIALHHQYNPKFQTLFQPCNLMGAMQLIEDFSTHVSIDCSPHKTVKKTANEFPCLPKQVAWILATSKVFMYPELLPVCSLKAKNPQDKILFTKAEDNLLALGLKHFEGTEFLNPLISKYLLTCKTARQLTVRIKNLNMNRAPDNIIKFYKKTKQLPVLGKCCEEIQPHQWKPPIEREEHRLPFWLKVQPSSSKSVGGRRSLKVLREYQGLP

SEQ ID NO: 98309 - protein, 730 aa, Homo sapiens
  Payload ID: 19617
  Gene Name: YY1 associated protein 1
  Uniprot ID: Q9H869
  ENSP ID: ENSP00000385390
MEDLFETFQDEMGFSNMEDDGPEEEERVAEPQANFNTPQALRFEELLANLLNEQHQIAKELFEQLKMKKPSAKQQKEVEKVKPQCKEVHQTLILDPAQRKRLQQQMQQHVQLLTQIHLLATCNPNLNPEASSTRICLKELGTFAQSSIALHHQYNPKFQTLFQPCNLMGAMQLIEDFSTHVSIDCSPHKTVKKTANEFPCLPKQVAWILATSKVFMYPELLPVCSLKAKNPQDKILFTKAEDNKYLLTCKTARQLTVRIKNLNMNRAPDNIIKFYKKTKQLPVLGKCCEEIQPHQWKPPIEREEHRLPFWLKASLPSIQEELRHMADGAREVGNMTGTTEINSDQGLEKDNSELGSETRYPLLLPKGVVLKLKPVADRFPKKAWRQKRSSVLKPLLIQPSPSLQPSFNPGKTPAQSTHSEAPPSKMVLRIPHPIQPATVLQTVPGVPPLGVSGGESFESPAALPAMPPEARTSFPLSESQTLLSSAPVPKVMMPSPASSMFRKPYVRRRPSKRRGARAFRCIKPAPVIHPASVIFTVPATTVKIVSLGGGCNMIQPVNAAVAQSPQTIPIATLLVNPTSFPCPLNQPLVASSVSPLIVSGNSVNLPIPSTPEDKAHMNVDIACAVADGENAFQGLEPKLEPQELSPLSATVFPKVEHSPGPPPVDKQCQEGLSENSAYRWTVVKTEEGRQALEPLPQGIQESLNNSSPGDLEEVVKMEPEDATEEISGFL

SEQ ID NO: 98310 - protein, 719 aa, Homo sapiens; identical to SEQ ID NO: 98298
  Payload ID: 19617
  Gene Name: YY1 associated protein 1
  Uniprot ID: Q9H869
  ENSP ID: ENSP00000385791

SEQ ID NO: 98311 - protein, 48 aa, Homo sapiens
  Payload ID: 19617
  Gene Name: YY1 associated protein 1
  ENSP ID: ENSP00000390116
MEDLFETFQDEMGFSNMEDDGPEEEERVAEPQANFNTPQALRQLLLLM

SEQ ID NO: 98312 - protein, 206 aa, Homo sapiens
  Payload ID: 19617
  Gene Name: YY1 associated protein 1
  ENSP ID: ENSP00000409203
MGFSNMEDDGPEEEERVAEPQANFNTPQALRFEELLANLLNEQHQIAKELFEQLKMKKPSAKQQKEVEKVKPQCKEVHQTLILDPAQRKRLQQQMQQHVQLLTQIHLLATCNPNLNPEASSTRICLKELGTFAQSSIALHHQYNPKFQTLFQPCNLMGAMQLIEDFSTHVSIDCSPHKTVKKTANEFPCLPKQVAWILATSKVFMY

SEQ ID NO: 98313 - protein, 194 aa, Homo sapiens
  Payload ID: 19617
  Gene Name: YY1 associated protein 1
  ENSP ID: ENSP00000413240
MEDLFETFQDEMGFSNMEDDGPEEEERVAEPQANFNTPQALRFEELLANLLNEQHQIAKELFEQLKMKKPSAKQQKEVEKVKPQCKEVHQTLILDPAQRKRLQQQMQQHVQLLTQIHLLATCNPNLNPEASSTRICLKELGTFAQSSIALHHQYNPKFQTLFQPCNLMGAMQLIEDFSTHVSIDCSPHKTVKKT

SEQ ID NO: 98314 - protein, 414 aa, Homo sapiens
  Payload ID: 19618
  Gene Name: YY1 transcription factor
  Uniprot ID: P25490
  ENSP ID: ENSP00000262238
MASGDTLYIATDGSEMPAEIVELHEIEVETIPVETIETTVVGEEEEEDDDDEDGGGGDHGGGGGHGHAGHHHHHHHHHHHPPMIALQPLVTDDPTQVHHHQEVILVQTREEVVGGDDSDGLRAEDGFEDQILIPVPAPAGGDDDYIEQTLVTVAAAGKSGGGGSSSSGGGRVKKGGGKKSGKKSYLSGGAGAAGGGGADPGNKKWEQKQVQIKTLEGEFSVTMWSSDEKKDIDHETVVEEQIIGENSPPDYSEYMTGKKLPPGGIPGIDLSDPKQLAEFARMKPRKIKEDDAPRTIACPHKGCTKMFRDNSAMRKHLHTHGPRVHVCAECGKAFVESSKLKRHQLVHTGEKPFQCTFEGCGKRFSLDFNLRTHVRIHTGDRPYVCPFDGCNKKFAQSTNLKSHILTHAKAKNNQ

SEQ ID NO: 98315 - protein, 34 aa, Homo sapiens
  Payload ID: 19618
  Gene Name: YY1 transcription factor
  ENSP ID: ENSP00000451329
MASGDTLYIATDGSEMPAEIVELHEIEVETIPVE

SEQ ID NO: 98316 - protein, 123 aa, Homo sapiens
  Payload ID: 19618
  Gene Name: YY1 transcription factor
  ENSP ID: ENSP00000452140
  MOD_RES (1)..(1): Any amino acid
XRVKKGGGKKSGKKSYLSGGAGAAGGGGADPGNKKWEQKQVQIKTLEGEFSVTMWSSDEKKDIDHETVVEEQIIGENSPPDYSEYMTGKKLPPGGIPGIDLSDPKQLAEFARAAQRCSGITRP

SEQ ID NO: 98317 - protein, 190 aa, Homo sapiens
  Payload ID: 19618
  Gene Name: YY1 transcription factor
  ENSP ID: ENSP00000452225
  MOD_RES (1)..(1): Any amino acid
XKKGGGKKSGKKSYLSGGAGAAGGGGADPGNKKWEQKQVQIKTLEGEFSVTMWSSDEKKDIDHETVVEEQIIGENSPPDYSEYMTGKKLPPGGIPGIDLSDPKQLAEFARMKPRKIKEDDAPRTIACPHKCTFEGCGKRFSLDFNLRTHVRIHTGDRPYVCPFDGCNKKFAQSTNLKSHILTHAKAKNNQ

SEQ ID NO: 98318 - protein, 372 aa, Homo sapiens
  Payload ID: 19619
  Gene Name: YY2 transcription factor
  Uniprot ID: O15391
  ENSP ID: ENSP00000389381
MASNEDFSITQDLEIPADIVELHDINVEPLPMEDIPTESVQYEDVDGNWIYGGHNHPPLMVLQPLFTNTGYGDHDQEMLMLQTQEEVVGYCDSDNQLGNDLEDQLALPDSIEDEHFQMTLASLSASAASTSTSTQSRSKKPSKKPSGKSATSTEANPAGSSSSLGTRKWEQKQMQVKTLEGEFSVTMWSPNDNNDQGAVGEGQAENPPDYSEYLKGKKLPPGGLPGIDLSDPKQLAEFTKVKPKRSKGEPPKTVPCSYSGCEKMFRDYAAMRKHLHIHGPRVHVCAECGKAFLESSKLRRHQLVHTGEKPFQCTFEGCGKRFSLDFNLRTHLRIHTGDKPFVCPFDVCNRKFAQSTNLKTHILTHVKTKNNP

SEQ ID NO: 98319 - protein, 236 aa, Homo sapiens
  Payload ID: 19620
  Gene Name: ZBED6 C-terminal like
  Uniprot ID: Q96FA7
  ENSP ID: ENSP00000343242
MVVREASAAQASLSQVLPQLRYLHIFLEQVHTHFQEQSVGERGAAIQLAEGLARQLCTDCQLNKLFYREEFVLATLLDPCFKGKIEAILPWGPTDIDHWKQVLVYKVKEIRVSEYSLNSPSPLQSPRGLCVDPTRVAKSSGVEGRSQGEPLQSSSHSGAFLLAQREKGLLESMGLLASERSGGSLSTKSHWASIIVKKYLWENETVGAQDDPLAYWEKKREAWPPSICLTPHRSLL

SEQ ID NO: 98320 - protein, 429 aa, Homo sapiens
  Payload ID: 19621
  Gene Name: Z-DNA binding protein 1
  Uniprot ID: Q9H171
  ENSP ID: ENSP00000360215
MAQAPADPGREGHLEQRILQVLTEAGSPVKLAQLVKECQAPKRELNQVLYRMKKELKVSLTSPATWCLGGTDPEGEGPAELALSSPAERPQQHAATIPETPGPQFSQQREEDIYRFLKDNGPQRALVIAQALGMRTAKDVNRDLYRMKSRHLLDMDEQSKAWTIYRPEDSGRRAKSASIIYQHNPINMICQNGPNSWISIANSEAIQIGHGNIITRQTVSREDGSAGPRHLPSMAPGDSSTWGTLVDPWGPQDIHMEQSILRRVQLGHSNEMRLHGVPSEGPAHIPPGSPPVSATAAGPEASFEARIPSPGTHPEGEAAQRIHMKSCFLEDATIGNSNKMSISPGVAGPGGVAGSGEGEPGEDAGRRPADTQSRSHFPRDIGQPITPSHSKLTPKLETMTLGNRSHKAAEGSHYVDEASHEGSWWGGGI

SEQ ID NO: 98321 - protein, 354 aa, Homo sapiens
  Payload ID: 19621
  Gene Name: Z-DNA binding protein 1
  Uniprot ID: Q9H171
  ENSP ID: ENSP00000379167
MAQAPADPGREAERPQQHAATIPETPGPQFSQQREEDIYRFLKDNGPQRALVIAQALGMRTAKDVNRDLYRMKSRHLLDMDEQSKAWTIYRPEDSGRRAKSASIIYQHNPINMICQNGPNSWISIANSEAIQIGHGNIITRQTVSREDGSAGPRHLPSMAPGDSSTWGTLVDPWGPQDIHMEQSILRRVQLGHSNEMRLHGVPSEGPAHIPPGSPPVSATAAGPEASFEARIPSPGTHPEGEAAQRIHMKSCFLEDATIGNSNKMSISPGVAGPGGVAGSGEGEPGEDAGRRPADTQSRSHFPRDIGQPITPSHSKLTPKLETMTLGNRSHKAAEGSHYVDEASHEGSWWGGGI

SEQ ID NO: 98322 - protein, 119 aa, Homo sapiens
  Payload ID: 19621
  Gene Name: Z-DNA binding protein 1
  ENSP ID: ENSP00000404620
  MOD_RES (1)..(1): Any amino acid
XCFLEDATIGNSNKMSISPGVAGPGGVAGSGEGEPGEDAVAAFTEVLNPSKSFMKFGINFFQTPVNVDSLTSSHESQMFLTACRLVIFSRRFSTYFAQIHLRNHSVLHLCPHKIYLLKN

SEQ ID NO: 98323 - protein, 248 aa, Homo sapiens
  Payload ID: 19621
  Gene Name: Z-DNA binding protein 1
  Uniprot ID: Q9H171
  ENSP ID: ENSP00000440552
MAQAPADPGREGHLEQRILQVLTEAGSPVKLAQLVKECQAPKRELNQVLYRMKKELKVSLTSPATWCLGGTDPEGEGPAELALSSPAERPQQHAATIPETPGPQFSQQREEDIYRFLKDNGPQRALVIAQALGMRTAKDVNRDLYRMKSRHLLDMDEQSKAWTIYRPEDSGRRAKSASIIYQHNPINMICQNGPNSWISIANSEAIQIGHGNIITRQTVSREDGKSPKRAQGGDLGGEPPDPLGGGKG

SEQ ID NO: 98324 - protein, 619 aa, Homo sapiens
  Payload ID: 19622
  Gene Name: zeta-chain (TCR) associated protein kinase 70kDa
  Uniprot ID: P43403
  ENSP ID: ENSP00000264972
MPDPAAHLPFFYGSISRAEAEEHLKLAGMADGLFLLRQCLRSLGGYVLSLVHDVRFHHFPIERQLNGTYAIAGGKAHCGPAELCEFYSRDPDGLPCNLRKPCNRPSGLEPQPGVFDCLRDAMVRDYVRQTWKLEGEALEQAIISQAPQVEKLIATTAHERMPWYHSSLTREEAERKLYSGAQTDGKFLLRPRKEQGTYALSLIYGKTVYHYLISQDKAGKYCIPEGTKFDTLWQLVEYLKLKADGLIYCLKEACPNSSASNASGAAAPTLPAHPSTLTHPQRRIDTLNSDGYTPEPARITSPDKPRPMPMDTSVYESPYSDPEELKDKKLFLKRDNLLIADIELGCGNFGSVRQGVYRMRKKQIDVAIKVLKQGTEKADTEEMMREAQIMHQLDNPYIVRLIGVCQAEALMLVMEMAGGGPLHKFLVGKREEIPVSNVAELLHQVSMGMKYLEEKNFVHRDLAARNVLLVNRHYAKISDFGLSKALGADDSYYTARSAGKWPLKWYAPECINFRKFSSRSDVWSYGVTMWEALSYGQKPYKKMKGPEVMAFIEQGKRMECPPECPPELYALMSDCWIYKWEDRPDFLTVEQRMRACYYSLASKVEGPPGSTQKAEAACA

SEQ ID NO: 98325 - protein, 312 aa, Homo sapiens
  Payload ID: 19622
  Gene Name: zeta-chain (TCR) associated protein kinase 70kDa
  Uniprot ID: P43403
  ENSP ID: ENSP00000400475
MPMDTSVYESPYSDPEELKDKKLFLKRDNLLIADIELGCGNFGSVRQGVYRMRKKQIDVAIKVLKQGTEKADTEEMMREAQIMHQLDNPYIVRLIGVCQAEALMLVMEMAGGGPLHKFLVGKREEIPVSNVAELLHQVSMGMKYLEEKNFVHRDLAARNVLLVNRHYAKISDFGLSKALGADDSYYTARSAGKWPLKWYAPECINFRKFSSRSDVWSYGVTMWEALSYGQKPYKKMKGPEVMAFIEQGKRMECPPECPPELYALMSDCWIYKWEDRPDFLTVEQRMRACYYSLASKVEGPPGSTQKAEAACA

SEQ ID NO: 98326 - protein, 374 aa, Homo sapiens
  Payload ID: 19623
  Gene Name: ZFP1 zinc finger protein
  ENSP ID: ENSP00000333192
MDVMLENYSNLLSVEVWKADDQMERDHRNPDEQARQFLILKNQTPIEERGDLFGKALNLNTDFVSLRQVPYKYDLYEKTLKYNSDLLNSNRSYAGKQTDECNEFGKALLYLKQEKTHSGVEYSEYNKSGKALSHKAAIFKHQKIKNLVQPFICTYCDKAFSFKSLLISHKRIHTGEKPYECNVCKKTFSHKANLIKHQRIHTGEKPFECPECGKAFTHQSNLIVHQRAHMEKKPYECSECGKTFAQKFELTTHQRIHTGERPYECNECAKTFFKKSNLIIHQKIHTGEKRYECSECGKSFIQNSQLIIHMRTHTGEKPYECTECGKTFSQRSTLRLHLRIHTGEKPYECSECGKAFSRKSRLSVHQRVHIGEKP

SEQ ID NO: 98327 - protein, 407 aa, Homo sapiens
  Payload ID: 19623
  Gene Name: ZFP1 zinc finger protein
  Uniprot ID: Q6P2D0
  ENSP ID: ENSP00000377080
MNKSQGSVSFTDVTVDFTQEEWEQLDPSQRILYMDVMLENYSNLLSVEVWKADDQMERDHRNPDEQARQFLILKNQTPIEERGDLFGKALNLNTDFVSLRQVPYKYDLYEKTLKYNSDLLNSNRSYAGKQTDECNEFGKALLYLKQEKTHSGVEYSEYNKSGKALSHKAAIFKHQKIKNLVQPFICTYCDKAFSFKSLLISHKRIHTGEKPYECNVCKKTFSHKANLIKHQRIHTGEKPFECPECGKAFTHQSNLIVHQRAHMEKKPYECSECGKTFAQKFELTTHQRIHTGERPYECNECAKTFFKKSNLIIHQKIHTGEKRYECSECGKSFIQNSQLIIHMRTHTGEKPYECTECGKTFSQRSTLRLHLRIHTGEKPYECSECGKAFSRKSRLSVHQRVHIGEKP

SEQ ID NO: 98328 - protein, 28 aa, Homo sapiens
  Payload ID: 19623
  Gene Name: ZFP1 zinc finger protein
  ENSP ID: ENSP00000454286
MNKSQKCGRLMTRWRETTETQTSRRGNF

SEQ ID NO: 98329 - protein, 76 aa, Homo sapiens
  Payload ID: 19623
  Gene Name: ZFP1 zinc finger protein
  ENSP ID: ENSP00000455627
MNKSQGSVSFTDVTVDFTQEEWEQLDPSQRILYMDVMLENYSNLLSVGKDGFQKCGRLMTRWRETTETQTSRRGNF

SEQ ID NO: 98330 - protein, 407 aa, Homo sapiens; identical to SEQ ID NO: 98327
  Payload ID: 19623
  Gene Name: ZFP1 zinc finger protein
  Uniprot ID: Q6P2D0
  ENSP ID: ENSP00000457044

SEQ ID NO: 98331 - protein, 76 aa, Homo sapiens; identical to SEQ ID NO: 98329
  Payload ID: 19623
  Gene Name: ZFP1 zinc finger protein
  ENSP ID: ENSP00000457941

SEQ ID NO: 98332 - protein, 533 aa, Homo sapiens
  Payload ID: 19624
  Gene Name: ZFP14 zinc finger protein
  Uniprot ID: Q9HCL3
  ENSP ID: ENSP00000270001
MAHGSVTFRDVAIDFSQEEWEFLDPAQRDLYRDVMWENYSNFISLGPSISKPDVITLLDEERKEPGMVVREGTRRYCPDLESRYRTNTLSPEKDIYEIYSFQWDIMERIKSYSLQGSIFRNDWECKSKIEGEKEQQEGYFGQVKITSEKMTTYKRHNFLTEYQIVHNGEKVYECKECRKTFIRRSTLSQHLRIHTGEKPYKCKECGQAFRQRAHLIRHHKLHTGEKPYECKECGKAFTVLQELTQHQRLHTGEKPYECKECGKAFRVHQQLARHQRIHTGEKPYECKDCGKTFRQCTHLTRHQRLHTAEKLYECKECGKAFVCGPDLRVHQKIHFGEKPYECKECGKAFRICQQLTVHQSIHTGEKPYECKECGKTFRLRQQLVRHQRIHTREKPYECMECWKTFSSYSQLISHQSIHIGERPYECEECGKAFRLLSQLTQHQSIHTGEKPYECKECRKPFRLLSQLTQHQSIHTGEKPYECKECGKAFRLYSFLTQHQRIHTGEKPYKCKECKKAFRQHSHLTQHQKIHNGI

SEQ ID NO: 98333 - protein, 81 aa, Homo sapiens
  Payload ID: 19624
  Gene Name: ZFP14 zinc finger protein
  ENSP ID: ENSP00000466416
MAHGSVTFRDVAIDFSQEEWEFLDPAQRDLYRDVMWENYSNFISLAGPSISKPDVITLLDEERKEPGMVVREGTRRYCPGE

SEQ ID NO: 98334 - protein, 461 aa, Homo sapiens
  Payload ID: 19625
  Gene Name: ZFP2 zinc finger protein
  Uniprot ID: Q6ZN57
  ENSP ID: ENSP00000354453
MEREGIWHSTLGETWEPNNWLEGQQDSHLSQVGVTHKETFTEMRVCGGNEFERCSSQDSILDTQQSIPMVKRPHNCNSHGEDATQNSELIKTQRMFVGKKIYECNQCSKTFSQSSSLLKHQRIHTGEKPYKCNVCGKHFIERSSLTVHQRIHTGEKPYKCNECGKAFSQSMNLTVHQRTHTGEKPYQCKECGKAFHKNSSLIQHERIHTGEKPYKCNECGKAFTQSMNLTVHQRTHTGEKPYECNECGKAFSQSMHLIVHQRSHTGEKPYECSQCGKAFSKSSTLTLHQRNHTGEKPYKCNKCGKSFSQSTYLIEHQRLHSGVKPFECNECGKAFSKNSSLTQHRRIHTGEKPYECMVCGKHFTGRSSLTVHQVIHTGEKPYECNECGKAFSQSAYLIEHQRIHTGEKPYECDQCGKAFIKNSSLTVHQRTHTGEKPYQCNECGKAFSRSTNLTRHQRTHT

SEQ ID NO: 98335 - protein, 23 aa, Homo sapiens
  Payload ID: 19625
  Gene Name: ZFP2 zinc finger protein
  ENSP ID: ENSP00000429095
MEREGIWHSTLGETWEPNNWLEG

SEQ ID NO: 98336 - protein, 461 aa, Homo sapiens; identical to SEQ ID NO: 98334
  Payload ID: 19625
  Gene Name: ZFP2 zinc finger protein
  Uniprot ID: Q6ZN57
  ENSP ID: ENSP00000430531

SEQ ID NO: 98337 - protein, 461 aa, Homo sapiens; identical to SEQ ID NO: 98334
  Payload ID: 19625
  Gene Name: ZFP2 zinc finger protein
  Uniprot ID: Q6ZN57
  ENSP ID: ENSP00000430980

SEQ ID NO: 98338 - protein, 8 aa, Homo sapiens
  Payload ID: 19625
  Gene Name: ZFP2 zinc finger protein
  ENSP ID: ENSP00000431074
MEREGIWH

SEQ ID NO: 98339 - protein, 868 aa, Homo sapiens
  Payload ID: 19626
  Gene Name: ZFP28 zinc finger protein
  Uniprot ID: Q8NHY6
  ENSP ID: ENSP00000301318
MRGAASASVREPTPLPGRGAPRTKPRAGRGPTVGTPATLALPARGRPRSRNGLASKGQRGAAPTGPGHRALPSRDTALPQERNKKLEAVGTGIEPKAMSQGLVTFGDVAVDFSQEEWEWLNPIQRNLYRKVMLENYRNLASLGLCVSKPDVISSLEQGKEPWTVKRKMTRAWCPDLKAVWKIKELPLKKDFCEGKLSQAVITERLTSYNLEYSLLGEHWDYDALFETQPGLVTIKNLAVDFRQQLHPAQKNFCKNGIWENNSDLGSAGHCVAKPDLVSLLEQEKEPWMVKRELTGSLFSGQRSVHETQELFPKQDSYAEGVTDRTSNTKLDCSSFRENWDSDYVFGRKLAVGQETQFRQEPITHNKTLSKERERTYNKSGRWFYLDDSEEKVHNRDSIKNFQKSSVVIKQTGIYAGKKLFKCNECKKTFTQSSSLTVHQRIHTGEKPYKCNECGKAFSDGSSFARHQRCHTGKKPYECIECGKAFIQNTSLIRHWRYYHTGEKPFDCIDCGKAFSDHIGLNQHRRIHTGEKPYKCDVCHKSFRYGSSLTVHQRIHTGEKPYECDVCRKAFSHHASLTQHQRVHSGEKPFKCKECGKAFRQNIHLASHLRIHTGEKPFECAECGKSFSISSQLATHQRIHTGEKPYECKVCSKAFTQKAHLAQHQKTHTGEKPYECKECGKAFSQTTHLIQHQRVHTGEKPYKCMECGKAFGDNSSCTQHQRLHTGQRPYECIECGKAFKTKSSLICHRRSHTGEKPYECSVCGKAFSHRQSLSVHQRIHSGKKPYECKECRKTFIQIGHLNQHKRVHTGERSYNYKKSRKVFRQTAHLAHHQRIHTGESSTCPSLPSTSNPVDLFPKFLWNPSSLPSP

SEQ ID NO: 98340 - protein, 146 aa, Homo sapiens
  Payload ID: 19626
  Gene Name: ZFP28 zinc finger protein
  ENSP ID: ENSP00000465853
TLALPARGRPRSRNGLASKGQRGAAPTGPGHRALPSRDTALPQERNKKLEAVGTGIEPKAMSQGLVTFGDVAVDFSQEEWEWLNPIQRNLYRKVMLENYRNLASLGLCVSKPDVISSLEQGKEPWTVKRKMTRAWCPDHSSLLETS

SEQ ID NO: 98341 - protein, 349 aa, Homo sapiens
  Payload ID: 19626
  Gene Name: ZFP28 zinc finger protein
  Uniprot ID: Q8NHY6
  ENSP ID: ENSP00000468603
MRGAASASVREPTPLPGRGAPRTKPRAGRGPTVGTPATLALPARGRPRSRNGLASKGQRGAAPTGPGHRALPSRDTALPQERNKKLEAVGTGIEPKAMSQGLVTFGDVAVDFSQEEWEWLNPIQRNLYRKVMLENYRNLASLGLCVSKPDVISSLEQGKEPWTVKRKMTRAWCPDLKAVWKIKELPLKKDFCEGKLSQAVITERLTSYNLEYSLLGEHWDYDALFETQPGLVTIKNLAVDFRQQLHPAQKNFCKNGIWENNSDLGSAGHCVAKPDLVSLLEQEKEPWMVKRELTGSLFSGECRRAWCGKSTARESGAFTKKAASSLIYSRKLYPGSLGLERKLNSGSSK

SEQ ID NO: 98342 - protein, 502 aa, Homo sapiens
  Payload ID: 19627
  Gene Name: ZFP3 zinc finger protein
  Uniprot ID: Q96NJ6
  ENSP ID: ENSP00000320347
MGTENKEVIPKEEISEESEPHGSLLEKFPKVVYQGHEFGAGCEEDMLEGHSRESMEEVIEQMSPQERDFPSGLMIFKKSPSSEKDRENNESERGCSPSPNLVTHQGDTTEGVSAFATSGQNFLEILESNKTQRSSVGEKPHTCKECGKAFNQNSHLIQHMRVHSGEKPFECKECGKTFGTNSSLRRHLRIHAGEKPFACNECGKAFIQSSHLIHHHRIHTGERPYKCEECGKAFSQNSALILHQRIHTGEKPYECNECGKTFRVSSQLIQHQRIHTEERYHECNECGKAFKHSSGLIRHQKIHTGEKPYLCNECGKGFGQSSELIRHQRIHTGDKPYECNECGKTFGQNSEIIRHIRIHTGEKPYVCKECGKAFRGNSELLRHERIHTGEKPYECFECGKAFRRTSHLIVHQRIHTGEKPHQCNECARTFWDNSELLLHQKIHIGEKPYECSECEKTFSQHSQLIIHQRIHTGEKPYECQECQKTFSRSSHLLRHQSVHCME

SEQ ID NO: 98343 - protein, 519 aa, Homo sapiens
  Payload ID: 19628
  Gene Name: ZFP30 zinc finger protein
  Uniprot ID: Q9Y2G7
  ENSP ID: ENSP00000343581
MARDLVMFRDVAVDFSQEEWECLNSYQRNLYRDVILENYSNLVSLAGCSISKPDVITLLEQGKEPWMVVRDEKRRWTLDLESRYDTKKLFQGKDIYEMNLSQWKVMERIKSCGLEEQESPHEVCFRQVTKTTSEKMPTYRKLTSLPLYQKSHNREKPYECGECGKAFRVRQQLTFHQRIHTGEKPYECKECGKAFRQCAHLSRHQRIHTSDKLYECKKCGKIFTCGSDLRVHQRIHIGEKPYECKECGKAFRVRGQLNLHQRIHTGEKPYECKECGKAFRQYAHLTRHQRLNIAEKCYECKECGQAFLCSTGLRLHHKLHTGEKPYECKECGKAFRVRQQLTLHQRIHTGEKPYDCKECGKTFSRGYHLTLHQRIHTGEKPYECKECQKFFRRYSELISHQGIHIGEKPYECKECGKAFRLFSQLTQHQSIHFGEKPFKCKECEKTFRLLSQLTQHQSIHTGEKPYDCKECGKAFRLHSSLIQHQRIHSGEKPYKCKECKKAFRQHSHLTYHQRIHNVT

SEQ ID NO: 98344 - protein, 519 aa, Homo sapiens; identical to SEQ ID NO: 98343
  Payload ID: 19628
  Gene Name: ZFP30 zinc finger protein
  Uniprot ID: Q9Y2G7
  ENSP ID: ENSP00000375988

SEQ ID NO: 98345 - protein, 519 aa, Homo sapiens; identical to SEQ ID NO: 98343
  Payload ID: 19628
  Gene Name: ZFP30 zinc finger protein
  Uniprot ID: Q9Y2G7
  ENSP ID: ENSP00000422930

SEQ ID NO: 98346 - protein, 56 aa, Homo sapiens
  Payload ID: 19628
  Gene Name: ZFP30 zinc finger protein
  ENSP ID: ENSP00000465496
MARDLVMFRDVAVDFSQEEWECLNSYQRNLYRDVILENYSNLVSLAGCSISKPDVI

SEQ ID NO: 98347 - protein, 124 aa, Homo sapiens
  Payload ID: 19628
  Gene Name: ZFP30 zinc finger protein
  ENSP ID: ENSP00000466563
MARDLVMFRDVAVDFSQEEWECLNSYQRNLYRDVILENYSNLVSLGCSISKPDVITLLEQGKEPWMVVRDEKRRWTLDLESRYDTKKLFQGKDIYEMNLSQWKVMERIKSCGLEEQESPHEVCF

SEQ ID NO: 98348 - protein, 3 aa, Homo sapiens
  Payload ID: 19628
  Gene Name: ZFP30 zinc finger protein
  ENSP ID: ENSP00000466993
MAR

SEQ ID NO: 98349 - protein, 92 aa, Homo sapiens
  Payload ID: 19628
  Gene Name: ZFP30 zinc finger protein
  ENSP ID: ENSP00000467387
MARDLVMFRDVAVDFSQEEWECLNSYQRNLYRDVILENYSNLVSLGCSISKPDVITLLEQGKEPWMVVRDEKRRWTLGPTFKYHHLGIRVST

SEQ ID NO: 98350 - protein, 2 aa, Homo sapiens
  Payload ID: 19628
  Gene Name: ZFP30 zinc finger protein
  ENSP ID: ENSP00000468295
MA

SEQ ID NO: 98351 - protein, 332 aa, Homo sapiens
  Payload ID: 19629
  Gene Name: ZFP36 ring finger protein
  ENSP ID: ENSP00000469647
MANRYTMDLTAIYESLLSLSPDVPVPSDHGGTESSPGWGSSGPWSLSPSDSSPSGVTSRLPGRSTSLVEGRSCGWVPPPPGFAPLAPRLGPELSPSPTSPTATSTTPSRYKTELCRTFSESGRCRYGAKCQFAHGLGELRQANRHPKYKTELCHKFYLQGRCPYGSRCHFIHNPSEDLAAPGHPPVLRQSISFSGLPSGRRTSPPPPGLAGPSLSSSSFSPSSSPPPPGDLPLSPSAFSAAPGTPLARRDPTPVCCPSCRRATPISVWGPLGGLVRTPSVQSLGSDPDEYASSGSSLGGSDSPVFEAGVFAPPQPVAAPRRLPIFNRISVSE

SEQ ID NO: 98352 - protein, 148 aa, Homo sapiens
  Payload ID: 19629
  Gene Name: ZFP36 ring finger protein
  ENSP ID: ENSP00000470200
  MOD_RES (1)..(1): Any amino acid
XHIRGGQETQNWETVSLLSLSPDVPVPSDHGGTESSPGWGSSGPWSLSPSDSSPSGVTSRLPGRSTSLVEGRSCGWVPPPPGFAPLAPRLGPELSPSPTSPTATSTTPSRYKTELCRTFSESGRCRYGAKCQFAHGLGELRQANRHPK

SEQ ID NO: 98353 - protein, 343 aa, Homo sapiens
  Payload ID: 19629
  Gene Name: ZFP36 ring finger protein
  ENSP ID: ENSP00000471239
  MOD_RES (1)..(1): Any amino acid
XALPLSADTPHGQPLHHGSDCHLRGDLLSLSPDVPVPSDHGGTESSPGWGSSGPWSLSPSDSSPSGVTSRLPGRSTSLVEGRSCGWVPPPPGFAPLAPRLGPELSPSPTSPTATSTTPSRYKTELCRTFSESGRCRYGAKCQFAHGLGELRQANRHPKYKTELCHKFYLQGRCPYGSRCHFIHNPSEDLAAPGHPPVLRQSISFSGLPSGRRTSPPPPGLAGPSLSSSSFSPSSSPPPPGDLPLSPSAFSAAPGTPLARRDPTPVCCPSCRRATPISVWGPLGGLVRTPSVQSLGSDPDEYASSGSSLGGSDSPVFEAGVFAPPQPVAAPRRLPIFNRISVSE

SEQ ID NO: 98354 - protein, 71 aa, Homo sapiens [sequence omitted]

SEQ ID NO: 98355 - protein, 338 aa, Homo sapiens
  Payload ID: 19630
  Gene Name: ZFP36 ring finger protein-like 1
  Uniprot ID: Q07352
  ENSP ID: ENSP00000337386
MTTTLVSATIFDLSEVLCKGNKMLNYSAPSAGGCLLDRKAVGTPAGGGFPRRHSVTLPSSKFHQNQLLSSLKGEPAPALSSRDSRFRDRSFSEGGERLLPTQKQPGGGQVNSSRYKTELCRPFEENGACKYGDKCQFAHGIHELRSLTRHPKYKTELCRTFHTIGFCPYGPRCHFIHNAEERRALAGARDLSADRPRLQHSFSFAGFPSAAATAAATGLLDSPTSITPPPILSADDLLGSPTLPDGTNNPFAFSSQELASLFAPSMGLPGGGSPTTFLFRPMSESPHMFDSPPSPQDSLSDQEGYLSSSSSSHSGSDSPTLDNSRRLPIFSRLSISDD

SEQ ID NO: 98356 - protein, 338 aa, Homo sapiens; identical to SEQ ID NO: 98355
  Payload ID: 19630
  Gene Name: ZFP36 ring finger protein-like 1
  Uniprot ID: Q07352
  ENSP ID: ENSP00000388402

SEQ ID NO: 98357 - protein, 176 aa, Homo sapiens
  Payload ID: 19630
  Gene Name: ZFP36 ring finger protein-like 1
  ENSP ID: ENSP00000450600
MLNYSAPSAGGCLLDRKAVGTPAGGGFPRRHSVTLPSSKFHQNQLLSSLKGEPAPALSSRDSRFRDRSFSEGGERLLPTQKQPGGGQVNSSRYKTELCRPFEENGACKYGDKCQFAHGIHELRSLTRHPKYKTELCRTFHTIGFCPYGPRCHFIHNAEERRALAGARDLSADRPRL

SEQ ID NO: 98358 - protein, 207 aa, Homo sapiens
  Payload ID: 19630
  Gene Name: ZFP36 ring finger protein-like 1
  ENSP ID: ENSP00000450784
MGRARKSGLGQRSRPTASRSEAAVQGNKMLNYSAPSAGGCLLDRKAVGTPAGGGFPRRHSVTLPSSKFHQNQLLSSLKGEPAPALSSRDSRFRDRSFSEGGERLLPTQKQPGGGQVNSSRYKTELCRPFEENGACKYGDKCQFAHGIHELRSLTRHPKYKTELCRTFHTIGFCPYGPRCHFIHNAEERRALAGARDLSADRPRLQHS

SEQ ID NO: 98359 - protein, 69 aa, Homo sapiens
  Payload ID: 19630
  Gene Name: ZFP36 ring finger protein-like 1
  ENSP ID: ENSP00000451093
MVREIIVENISSGNLGQRVLFSGITSLSPPTSDQAPNLLPTRKSKGSLKTCCQRKGTLLKEEVESLRPG

SEQ ID NO: 98360 - protein, 189 aa, Homo sapiens
  Payload ID: 19630
  Gene Name: ZFP36 ring finger protein-like 1
  ENSP ID: ENSP00000452119
MGRARKSGLGQRSRPTASRSEAAVQPGVRKARGAGNWRVGLQTGEAAPSPHRDLRDTPDPRPWLARTHRMTTTLVSATIFDLSEVLCKGNKMLNYSAPSAGGCLLDRKAVGTPAGGGFPRRHSVTLPSSKFHQNQLLSSLKGEPAPALSSRDSRFRDRSFSEGGERLLPTQKQPGGGQVNSSRYKTELC

SEQ ID NO: 98361 - protein, 494 aa, Homo sapiens
  Payload ID: 19631
  Gene Name: ZFP36 ring finger protein-like 2
  Uniprot ID: P47974
  ENSP ID: ENSP00000282388
MSTTLLSAFYDVDFLCKTEKSLANLNLNNMLDKKAVGTPVAAAPSSGFAPGFLRRHSASNLHALAHPAPSPGSCSPKFPGAANGSSCGSAAAGGPTSYGTLKEPSGGGGTALLNKENKFRDRSFSENGDRSQHLLHLQQQQKGGGGSQINSTRYKTELCRPFEESGTCKYGEKCQFAHGFHELRSLTRHPKYKTELCRTFHTIGFCPYGPRCHFIHNADERRPAPSGGASGDLRAFGTRDALHLGFPREPRPKLHHSLSFSGFPSGHHQPPGGLESPLLLDSPTSRTPPPPSCSSASSCSSSASSCSSASAASTPSGAPTCCASAAAAAAAALLYGTGGAEDLLAPGAPCAACSSASCANNAFAFGPELSSLITPLAIQTHNFAAVAAAAYYRSQQQQQQQGLAPPAQPPAPPSATLPAGAAAPPSPPFSFQLPRRLSDSPVFDAPPSPPDSLSDRDSYLSGSLSSGSLSGSESPSLDPGRRLPIFSRLSISDD

SEQ ID NO: 98362 - protein, 492 aa, Homo sapiens
  Payload ID: 19631
  Gene Name: ZFP36 ring finger protein-like 2
  ENSP ID: ENSP00000478940
MSTTLLSAFYDVDFLCKTEKSLANLNLNNMLDKKAVGTPVAAAPSSGFAPGFLRRHSASNLHALAHPAPSPGSCSPKFPGAANGSSCGSAAAGGPTSYGTLKEPSGGGGTALLNKENKFRDRSFSENGDRSQHLLHLQQQQKGGGGSQINSTRYKTELCRPFEESGTCKYGEKCQFAHGFHELRSLTRHPKYKTELCRTFHTIGFCPYGPRCHFIHNADERRPAPSGGASGDLRAFGTRDALHLGFPREPRPKLHHSLSFSGFPSGHHQPPGGLESPLLLDSPTSRTPPPPSCSSASSCSSSASSCSSASAASTPSGAPTCCASAAAALRLLYGTGGAEDLLAPGAPCAACSSASCANNAFAFGPELSSLITPLAIQTHNFAAVAAAAYYRSQQQQQQQGLAPPAQPPAPPSATLPAGAAAPPSPPFSFQLPRRLSDSPVFDAPPSPPDSLSDRDSYLSGSLSSGSLSGSESPSLDPGRRLPIFSRLSISDD

SEQ ID NO: 98363 - protein, 630 aa, Homo sapiens
  Payload ID: 19632
  Gene Name: ZFP37 zinc finger protein
  Uniprot ID: Q9Y6Q3
  ENSP ID: ENSP00000363344
MSVSSGVQILTKPETVDRRRSAETTKEAGRPLEMAVSEPEASAAEWKQLDPAQSNLYNDVMLENYCNQASMGCQAPKPDMISKLEKGEAPWLGKGKRPSQGCPSKIARPKQKETDGKVQKDDDQLENIQKSQNKLLREVAVKKKTQAKKNGSDCGSLGKKNNLHKKHVPSKKRLLKFESCGKILKQNLDLPDHSRNCVKRKSDAAKEHKKSFNHSLSDTRKGKKQTGKKHEKLSSHSSSDKCNKTGKKHDKLCCHSSSHIKQDKIQTGEKHEKSPSLSSSTKHEKPQACVKPYECNQCGKVLSHKQGLIDHQRVHTGEKPYECNECGIAFSQKSHLVVHQRTHTGEKPYECIQCGKAHGHKHALTDHLRIHTGEKPYECAECGKTFRHSSNLIQHVRSHTGEKPYECKECGKSFRYNSSLTEHVRTHTGEIPYECNECGKAFKYSSSLTKHMRIHTGEKPFECNECGKAFSKKSHLIIHQRTHTKEKPYKCNECGKAFGHSSSLTYHMRTHTGESPFECNQCGKGFKQIEGLTQHQRVHTGEKPYECNECGKAFSQKSHLIVHQRTHTGEKPYECNECEKAFNAKSQLVIHQRSHTGEKPYECNECGKTFKQNASLTKHVKTHSEDKSHE

SEQ ID NO: 98364 - protein, 631 aa, Homo sapiens
  Payload ID: 19632
  Gene Name: ZFP37 zinc finger protein
  Uniprot ID: Q9Y6Q3
  ENSP ID: ENSP00000451310
MSVSSGVQILTKPETVDRRRSAETTKEAGRPLEMAVSEPEASAAKEWKQLDPAQSNLYNDVMLENYCNQASMGCQAPKPDMISKLEKGEAPWLGKGKRPSQGCPSKIARPKQKETDGKVQKDDDQLENIQKSQNKLLREVAVKKKTQAKKNGSDCGSLGKKNNLHKKHVPSKKRLLKFESCGKILKQNLDLPDHSRNCVKRKSDAAKEHKKSFNHSLSDTRKGKKQTGKKHEKLSSHSSSDKCNKTGKKHDKLCCHSSSHIKQDKIQTGEKHEKSPSLSSSTKHEKPQACVKPYECNQCGKVLSHKQGLIDHQRVHTGEKPYECNECGIAFSQKSHLVVHQRTHTGEKPYECIQCGKAHGHKHALTDHLRIHTGEKPYECAECGKTFRHSSNLIQHVRSHTGEKPYECKECGKSFRYNSSLTEHVRTHTGEIPYECNECGKAFKYSSSLTKHMRIHTGEKPFECNECGKAFSKKSHLIIHQRTHTKEKPYKCNECGKAFGHSSSLTYHMRTHTGESPFECNQCGKGFKQIEGLTQHQRVHTGEKPYECNECGKAFSQKSHLIVHQRTHTGEKPYECNECEKAFNAKSQLVIHQRSHTGEKPYECNECGKTFKQNASLTKHVKTHSEDKSHE

SEQ ID NO: 98365 - protein, 645 aa, Homo sapiens
  Payload ID: 19632
  Gene Name: ZFP37 zinc finger protein
  Uniprot ID: Q9Y6Q3
  ENSP ID: ENSP00000452552
MSVSSGVQILTKPETVDRRRSAETTKEAGRPLEMAVSEPEASAAVSVTFKHVTMAFTQKEWKQLDPAQSNLYNDVMLENYCNQASMGCQAPKPDMISKLEKGEAPWLGKGKRPSQGCPSKIARPKQKETDGKVQKDDDQLENIQKSQNKLLREVAVKKKTQAKKNGSDCGSLGKKNNLHKKHVPSKKRLLKFESCGKILKQNLDLPDHSRNCVKRKSDAAKEHKKSFNHSLSDTRKGKKQTGKKHEKLSSHSSSDKCNKTGKKHDKLCCHSSSHIKQDKIQTGEKHEKSPSLSSSTKHEKPQACVKPYECNQCGKVLSHKQGLIDHQRVHTGEKPYECNECGIAFSQKSHLVVHQRTHTGEKPYECIQCGKAHGHKHALTDHLRIHTGEKPYECAECGKTFRHSSNLIQHVRSHTGEKPYECKECGKSFRYNSSLTEHVRTHTGEIPYECNECGKAFKYSSSLTKHMRIHTGEKPFECNECGKAFSKKSHLIIHQRTHTKEKPYKCNECGKAFGHSSSLTYHMRTHTGESPFECNQCGKGFKQIEGLTQHQRVHTGEKPYECNECGKAFSQKSHLIVHQRTHTGEKPYECNECEKAFNAKSQLVIHQRSHTGEKPYECNECGKTFKQNASLTKHVKTHSEDKSHE

SEQ ID NO: 98366 - protein, 199 aa, Homo sapiens; identical to SEQ ID NO: 75977
  Payload ID: 19633
  Gene Name: ZFP41 zinc finger protein
  ENSP ID: ENSP00000327427

SEQ ID NO: 98367 - protein, 199 aa, Homo sapiens; identical to SEQ ID NO: 75977
  Payload ID: 19633
  Gene Name: ZFP41 zinc finger protein
  ENSP ID: ENSP00000430465

SEQ ID NO: 98368 - protein, 310 aa, Homo sapiens
  Payload ID: 19634
  Gene Name: ZFP42 zinc finger protein
  Uniprot ID: Q96MM3
  ENSP ID: ENSP00000317686
MSQQLKKRAKTRHQKGLGGRAPSGAKPRQGKSSQDLQAEIEPVSAVWALCDGYVCYEPGPQALGGDDFSDCYIECVIRGEFSQPILEEDSLFESLEYLKKGSEQQLSQKVFEASSLECSLEYMKKGVKKELPQKIVGENSLEYSEYMTGKKLPPGGIPGIDLSDPKQLAEFARKKPPINKEYDSLSAIACPQSGCTRKLRNRAALRKHLLIHGPRDHVCAECGKAFVESSKLKRHFLVHTGEKPFRCTFEGCGKRFSLDFNLRTHVRIHTGEKRFVCPFQGCNRRFIQSNNLKAHILTHANTNKNEQEGK

SEQ ID NO: 98369 - protein, 310 aa, Homo sapiens; identical to SEQ ID NO: 98368
  Payload ID: 19634
  Gene Name: ZFP42 zinc finger protein
  Uniprot ID: Q96MM3
  ENSP ID: ENSP00000424662

SEQ ID NO: 98370 - protein, 310 aa, Homo sapiens; identical to SEQ ID NO: 98368
  Payload ID: 19634
  Gene Name: ZFP42 zinc finger protein
  Uniprot ID: Q96MM3
  ENSP ID: ENSP00000483363

SEQ ID NO: 98371 - protein, 452 aa, Homo sapiens
  Payload ID: 19635
  Gene Name: ZFP57 zinc finger protein
  Uniprot ID: Q9NU63
  ENSP ID: ENSP00000366078
MAAGEPRSLLFFQKPVTFEDVAVNFTQEEWDCLDASQRVLYQDVMSETFKNLTSVARIFLHKPELITKLEQEEEQWRETRVLQASQAGPPFFCYTCGKCFSRRSYLYSHQFVHNPKLTNSCSQCGKLFRSPKSLSYHRRMHLGERPFCCTLCDKTYCDASGLSRHRRVHLGYRPHSCSVCGKSFRDQSELKRHQKIHQNQEPVDGNQECTLRIPGTQAEFQTPIARSQRSIQGLLDVNHAPVARSQEPIFRTEGPMAQNQASVLKNQAPVTRTQAPITGTLCQDARSNSHPVKPSRLNVFCCPHCSLTFSKKSYLSRHQKAHLTEPPNYCFHCSKSFSSFSRLVRHQQTHWKQKSYLCPICDLSFGEKEGLMDHWRGYKGKDLCQSSHHKCRVILGQWLGFSHDVPTMAGEEWKHGGDQSPPRIHTPRRRGLREKACKGDKTKEAVSILKHK

SEQ ID NO: 98372 - protein, 516 aa, Homo sapiens
  Payload ID: 19635
  Gene Name: ZFP57 zinc finger protein
  Uniprot ID: Q9NU63
  ENSP ID: ENSP00000366080
MFEQLKPIEPRDCWREARVKKKPVTFEDVAVNFTQEEWDCLDASQRVLYQDVMSETFKNLTSVARIFLHKPELITKLEQEEEQWREFVHLPNTEGLSEGKKKELREQHPSLRDEGTSDDKVFLACRGAGQCPLSAPAGTMDRTRVLQASQAGPPFFCYTCGKCFSRRSYLYSHQFVHNPKLTNSCSQCGKLFRSPKSLSYHRRMHLGERPFCCTLCDKTYCDASGLSRHRRVHLGYRPHSCSVCGKSFRDQSELKRHQKIHQNQEPVDGNQECTLRIPGTQAEFQTPIARSQRSIQGLLDVNHAPVARSQEPIFRTEGPMAQNQASVLKNQAPVTRTQAPITGTLCQDARSNSHPVKPSRLNVFCCPHCSLTFSKKSYLSRHQKAHLTEPPNYCFHCSKSFSSFSRLVRHQQTHWKQKSYLCPICDLSFGEKEGLMDHWRGYKGKDLCQSSHHKCRVILGQWLGFSHDVPTMAGEEWKHGGDQSPPRIHTPRRRGLREKACKGDKTKEAVSILKHK

SEQ ID NO: 98373 - protein, 516 aa, Homo sapiens; identical to SEQ ID NO: 98372
  Payload ID: 19635
  Gene Name: ZFP57 zinc finger protein
  Uniprot ID: Q9NU63
  ENSP ID: ENSP00000373124

SEQ ID NO: 98374 - protein, 516 aa, Homo sapiens; identical to SEQ ID NO: 98372
  Payload ID: 19635
  Gene Name: ZFP57 zinc finger protein
  Uniprot ID: Q9NU63
  ENSP ID: ENSP00000394222

SEQ ID NO: 98375 - protein, 211 aa, Homo sapiens
  Payload ID: 19635
  Gene Name: ZFP57 zinc finger protein
  ENSP ID: ENSP00000394744
  MOD_RES (1)..(1): Any amino acid
XARSQEPIFRTEGPMAQNQASVLKNQAPVTRTQAPITGTLCQDARSNSHPVKPSRLNVFCCPHCSLTFSKKSYLSRHQKAHLTEPPNYCFHCSKSFSSFSRLVRHQQTHWKQKSYLCPICDLSFGEKEGLMDHWRGYKGKDLCQSSHHKCRVILGQWLGFSHDVPTMAGEEWKHGGDQSPPRIHTPRRRGLREKACKGDKTKEAVSILKHK

SEQ ID NO: 98376 - protein, 516 aa, Homo sapiens; identical to SEQ ID NO: 98372
  Payload ID: 19635
  Gene Name: ZFP57 zinc finger protein
  Uniprot ID: Q9NU63
  ENSP ID: ENSP00000396462

SEQ ID NO: 98377 - protein, 516 aa, Homo sapiens; identical to SEQ ID NO: 98372
  Payload ID: 19635
  Gene Name: ZFP57 zinc finger protein
  Uniprot ID: Q9NU63
  ENSP ID: ENSP00000398086

SEQ ID NO: 98378 - protein, 516 aa, Homo sapiens; identical to SEQ ID NO: 98372
  Payload ID: 19635
  Gene Name: ZFP57 zinc finger protein
  Uniprot ID: Q9NU63
  ENSP ID: ENSP00000409118

SEQ ID NO: 98379 - protein, 516 aa, Homo sapiens; identical to SEQ ID NO: 98372
  Payload ID: 19635
  Gene Name: ZFP57 zinc finger protein
  Uniprot ID: Q9NU63
  ENSP ID: ENSP00000412932

SEQ ID NO: 98380 - protein, 536 aa, Homo sapiens
  Payload ID: 19635
  Gene Name: ZFP57 zinc finger protein
  Uniprot ID: Q9NU63
  ENSP ID: ENSP00000418259
MFEQLKPIEPVQKTLPWVGEVAATLQEAMKRDCWREARVKKKPVTFEDVAVNFTQEEWDCLDASQRVLYQDVMSETFKNLTSVARIFLHKPELITKLEQEEEQWREFVHLPNTEGLSEGKKKELREQHPSLRDEGTSDDKVFLACRGAGQCPLSAPAGTMDRTRVLQASQAGPPFFCYTCGKCFSRRSYLYSHQFVHNPKLTNSCSQCGKLFRSPKSLSYHRRMHLGERPFCCTLCDKTYCDASGLSRHRRVHLGYRPHSCSVCGKSFRDQSELKRHQKIHQNQEPVDGNQECTLRIPGTQAEFQTPIARSQRSIQGLLDVNHAPVARSQEPIFRTEGPMAQNQASVLKNQAPVTRTQAPITGTLCQDARSNSHPVKPSRLNVFCCPHCSLTFSKKSYLSRHQKAHLTEPPNYCFHCSKSFSSFSRLVRHQQTHWKQKSYLCPICDLSFGEKEGLMDHWRGYKGKDLCQSSHHKCRVILGQWLGFSHDVPTMAGEEWKHGGDQSPPRIHTPRRRGLREKACKGDKTKEAVSILKHK

SEQ ID NO: 98381 - protein, 452 aa, Homo sapiens; identical to SEQ ID NO: 98371
  Payload ID: 19635
  Gene Name: ZFP57 zinc finger protein
  Uniprot ID: Q9NU63
  ENSP ID: ENSP00000446541

SEQ ID NO: 98382 - protein, 536 aa, Homo sapiens; identical to SEQ ID NO: 98380
  Payload ID: 19635
  Gene Name: ZFP57 zinc finger protein
  Uniprot ID: Q9NU63
  ENSP ID: ENSP00000446798

SEQ ID NO: 98383 - protein, 452 aa, Homo sapiens; identical to SEQ ID NO: 98371
  Payload ID: 19635
  Gene Name: ZFP57 zinc finger protein
  Uniprot ID: Q9NU63
  ENSP ID: ENSP00000447492

SEQ ID NO: 98384 - protein, 536 aa, Homo sapiens; identical to SEQ ID NO: 98380
  Payload ID: 19635
  Gene Name: ZFP57 zinc finger protein
  Uniprot ID: Q9NU63
  ENSP ID: ENSP00000447495

SEQ ID NO: 98385 - protein, 452 aa, Homo sapiens; identical to SEQ ID NO: 98371
  Payload ID: 19635
  Gene Name: ZFP57 zinc finger protein
  Uniprot ID: Q9NU63
  ENSP ID: ENSP00000447698

SEQ ID NO: 98386 - protein, 536 aa, Homo sapiens; identical to SEQ ID NO: 98380
  Payload ID: 19635
  Gene Name: ZFP57 zinc finger protein
  Uniprot ID: Q9NU63
  ENSP ID: ENSP00000448351

SEQ ID NO: 98387 - protein, 452 aa, Homo sapiens; identical to SEQ ID NO: 98371
  Payload ID: 19635
  Gene Name: ZFP57 zinc finger protein
  Uniprot ID: Q9NU63
  ENSP ID: ENSP00000448634

SEQ ID NO: 98388 - protein, 536 aa, Homo sapiens; identical to SEQ ID NO: 98380
  Payload ID: 19635
  Gene Name: ZFP57 zinc finger protein
  Uniprot ID: Q9NU63
  ENSP ID: ENSP00000449230

SEQ ID NO: 98389 - protein, 536 aa, Homo sapiens; identical to SEQ ID NO: 98380
  Payload ID: 19635
  Gene Name: ZFP57 zinc finger protein
  Uniprot ID: Q9NU63
  ENSP ID: ENSP00000449407

SEQ ID NO: 98390 - protein, 452 aa, Homo sapiens; identical to SEQ ID NO: 98371
  Payload ID: 19635
  Gene Name: ZFP57 zinc finger protein
  Uniprot ID: Q9NU63
  ENSP ID: ENSP00000449556

SEQ ID NO: 98391 - protein, 536 aa, Homo sapiens; identical to SEQ ID NO: 98380
  Payload ID: 19635
  Gene Name: ZFP57 zinc finger protein
  Uniprot ID: Q9NU63
  ENSP ID: ENSP00000450279

SEQ ID NO: 98392 - protein, 452 aa, Homo sapiens; identical to SEQ ID NO: 98371
  Payload ID: 19635
  Gene Name: ZFP57 zinc finger protein
  Uniprot ID: Q9NU63
  ENSP ID: ENSP00000450397

SEQ ID NO: 98393 - protein, 160 aa, Homo sapiens
  Payload ID: 19636
  Gene Name: ZFP62 zinc finger protein
  ENSP ID: ENSP00000422987
MPESKVGDTCVWDSKVENQQKKPVENRMKEDKSSIREAISKAKSTANIKTEQEGEASEKSLHLSPQHITHQTMPIGQRGSEQGKRVENINGTSYPSLQQKTNAVKKLHKCDECGKSFKYNSRLVQHKIMHTGEKRYECDDCGGTFRSSSSLRVHKRIHTG

SEQ ID NO: 98394 - protein, 103 aa, Homo sapiens
  Payload ID: 19636
  Gene Name: ZFP62 zinc finger protein
  ENSP ID: ENSP00000423709
MPESKVGDTCVWDSKVENQQKKPVENRMKEDKSSIREAISKAKSTANIKTEQEGEASEKSLHLSPQHITHQTMPIGQRGSEQGKRVENINGTSYPSLQQKTNA

SEQ ID NO: 98395 - protein, 900 aa, Homo sapiens
  Payload ID: 19636
  Gene Name: ZFP62 zinc finger protein
  Uniprot ID: Q8NB50
  ENSP ID: ENSP00000423820
MSHLKTSTEDEEPTEEYENVGNAASKWPKVEDPMPESKVGDTCVWDSKVENQQKKPVENRMKEDKSSIREAISKAKSTANIKTEQEGEASEKSLHLSPQHITHQTMPIGQRGSEQGKRVENINGTSYPSLQQKTNAVKKLHKCDECGKSFKYNSRLVQHKIMHTGEKRYECDDCGGTFRSSSSLRVHKRIHTGEKPYKCEECGKAYMSYSSLINHKSTHSGEKNCKCDECGKSFNYSSVLDQHKRIHTGEKPYECGECGKAFRNSSGLRVHKRIHTGEKPYECDICGKTFSNSSGLRVHKRIHTGEKPYECDECGKAFITCRTLLNHKSIHFGDKPYKCDECEKSFNYSSLLIQHKVIHTGEKPYECDECGKAFRNSSGLIVHKRIHTGEKPYKCDVCGKAFSYSSGLAVHKSIHPGKKAHECKECGKSFSYNSLLLQHRTIHTGERPYVCDVCGKTFRNNAGLKVHRRLHTGEKPYKCDVCGKAYISRSSLKNHKGIHLGEKPYKCSYCEKSFNYSSALEQHKRIHTREKPFGCDECGKAFRNNSGLKVHKRIHTGERPYKCEECGKAYISLSSLINHKSVHPGEKPFKCDECEKAFITYRTLTNHKKVHLGEKPYKCDVCEKSFNYTSLLSQHRRVHTREKPYECDRCEKVFRNNSSLKVHKRIHTGERPYECDVCGKAYISHSSLINHKSTHPGRTPHTCDECGKAFFSSRTLISHKRVHLGEKPFKCVECGKSFSYSSLLSQHKRIHTGEKPYVCDRCGKAFRNSSGLTVHKRIHTGEKPYECDECGKAYISHSSLINHKSVHQGKQPYNCECGKSFNYRSVLDQHKRIHTGKKPYRCNECGKAFNIRSNLTKHKRTHTGEESLNVIYVGSYSGTSQKRTYEGGNALDGGRMRMPL

SEQ ID NO: 98396 - protein, 78 aa, Homo sapiens
  Payload ID: 19636
  Gene Name: ZFP62 zinc finger protein
  ENSP ID: ENSP00000424156
MPESKVGDTCVWDSKVENQQKKPVENRMKEDKSSIREAISKAKSTANIKTEQEGEASEKSLHLSPQHITHQTMPIGQR

SEQ ID NO: 98397 - protein, 867 aa, Homo sapiens
  Payload ID: 19636
  Gene Name: ZFP62 zinc finger protein
  Uniprot ID: Q8NB50
  ENSP ID: ENSP00000426193
MPESKVGDTCVWDSKVENQQKKPVENRMKEDKSSIREAISKAKSTANIKTEQEGEASEKSLHLSPQHITHQTMPIGQRGSEQGKRVENINGTSYPSLQQKTNAVKKLHKCDECGKSFKYNSRLVQHKIMHTGEKRYECDDCGGTFRSSSSLRVHKRIHTGEKPYKCEECGKAYMSYSSLINHKSTHSGEKNCKCDECGKSFNYSSVLDQHKRIHTGEKPYECGECGKAFRNSSGLRVHKRIHTGEKPYECDICGKTFSNSSGLRVHKRIHTGEKPYECDECGKAFITCRTLLNHKSIHFGDKPYKCDECEKSFNYSSLLIQHKVIHTGEKPYECDECGKAFRNSSGLIVHKRIHTGEKPYKCDVCGKAFSYSSGLAVHKSIHPGKKAHECKECGKSFSYNSLLLQHRTIHTGERPYVCDVCGKTFRNNAGLKVHRRLHTGEKPYKCDVCGKAYISRSSLKNHKGIHLGEKPYKCSYCEKSFNYSSALEQHKRIHTREKPFGCDECGKAFRNNSGLKVHKRIHTGERPYKCEECGKAYISLSSLINHKSVHPGEKPFKCDECEKAFITYRTLTNHKKVHLGEKPYKCDVCEKSFNYTSLLSQHRRVHTREKPYECDRCEKVFRNNSSLKVHKRIHTGERPYECDVCGKAYISHSSLINHKSTHPGRTPHTCDECGKAFFSSRTLISHKRVHLGEKPFKCVECGKSFSYSSLLSQHKRIHTGEKPYVCDRCGKAFRNSSGLTVHKRIHTGEKPYECDECGKAYISHSSLINHKSVHQGKQPYNCECGKSFNYRSVLDQHKRIHTGKKPYRCNECGKAFNIRSNLTKHKRTHTGEESLNVIYVGSYSGTSQKRTYEGGNALDGGRMRMPL

SEQ ID NO: 98398 - protein, 681 aa, Homo sapiens
  Payload ID: 19637
  Gene Name: ZFP64 zinc finger protein
  Uniprot ID: Q9NPA5
  ENSP ID: ENSP00000216923
MNASSEGESFAGSVQIPGGTTVLVELTPDIHICGICKQQFNNLDAFVAHKQSGCQLTGTSAAAPSTVQFVSEETVPATQTQTTTRTITSETQTITVSAPEFVFEHGYQTYLPTESNENQTATVISLPAKSRTKKPTTPPAQKRLNCCYPGCQFKTAYGMKDMERHLKIHTGDKPHKCEVCGKCFSRKDKLKTHMRCHTGVKPYKCKTCDYAAADSSSLNKHLRIHSDERPFKCQICPYASRNSSQLTVHLRSHTGDAPFQCWLCSAKFKISSDLKRHMRVHSGEKPFKCEFCNVRCTMKGNLKSHIRIKHSGNNFKCPHCDFLGDSKATLRKHSRVHQSEHPEKCSECSYSCSSKAALRIHERIHCTDRPFKCNYCSFDTKQPSNLSKHMKKFHGDMVKTEALERKDTGRQSSRQVAKLDAKKSFHCDICDASFMREDSLRSHKRQHSEYSESKNSDVTVLQFQIDPSKQPATPLTVGHLQVPLQPSQVPQFSEGRVKIIVGHQVPQANTIVQAAAAAVNIVPPALVAQNPEELPGNSRLQILRQVSLIAPPQSSRCPSEAGAMTQPAVLLTTHEQTDGATLHQTLIPTASGGPQEGSGNQTFITSSGITCTDFEGLNALIQEGTAEVTVVSDGGQNIAVATTAPPVFSSSSQQELPKQTYSIIQGAAHPALLCPADSIPD

SEQ ID NO: 98399 - protein, 627 aa, Homo sapiens
  Payload ID: 19637
  Gene Name: ZFP64 zinc finger protein
  Uniprot ID: Q9NPA5
  ENSP ID: ENSP00000344615
MNASSEGESFAGSVQIPGGTTVLVELTPDIHICGICKQQFNNLDAFVAHKQSGCQLTGTSAAAPSTVQFVSEETVPATQTQTTTRTITSETQTITGCQFKTAYGMKDMERHLKIHTGDKPHKCEVCGKCFSRKDKLKTHMRCHTGVKPYKCKTCDYAAADSSSLNKHLRIHSDERPFKCQICPYASRNSSQLTVHLRSHTGDAPFQCWLCSAKFKISSDLKRHMRVHSGEKPFKCEFCNVRCTMKGNLKSHIRIKHSGNNFKCPHCDFLGDSKATLRKHSRVHQSEHPEKCSECSYSCSSKAALRIHERIHCTDRPFKCNYCSFDTKQPSNLSKHMKKFHGDMVKTEALERKDTGRQSSRQVAKLDAKKSFHCDICDASFMREDSLRSHKRQHSEYSESKNSDVTVLQFQIDPSKQPATPLTVGHLQVPLQPSQVPQFSEGRVKIIVGHQVPQANTIVQAAAAAVNIVPPALVAQNPEELPGNSRLQILRQVSLIAPPQSSRCPSEAGAMTQPAVLLTTHEQTDGATLHQTLIPTASGGPQEGSGNQTFITSSGITCTDFEGLNALIQEGTAEVTVVSDGGQNIAVATTAPPVFSSSSQQELPKQTYSIIQGAAHPALLCPADSIPD

SEQ ID NO: 98400 - protein, 645 aa, Homo sapiens
  Payload ID: 19637
  Gene Name: ZFP64 zinc finger protein
  Uniprot ID: Q9NTW7
  ENSP ID: ENSP00000355179
MNASSEGESFAGSVQIPGGTTVLVELTPDIHICGICKQQFNNLDAFVAHKQSGCQLTGTSAAAPSTVQFVSEETVPATQTQTTTRTITSETQTITVSAPEFVFEHGYQTYLPTESNENQTATVISLPAKSRTKKPTTPPAQKRLNCCYPGCQFKTAYGMKDMERHLKIHTGDKPHKCEVCGKCFSRKDKLKTHMRCHTGVKPYKCKTCDYAAADSSSLNKHLRIHSDERPFKCQICPYASRNSSQLTVHLRSHTASELDDDVPKANCLSTESTDTPKAPVITLPSEAREQMATLGERTFNCCYPGCHFKTVHGMKDLDRHLRIHTGDKPHKCEFCDKCFSRKDNLTMHMRCHTSVKPHKCHLCDYAAVDSSSLKKHLRIHSDERPYKCQLCPYASRNSSQLTVHLRSHTGDTPFQCWLCSAKFKISSDLKRHMIVHSGEKPFKCEFCDVRCTMKANLKSHIRIKHTFKCLHCAFQGRDRADLLEHSRLHQADHPEKCPECSYSCSSAAALRVHSRVHCKDRPFKCDFCSFDTKRPSSLAKHVDKVHRDEAKTENRAPLGKEGLREGSSQHVAKIVTQRAFRCETCGASFVRDDSLRCHKKQHSDQSENKNSDLVTFPPESGASGQLSTLVSVGQLEAPLEPSQDL

SEQ ID NO: 98401 - protein, 679 aa, Homo sapiens
  Payload ID: 19637
  Gene Name: ZFP64 zinc finger protein
  Uniprot ID: Q9NTW7
  ENSP ID: ENSP00000360570
MNASSEGESFAGSVQSGTTVLVELTPDIHICGICKQQFNNLDAFVAHKQSGCQLTGTSAAAPSTVQFVSEETVPATQTQTTTRTITSETQTITVSAPEFVFEHGYQTYLPTESNENQTATVISLPAKSRTKKPTTPPAQKRLNCCYPGCQFKTAYGMKDMERHLKIHTGDKPHKCEVCGKCFSRKDKLKTHMRCHTGVKPYKCKTCDYAAADSSSLNKHLRIHSDERPFKCQICPYASRNSSQLTVHLRSHTGDAPFQCWLCSAKFKISSDLKRHMRVHSGEKPFKCEFCNVRCTMKGNLKSHIRIKHSGNNFKCPHCDFLGDSKATLRKHSRVHQSEHPEKCSECSYSCSSKAALRIHERIHCTDRPFKCNYCSFDTKQPSNLSKHMKKFHGDMVKTEALERKDTGRQSSRQVAKLDAKKSFHCDICDASFMREDSLRSHKRQHSEYSESKNSDVTVLQFQIDPSKQPATPLTVGHLQVPLQPSQVPQFSEGRVKIIVGHQVPQANTIVQAAAAAVNIVPPALVAQNPEELPGNSRLQILRQVSLIAPPQSSRCPSEAGAMTQPAVLLTTHEQTDGATLHQTLIPTASGGPQEGSGNQTFITSSGITCTDFEGLNALIQEGTAEVTVVSDGGQNIAVATTAPPVFSSSSQQELPKQTYSIIQGAAHPALLCPADSIPD

SEQ ID NO: 98402 - protein, 415 aa, Homo sapiens
  Payload ID: 19637
  Gene Name: ZFP64 zinc finger protein
  Uniprot ID: Q9NTW7
  ENSP ID: ENSP00000360573
MNASSEGESFAGSVQIPGGTTVLVELTPDIHICGICKQQFNNLDAFVAHKQSGCQLTGTSAAAPSTVQFVSEETVPATQTQTTTRTITSETQTITVSAPEFVFEHGYQTYLPTESNENQTATVISLPAKSRTKKPTTPPAQKRLNCCYPGCQFKTAYGMKDMERHLKIHTGDKPHKCEVCGKCFSRKDKLKTHMRCHTGVKPYKCKTCDYAAADSSSLNKHLRIHSDERPFKCQICPYASRNSSQLTVHLRSHTASELDDDVPKANCLSTESTDTPKAPVITLPSEAREQMATLGERTFNCCYPGCHFKTVHGMKDLDRHLRIHTGDKPHKCEFCDKCFSRKDNLTMHMRCHTSVKPHKCHLCDYAAVDSSSLKKHLRIHSDERPYKCQLCPYASRNSSQLTVHLRSHTGCCYVA

SEQ ID NO: 98403 - protein, 426 aa, Homo sapiens
  Payload ID: 19637
  Gene Name: ZFP64 zinc finger protein
  Uniprot ID: Q9NTW7
  ENSP ID: ENSP00000360578
MSRRKQAKPQHLNSEEPRPARRECAEVAPQVAGEPASELDDDVPKANCLSTESTDTPKAPVITLPSEAREQMATLGERTFNCCYPGCHFKTVHGMKDLDRHLRIHTGDKPHKCEFCDKCFSRKDNLTMHMRCHTSVKPHKCHLCDYAAVDSSSLKKHLRIHSDERPYKCQLCPYASRNSSQLTVHLRSHTGDTPFQCWLCSAKFKISSDLKRHMIVHSGEKPFKCEFCDVRCTMKANLKSHIRIKHTFKCLHCAFQGRDRADLLEHSRLHQADHPEKCPECSYSCSSAAALRVHSRVHCKDRPFKCDFCSFDTKRPSSLAKHVDKVHRDEAKTENRAPLGKEGLREGSSQHVAKIVTQRAFRCETCGASFVRDDSLRCHKKQHSDQSENKNSDLVTFPPESGASGQLSTLVSVGQLEAPLEPSQDL

SEQ ID NO: 98404 - protein, 131 aa, Homo sapiens
  Payload ID: 19637
  Gene Name: ZFP64 zinc finger protein
  ENSP ID: ENSP00000379303
MRGHPSLRPPWHWASAARLEGGFLPWGYVSNALSREGLTEERTFERRPEGWEGASCAASELDDDVPKANCLSTESTDTPKAPVITLPSEAREQMATLGERTFNCCYPGCHFKTVHGMKDLDRHLRIHTASC

SEQ ID NO: 98405 - protein, 221 aa, Homo sapiens
  Payload ID: 19637
  Gene Name: ZFP64 zinc finger protein
  ENSP ID: ENSP00000379312
MRGHPSLRPPWHWASAARLEGGFLPWGYVSNALSREGLTEERTFERRPEGWEGASCAASELDDDVPKANCLSTESTDTPKAPVITLPSEAREQMATLGERTFNCCYPGCHFKTVHGMKDLDRHLRIHTGDKPHKCEFCDKCFSRKDNLTMHMRCHTSVKPHKCHLCDYAAVDSSSLKKHLRIHSDERPYKCQLCPYASRNSSQLTVHLRSHTGDTPFQCWL

SEQ ID NO: 98406 - protein, 120 aa, Homo sapiens
  Payload ID: 19637
  Gene Name: ZFP64 zinc finger protein
  ENSP ID: ENSP00000403424
  MOD_RES (1)..(1): Any amino acid
XERTFNCCYPGCHFKTVHGMKDLDRHLRIHTGDKPHKCEFCDKCFSRKDNLTMHMRCHTSVKPHKCHLCDYAAVDSSSLKKHLRIHSDERPYKCQLCPYASRNSSQLTVHLRSHTGPGPG

SEQ ID NO: 98407 - protein, 526 aa, Homo sapiens
  Payload ID: 19638
  Gene Name: ZFP69 zinc finger protein
  Uniprot ID: Q49AA0
  ENSP ID: ENSP00000361790
MPQQLLITLPTEASTWVKLQHPKKAVEGAPLWEDVTKMFEGEALLSQDAEDVKTQRESLEDEVTPGLPTAESQELLTFKDISIDFTQEEWGQLAPAHQNLYREVMLENYSNLVSVGYQLSKPSVISQLEKGEEPWMAEKEGPGDPSSDLKSKIETIESTAKSTISQERLYHGIMMESFMRDDIIYSTLRKVSTYDDVLERHQETCMRDVRQAILTHKKRVQETNKFGENIIVHSNVIIEQRHHKYDTPTKRNTYKLDLINHPTSYIRTKTYECNICEKIFKQPIHLTEHMRIHTGEKPFRCKECGRAFSQSASLSTHQRIHTGEKPFECEECGKAFRHRSSLNQHHRTHTGEKPYVCDKCQKAFSQNISLVQHLRTHSGEKPFTCNECGKTFRQIRHLSEHIRIHTGEKPYACTACCKTFSHRAYLTHHQRIHTGERPYKCKECGKAFRQRIHLSNHKTVHTGVKAYECNRCGKAYRHDSSFKKHQRHHTGEKPYECNECGKAFSYNSSLSRHHEIHRRNAFRNKV

SEQ ID NO: 98408 - protein, 526 aa, Homo sapiens; identical to SEQ ID NO: 98407
  Payload ID: 19638
  Gene Name: ZFP69 zinc finger protein
  Uniprot ID: Q49AA0
  ENSP ID: ENSP00000361791

SEQ ID NO: 98409 - protein, 534 aa, Homo sapiens
  Payload ID: 19639
  Gene Name: ZFP69 zinc finger protein B
  Uniprot ID: Q9UJL9
  ENSP ID: ENSP00000354547
MLQQLLITLPTEASTWVKLRHPKAATERVALWEDVTKMFKAEALLSQDADETQGESLESRVTLGSLTAESQELLTFKDVSVDFTQEEWGQLAPAHRNLYREVMLENYGNLVSVGCQLSKPGVISQLEKGEEPWLMERDISGVPSSDLKSKTKTKESALQNDISWEELHCGLMMERFTKGSSMYSTLGRISKCNKLESQQENQRMGKGQIPLMCKKTFTQERGQESNRFEKRINVKSEVMPGPIGLPRKRDRKYDTPGKRSRYNIDLVNHSRSYTKMKTFECNICEKIFKQLIHLTEHMRIHTGEKPFRCKECGKAFSQSSSLIPHQRIHTGEKPYECKECGKTFRHPSSLTQHVRIHTGEKPYECRVCEKAFSQSIGLIQHLRTHVREKPFTCKDCGKAFFQIRHLRQHEIIHTGVKPYICNVCSKTFSHSTYLTQHQRTHTGERPYKCKECGKAFSQRIHLSIHQRVHTGVKPYECSHCGKAFRHDSSFAKHQRIHTGEKPYDCNECGKAFSCSSSLIRHCKTHLRNTFSNVV

SEQ ID NO: 98410 - protein, 534 aa, Homo sapiens; identical to SEQ ID NO: 98409
  Payload ID: 19639
  Gene Name: ZFP69 zinc finger protein B
  Uniprot ID: Q9UJL9
  ENSP ID: ENSP00000399664

SEQ ID NO: 98411 - protein, 131 aa, Homo sapiens
  Payload ID: 19639
  Gene Name: ZFP69 zinc finger protein B
  ENSP ID: ENSP00000435907
MLQQLLITLPTEASTWVKLRHPKAATERVALWEDVTKMFKAEGTVNLQGRICGLHSGGVGAAGPCSPESVPGGDAGELWEPGLSGMSAFQTWRDFPVGERRRTMADGERYFRSSKFRLEEQNKNQRVSLTE

SEQ ID NO: 98412 - protein, 532 aa, Homo sapiens
  Payload ID: 19640
  Gene Name: ZFP82 zinc finger protein
  Uniprot ID: Q8N141
  ENSP ID: ENSP00000431265
MALRSVMFSDVSIDFSPEEWEYLDLEQKDLYRDVMLENYSNLVSLGCFISKPDVISSLEQGKEPWKVVRKGRRQYPDLETKYETKKLSLENDIYEINLSQWKIMERIENHGLKGLILKNDWESTGKIEGQERPQEGYFSSVKMPSEKVSSYQKRTSVTPHQRLHFVDKPYECKECGKAFRVRQQLTFHHRIHTGEKPYECKECGMAFRQTAHLTRHQRLHSGEKLYECKECGEAFICGADLRVHQKMHIGEKPYECKECGKAFRVRGQLTLHQRIHTGEKPYVCKECGKAFRQYAHLTRHQKLNSADRLYECKECGKAFLCGSGLRVHHKLHTGEKPYECKECGKAFRVRQQLTLHQRIHTGEKPYECKECGKTFSRGYHLILHHRIHTGEKPYECKECWKAFSRYSQLISHQSIHIGVKPYDCKECGKAFRLLSQLTQHQSIHIGEKPYKCKECGKAFRLRQKLTLHQSIHTGEKPFECKECRKAFRLNSSLIQHLRIHSGEKPYECKECKKAFRQHSHLTHHLKIHNVKI

SEQ ID NO: 98413 - protein, 49 aa, Homo sapiens
  Payload ID: 19640
  Gene Name: ZFP82 zinc finger protein
  ENSP ID: ENSP00000468212
  MOD_RES (1)..(1): Any amino acid
XEPWKVVRKGRRQYPDAAITKRTSKMKMSALWQMYDYWYGEESNSHHAL

SEQ ID NO: 98414 - protein, 636 aa, Homo sapiens
  Payload ID: 19641
  Gene Name: ZFP90 zinc finger protein
  Uniprot ID: Q8TF47
  ENSP ID: ENSP00000381304
MAPRPPTAAPQESVTFKDVSVDFTQEEWYHVDPAQRSLYRDVMLENYSHLVSLGYQVSKPEVIFKLEQGEEPWISEGEIQRPFYPDWKTRPEVKSSHLQQDVSEVSHCTHDLLHATLEDSWDVSSQLDRQQENWKRHLGSEASTQKKIITPQENFEQNKFGENSRLNTNLVTQLNIPARIRPSECETLGSNLGHNADLLNENNILAKKKPYKCDKCRKAFIHRSSLTKHEKTHKGEGAFPNGTDQGIYPGKKHHECTDCGKTFLWKTQLTEHQRIHTGEKPFECNVCGKAFRHSSSLGQHENAHTGEKPYQCSLCGKAFQRSSSLVQHQRIHTGEKPYRCNLCGRSFRHGTSLTQHEVTHSGEKPFQCKECGKAFSRCSSLVQHERTHTGEKPFECSICGRAFGQSPSLYKHMRIHKRGKPYQSSNYSIDFKHSTSLTQDESTLTEVKSYHCNDCGEDFSHITDFTDHQRIHTAENPYDCEQAFSQQAISHPGEKPYQCNVCGKAFKRSTSFIEHHRIHTGEKPYECNECGEAFSRRSSLTQHERTHTGEKPYECIDCGKAFSQSSSLIQHERTHTGEKPYECNECGRAFRKKTNLHDHQRIHTGEKPYSCKECGKNFSRSSALTKHQRIHTRNKL

SEQ ID NO: 98415 - protein, 60 aa, Homo sapiens
  Payload ID: 19641
  Gene Name: ZFP90 zinc finger protein
  ENSP ID: ENSP00000454391
MAPRPPTAAPQESVTFKDVSVDFTQEEWYHVDPAQRSLYRDVMLENYSHLVSLEFLRIKD

SEQ ID NO: 98416 - protein, 636 aa, Homo sapiens; identical to SEQ ID NO: 98414
  Payload ID: 19641
  Gene Name: ZFP90 zinc finger protein
  Uniprot ID: Q8TF47
  ENSP ID: ENSP00000454418

SEQ ID NO: 98417 - protein, 60 aa, Homo sapiens; identical to SEQ ID NO: 98415
  Payload ID: 19641
  Gene Name: ZFP90 zinc finger protein
  ENSP ID: ENSP00000457129

SEQ ID NO: 98418 - protein, 103 aa, Homo sapiens
  Payload ID: 19641
  Gene Name: ZFP90 zinc finger protein
  ENSP ID: ENSP00000458051
MAPRPPTAAPQESVTFKDVSVDFTQEEWYHVDPAQRSLYRDVMLENYSHLVSLGYQVSKPEVIFKLEQGEEPWISEGEIQRPFYPDWKTRPEVKSSHLQQDVS

SEQ ID NO: 98419 - protein, 60 aa, Homo sapiens; identical to SEQ ID NO: 98415
  Payload ID: 19641
  Gene Name: ZFP90 zinc finger protein
  ENSP ID: ENSP00000458276

SEQ ID NO: 98420 - protein, 33 aa, Homo sapiens
  Payload ID: 19641
  Gene Name: ZFP90 zinc finger protein
  ENSP ID: ENSP00000458323
MAPRPPTAAPQEEWYHVDPAQRSLYRDVMLENY

SEQ ID NO: 98421 - protein, 102 aa, Homo sapiens
  Payload ID: 19641
  Gene Name: ZFP90 zinc finger protein
  ENSP ID: ENSP00000458410
ESVTFKDVSVDFTQEEWYHVDPAQRSLYRDVMLENYSHLVSLGYQVSKPEVIFKLEQGEEPWISEGEIQRPFYPGFVCLLPLSLPSGSKGERRQKLPRKNPE

SEQ ID NO: 98422 - protein, 45 aa, Homo sapiens
  Payload ID: 19641
  Gene Name: ZFP90 zinc finger protein
  ENSP ID: ENSP00000458920
MAPRPPTAAPQESVTFKDVSVDFTQEEWYHVDPAQRSLYRDVMLE

SEQ ID NO: 98423 - protein, 52 aa, Homo sapiens
  Payload ID: 19641
  Gene Name: ZFP90 zinc finger protein
  ENSP ID: ENSP00000459846
GPEASDRRAPGGTYLLGPGTEPTLKCSLPLPIFCALSACSTSPYCVLSHIVL

SEQ ID NO: 98424 - protein, 103 aa, Homo sapiens; identical to SEQ ID NO: 98418
  Payload ID: 19641
  Gene Name: ZFP90 zinc finger protein
  ENSP ID: ENSP00000459944

SEQ ID NO: 98425 - protein, 636 aa, Homo sapiens; identical to SEQ ID NO: 98414
  Payload ID: 19641
  Gene Name: ZFP90 zinc finger protein
  Uniprot ID: Q8TF47
  ENSP ID: ENSP00000460547

SEQ ID NO: 98426 - protein, 47 aa, Homo sapiens
  Payload ID: 19641
  Gene Name: ZFP90 zinc finger protein
  ENSP ID: ENSP00000460560
MAPRPPTAAPQESVTFKDVSVDFTQEEWYHVDPAQRSLYRDVMLENY

SEQ ID NO: 98427 - protein, 60 aa, Homo sapiens; identical to SEQ ID NO: 98415
  Payload ID: 19641
  Gene Name: ZFP90 zinc finger protein
  ENSP ID: ENSP00000460982

SEQ ID NO: 98428 - protein, 93 aa, Homo sapiens
  Payload ID: 19641
  Gene Name: ZFP90 zinc finger protein
  ENSP ID: ENSP00000463193
MAPRPPTAAPQESVTFKDVSVDFTQEEWYHVDPAQRSLYRDVMLENYSHLVSLGYQVSKPEVIFKLEQGEEPWISEGEIQRPFYPAVYFNRKE

SEQ ID NO: 98429 - protein, 113 aa, Homo sapiens
  Payload ID: 19641
  Gene Name: ZFP90 zinc finger protein
  Uniprot ID: Q8TF47
  ENSP ID: ENSP00000480309
MAPRPPTAAPQESVTFKDVSVDFTQEEWYHVDPAQRSLYRDVMLENYSHLVSLGYQVSKPEVIFKLEQGEEPWISEGEIQRPFYPGFVCLLPLSLPSGSKGERRQKLPRKNPE

SEQ ID NO: 98430 - protein, 570 aa, Homo sapiens
  Payload ID: 19642
  Gene Name: ZFP91 zinc finger protein
  Uniprot ID: Q96JP5
  ENSP ID: ENSP00000339030
MPGETEEPRPPEQQDQEGGEAAKAAPEEPQQRPPEAVAAAPAGTTSSRVLRGGRDRGRAAAAAAAAAVSRRRKAEYPRRRRSSPSARPPDVPGQQPQAAKSPSPVQGKKSPRLLCIEKVTTDKDPKEEKEEEDDSALPQEVSIAASRPSRGWRSSRTSVSRHRDTENTRSSRSKTGSLQLICKSEPNTDQLDYDVGEEHQSPGGISSEEEEEEEEEMLISEEEIPFKDDPRDETYKPHLERETPKPRRKSGKVKEEKEKKEIKVEVEVEVKEEENEIREDEEPPRKRGRRRKDDKSPRLPKRRKKPPIQYVRCEMEGCGTVLAHPRYLQHHIKYQHLLKKKYVCPHPSCGRLFRLQKQLLRHAKHHTDQRDYICEYCARAFKSSHNLAVHRMIHTGEKPLQCEICGFTCRQKASLNWHMKKHDADSFYQFSCNICGKKFEKKDSVVAHKAKSHPEVLIAEALAANAGALITSTDILGTNPESLTQPSDGQGLPLLPEPLGNSTSGECLLLEAEGMSKSYCSGTERVSLMADGKIFVGSGSSGGTEGLVMNSDILGATTEVLIEDSDSAGP

SEQ ID NO: 98431 - protein, 529 aa, Homo sapiens
  Payload ID: 19643
  Gene Name: ZFP91-CNTF readthrough (NMD candidate)
  ENSP ID: ENSP00000455911
MPGETEEPRPPEQQDQEGGEAAKAAPEEPQQRPPEAVAAAPAGTTSSRVLRGGRDRGRAAAAAAAAAVSRRRKAEYPRRRRSSPSARPPDVPGQQPQAAKSPSPVQGKKSPRLLCIEKVTTDKDPKEEKEEEDDSALPQEVSIAASRPSRGWRSSRTSVSRHRDTENTRSSRSKTGSLQLICKSEPNTDQLDYDVGEEHQSPGGISSEEEEEEEEEMLISEEEIPFKDDPRDETYKPHLERETPKPRRKSGKVKEEKEKKEIKVEVEVEVKEEENEIREDEEPPRKRGRRRKDDKSPRLPKRRKKPPIQYVRCEMEGCGTVLAHPRYLQHHIKYQHLLKKKYVCPHPSCGRLFRLQKQLLRHAKHHTDQRDYICEYCARAFKSSHNLAVHRMIHTGEKPLQCEICGFTCRQKASLNWHMKKHDADSFYQFSCNICGKKFEKKDSVVAHKAKSHPEVLIAEALAANAGALITSTDILGTNPESLTQPSDGQGLPLLPEPLGNSTSGECLLLEAEGMSKSYCSGTERSIHR

SEQ ID NO: 98432 - protein, 354 aa, Homo sapiens
  Payload ID: 19643
  Gene Name: ZFP91-CNTF readthrough (NMD candidate)
  ENSP ID: ENSP00000457288
KTGSLQLICKSEPNTDQLDYDVGEEHQSPGGISSEEEEEEEEEMLISEEEIPFKDDPRDETYKPHLERETPKPRRKSGKVKEEKEKKEIKVEVEVEVKEEENEIREDEEPPRKRGRRRKDDKSPRLPKRRKKPPIQYVRCEMEGCGTVLAHPRYLQHHIKYQHLLKKKYVCPHPSCGRLFRLQKQLLRHAKHHTDQRDYICEYCARAFKSSHNLAVHRMIHTGEKPLQCEICGFTCRQKASLNWHMKKHDADSFYQFSCNICGKKFEKKDSVVAHKAKSHPEVLIAEALAANAGALITSTDILGTNPESLTQPSDGQGLPLLPEPLGNSTSGECLLLEAEGMSKSYCSGTERLS

SEQ ID NO: 98433 - protein, 416 aa, Homo sapiens
  Payload ID: 19644
  Gene Name: ZFP92 zinc finger protein
  Uniprot ID: A6NM28
  ENSP ID: ENSP00000462054
MAAILLTTRPKVPVSFEDVSVYFTKTEWKLLDLRQKVLYKRVMLENYSHLVSLGFSFSKPHLISQLERGEGPWVADIPRTWATAGLHIGDRTQSKTSTSTQKHSGRQLPGADPQGGKEGQAARSSVLQRGAQGLGQSSAAGPQGPKGAEKRYLCQQCGKAFSRSSNLIKHRIIHSGEKPYACPECGKLFRRSFALLEHQRIHSGEKPYACPECSKTFTRSSNLIKHQVIHSGERPFACGDCGKLFRRSFALLEHARVHSGERPYACPECGKAFSRSSNLIEHQRTHRGEKPYACGQCAKAFKGVSQLIHHQRSHSGERPFACRECGKAFRGRSGLSQHRRVHSGEKPYECSDCGKAFGRRANLFKHQAVHGARRPAKAETARRLAGPGSTGPGSAVAATSPPRPSTAARPSRPSRR

SEQ ID NO: 98434 - protein, 292 aa, Homo sapiens
  Payload ID: 19645
  Gene Name: ZHX1-C8orf76 readthrough
  Uniprot ID: Q96EF9
  ENSP ID: ENSP00000349593
MLRKLWQWFYEETESSDDVEVLTLKKFKGDLAYRRQEYQKALQEYSSISEKLSSTNFAMKRDVQEGQARCLAHLGRHMEALEIAANLENKATNTDHLTTVLYLQLAICSSLQNLEKTIFCLQKLISLHPFNPWNWGKLAEAYLNLGPALSAALASSQKQHSFTSSDKTIKSFFPHSGKDCLLCFPETLPESSLFSVEANSSNSQKNEKALTNIQNCMAEKRETVLIETQLKACASFIRTRLLLQFTQPQQTSFALERNLRTQQEIEDKMKGFSFKEDTLLLIAEVSVSLGFM

SEQ ID NO: 98435 - protein, 140 aa, Homo sapiens
  Payload ID: 19645
  Gene Name: ZHX1-C8orf76 readthrough
  Uniprot ID: Q96EF9
  ENSP ID: ENSP00000481928
MLRKLWQWFYEETESSDDVEVLTLKKFKGDLAYRRQEYQKALQEYSSISEKLSSTNFAMKRDVQEGQARCLAHLGRHMEALEIAANLENKATNTDHLTTVLYLQLAICSSLQNLEKTIFCLQKLISLHPFNPWNWGKLAE

SEQ ID NO: 98436 - protein, 447 aa, Homo sapiens
  Payload ID: 19646
  Gene Name: Zic family member 1
  Uniprot ID: Q15915
  ENSP ID: ENSP00000282928
MLLDAGPQYPAIGVTTFGASRHHSAGDVAERDVGLGINPFADGMGAFKLNPSSHELASAGQTAFTSQAPGYAAAAALGHHHHPGHVGSYSSAAFNSTRDFLFRNRGFGDAAAAASAQHSLFAASAGGFGGPHGHTDAAGHLLFPGLHEQAAGHASPNVVNGQMRLGFSGDMYPRPEQYGQVTSPRSEHYAAPQLHGYGPMNVNMAAHHGAGAFFRYMRQPIKQELICKWIEPEQLANPKKSCNKTFSTMHELVTHVTVEHVGGPEQSNHICFWEECPREGKPFKAKYKLVNHIRVHTGEKPFPCPFPGCGKVFARSENLKIHKRTHTGEKPFKCEFEGCDRRFANSSDRKKHMHVHTSDKPYLCKMCDKSYTHPSSLRKHMKVHESSSQGSQPSPAASSGYESSTPPTIVSPSTDNPTTSSLSPSSSAVHHTAGHSALSSNFNEWYV

SEQ ID NO: 98437 - protein, 136 aa, Homo sapiens
  Payload ID: 19646
  Gene Name: Zic family member 1
  ENSP ID: ENSP00000419664
  MOD_RES (1)..(1): Any amino acid
XPFGADSRLQSQAPDSGEKPFKCEFEGCDRRFANSSDRKKHMHVHTSDKPYLCKMCDKSYTHPSSLRKHMKVHESSSQGSQPSPAASSGYESSTPPTIVSPSTDNPTTSSLSPSSSAVHHTAGHSALSSNFNEWYV

SEQ ID NO: 98438 - protein, 532 aa, Homo sapiens
  Payload ID: 19647
  Gene Name: Zic family member 2
  Uniprot ID: O95409
  ENSP ID: ENSP00000365514
MLLDAGPQFPAIGVGSFARHHHHSAAAAAAAAAEMQDRELSLAAAQNGFVDSAAAHMGAFKLNPGAHELSPGQSSAFTSQGPGAYPGSAAAAAAAAALGPHAAHVGSYSGPPFNSTRDFLFRSRGFGDSAPGGGQHGLFGPGAGGLHHAHSDAQGHLLFPGLPEQHGPHGSQNVLNGQMRLGLPGEVFGRSEQYRQVASPRTDPYSAAQLHNQYGPMNMNMGMNMAAAAAHHHHHHHHHPGAFFRYMRQQCIKQELICKWIDPEQLSNPKKSCNKTFSTMHELVTHVSVEHVGGPEQSNHVCFWEECPREGKPFKAKYKLVNHIRVHTGEKPFPCPFPGCGKVFARSENLKIHKRTHTGEKPFQCEFEGCDRRFANSSDRKKHMHVHTSDKPYLCKMCDKSYTHPSSLRKHMKVHESSPQGSESSPAASSGYESSTPPGLVSPSAEPQSSSNLSPAAAAAAAAAAAAAAAVSAVHRGGGSGSGGAGGGSGGGSGSGGGGGGAGGGGGGSSGGGSGTAGGHSGLSSNFNEWYV

SEQ ID NO: 98439 - protein, 531 aa, Homo sapiens
  Payload ID: 19647
  Gene Name: Zic family member 2
  ENSP ID: ENSP00000481510
MLLDAGPQFPAIGVGSFARHHHHSAAAAAAAAAEMQDRELSLAAAQNGFVDSAAAHMGAFKLNPGAHELSPGQSSAFTSQGPGAYPGSAAAAAAAAALGPHAAHVGSYSGPPFNSTRDFLFRSAASGTAPGGGQHGLFGPGAGGLHHAHSDAQGHLLFPGLPEQHGPHGSQNVLNGQMRLGLPGEVFGRSEQYRQVASPRTDPYSAAQLHNQYGPMNMNMGMNMAAAAAHHHHHHHHHPGAFFRYMRQQCIKQELICKWIDPEQLSNPKKSCNKTFSTMHELVTHVSVEHVGGPEQSNHVCFWEECPREGKPFKAKYKLVNHIRVHTGEKPFPCPFPGCGKVFARSENLKIHKRTHTGEKPFQCEFEGCDRRFANSSDRKKHMHVHTSDKPYLCKMCDKSYTHPSSLRKHMKVHESSPQGSESSPAASSGYESSTPPGLVSPSAEPQSSSNLSPAAAAAAAAAAAAAAAVSAVHRGGGSGSGGAGGGSGGGSGSGGGGGGAGGGGGGSSGGGSGTAGGHSGLSSNFNEWYV

SEQ ID NO: 98440 - protein, 467 aa, Homo sapiens
  Payload ID: 19648
  Gene Name: Zic family member 3
  Uniprot ID: O60481
  ENSP ID: ENSP00000287538
MTMLLDGGPQFPGLGVGSFGAPRHHEMPNREPAGMGLNPFGDSTHAAAAAAAAAAFKLSPAAAHDLSSGQSSAFTPQGSGYANALGHHHHHHHHHHHTSQVPSYGGAASAAFNSTREFLFRQRSSGLSEAASGGGQHGLFAGSASSLHAPAGIPEPPSYLLFPGLHEQGAGHPSPTGHVDNNQVHLGLRGELFGRADPYRPVASPRTDPYAAGAQFPNYSPMNMNMGVNVAAHHGPGAFFRYMRQPIKQELSCKWIDEAQLSRPKKSCDRTFSTMHELVTHVTMEHVGGPEQNNHVCYWEECPREGKSFKAKYKLVNHIRVHTGEKPFPCPFPGCGKIFARSENLKIHKRTHTGEKPFKCEFEGCDRRFANSSDRKKHMHVHTSDKPYICKVCDKSYTHPSSLRKHMKVHESQGSDSSPAASSGYESSTPPAIASANSKDTTKTPSAVQTSTSHNPGLPPNFNEWYV

SEQ ID NO: 98441 - protein, 457 aa, Homo sapiens
  Payload ID: 19648
  Gene Name: Zic family member 3
  Uniprot ID: O60481
  ENSP ID: ENSP00000359638
MTMLLDGGPQFPGLGVGSFGAPRHHEMPNREPAGMGLNPFGDSTHAAAAAAAAAAFKLSPAAAHDLSSGQSSAFTPQGSGYANALGHHHHHHHHHHHTSQVPSYGGAASAAFNSTREFLFRQRSSGLSEAASGGGQHGLFAGSASSLHAPAGIPEPPSYLLFPGLHEQGAGHPSPTGHVDNNQVHLGLRGELFGRADPYRPVASPRTDPYAAGAQFPNYSPMNMNMGVNVAAHHGPGAFFRYMRQPIKQELSCKWIDEAQLSRPKKSCDRTFSTMHELVTHVTMEHVGGPEQNNHVCYWEECPREGKSFKAKYKLVNHIRVHTGEKPFPCPFPGCGKIFARSENLKIHKRTHTGEKPFKCEFEGCDRRFANSSDRKKHMHVHTSDKPYICKVCDKSYTHPSSLRKHMKCCPAWYPGQSLIPDEELDTDVGMQQPALHNTTYPKCRVNAEPTVQEMIY

SEQ ID NO: 98442 - protein, 334 aa, Homo sapiens
  Payload ID: 19649
  Gene Name: Zic family member 4
  Uniprot ID: Q8N9L1
  ENSP ID: ENSP00000372553
MRYKTSLVMRKRLRLYRNTLKESSSSSGHHGPQLTAASSPSVFPGLHEEPPQASPSRPLNGLLRLGLPGDMYARPEPFPPGPAARSDALAAAAALHGYGGMNLTVNLAAPHGPGAFFRYMRQPIKQELICKWLAADGTATPSLCSKTFSTMHELVTHVTVEHVGGPEQANHICFWEECPRQGKPFKAKYKLVNHIRVHTGEKPFPCPFPGCGKVFARSENLKIHKRTHTGEKPFRCEFEGCERRFANSSDRKKHSHVHTSDKPYTCKVRGCDKCYTHPSSLRKHMKVHGRSPPPSSGYDSATPSALVSPSSDCGHKSQVASSAAVAARTADLSE

SEQ ID NO: 98443 - protein, 372 aa, Homo sapiens
  Payload ID: 19649
  Gene Name: Zic family member 4
  Uniprot ID: Q8N9L1
  ENSP ID: ENSP00000397695
MNGPCQSLRKAEGLLEGCTSAVTVFRKLPLDSKAQSQKMRYKTSLVMRKRLRLYRNTLKESSSSSGHHGPQLTAASSPSVFPGLHEEPPQASPSRPLNGLLRLGLPGDMYARPEPFPPGPAARSDALAAAAALHGYGGMNLTVNLAAPHGPGAFFRYMRQPIKQELICKWLAADGTATPSLCSKTFSTMHELVTHVTVEHVGGPEQANHICFWEECPRQGKPFKAKYKLVNHIRVHTGEKPFPCPFPGCGKVFARSENLKIHKRTHTGEKPFRCEFEGCERRFANSSDRKKHSHVHTSDKPYTCKVRGCDKCYTHPSSLRKHMKVHGRSPPPSSGYDSATPSALVSPSSDCGHKSQVASSAAVAARTADLSE

SEQ ID NO: 98444 - protein, 334 aa, Homo sapiens; identical to SEQ ID NO: 98442
  Payload ID: 19649
  Gene Name: Zic family member 4
  Uniprot ID: Q8N9L1
  ENSP ID: ENSP00000417855

SEQ ID NO: 98445 - protein, 128 aa, Homo sapiens
  Payload ID: 19649
  Gene Name: Zic family member 4
  Uniprot ID: Q8N9L1
  ENSP ID: ENSP00000418277
MRYKTSLVMRKRLRLYRNTLKESSEKPFRCEFEGCERRFANSSDRKKHSHVHTSDKPYTCKVRGCDKCYTHPSSLRKHMKVHGRSPPPSSGYDSATPSALVSPSSDCGHKSQVASSAAVAARTADLSE

SEQ ID NO: 98446 - protein, 77 aa, Homo sapiens
  Payload ID: 19649
  Gene Name: Zic family member 4
  ENSP ID: ENSP00000418343
MRYKTSLVMRKRLRLYRNTLKESSSSSGHHGPQLTAASSPSVFPGLHEEPPQASPSRPLNGLLRLGLPGDMYARPEP

SEQ ID NO: 98447 - protein, 68 aa, Homo sapiens
  Payload ID: 19649
  Gene Name: Zic family member 4
  ENSP ID: ENSP00000419727
MRYKTSLVMRKRLRLYRNTLKESSSSSGHHGPQLTAASSPSVFPGLHEEPPQASPSRPLNGLLRLGLP

SEQ ID NO: 98448 - protein, 229 aa, Homo sapiens
  Payload ID: 19649
  Gene Name: Zic family member 4
  ENSP ID: ENSP00000420627
MRYKTSLVMRKRLRLYRNTLKESSSSSGHHGPQLTAASSPSVFPGLHEEPPQASPSRPLNGLLRLGLPGDMYARPEPFPPGPAARSDALAAAAALHGYGGMNLTVNLAAPHGPGAFFRYMRQPIKQELICKWLAADGTATPSLCSKTFSTMHELVTHVTVEHVGGPEQANHICFWEECPRQGKPFKAKYKLVNHIRVHTGEKPFPCPFPGCGKVFARSENLKIHKRTHT

SEQ ID NO: 98449 - protein, 334 aa, Homo sapiens; identical to SEQ ID NO: 98442
  Payload ID: 19649
  Gene Name: Zic family member 4
  Uniprot ID: Q8N9L1
  ENSP ID: ENSP00000420775

SEQ ID NO: 98450 - protein, 384 aa, Homo sapiens
  Payload ID: 19649
  Gene Name: Zic family member 4
  Uniprot ID: Q8N9L1
  ENSP ID: ENSP00000435509
MPPFCRNAKLGLLSFLICAGRSLLPLGKNAFWLERIENNNTLWEKAQSQKMRYKTSLVMRKRLRLYRNTLKESSSSSGHHGPQLTAASSPSVFPGLHEEPPQASPSRPLNGLLRLGLPGDMYARPEPFPPGPAARSDALAAAAALHGYGGMNLTVNLAAPHGPGAFFRYMRQPIKQELICKWLAADGTATPSLCSKTFSTMHELVTHVTVEHVGGPEQANHICFWEECPRQGKPFKAKYKLVNHIRVHTGEKPFPCPFPGCGKVFARSENLKIHKRTHTGEKPFRCEFEGCERRFANSSDRKKHSHVHTSDKPYTCKVRGCDKCYTHPSSLRKHMKVHGRSPPPSSGYDSATPSALVSPSSDCGHKSQVASSAAVAARTADLSE

SEQ ID NO: 98451 - protein, 663 aa, Homo sapiens
  Payload ID: 19650
  Gene Name: Zic family member 5
  Uniprot ID: Q96T25
  ENSP ID: ENSP00000267294
MFLKAGRGNKVPPVRVYGPDCVVLMEPPLSKRNPPALRLADLATAQVQPLQNMTGFPALAGPPAHSQLRAAVAHLRLRDLGADPGVATTPLGPEHMAQASTLGLSPPSQAFPAHPEAPAAAARAAALVAHPGAGSYPCGGGSSGAQPSAPPPPAPPLPPTPSPPPPPPPPPPPALSGYTTTNSGGGGSSGKGHSRDFVLRRDLSATAPAAAMHGAPLGGEQRSGTGSPQHPAPPPHSAGMFISASGTYAGPDGSGGPALFPALHDTPGAPGGHPHPLNGQMRLGLAAAAAAAAAELYGRAEPPFAPRSGDAHYGAVAAAAAAALHGYGAVNLNLNLAAAAAAAAAGPGPHLQHHAPPPAPPPPPAPAQHPHQHHPHLPGAAGAFLRYMRQPIKQELICKWIDPDELAGLPPPPPPPPPPPPPPPAGGAKPCSKTFGTMHELVNHVTVEHVGGPEQSSHVCFWEDCPREGKPFKAKYKLINHIRVHTGEKPFPCPFPGCGKVFARSENLKIHKRTHTGEKPFKCEFDGCDRKFANSSDRKKHSHVHTSDKPYYCKIRGCDKSYTHPSSLRKHMKIHCKSPPPSPGPLGYSSVGTPVGAPLSPVLDPARSHSSTLSPQVTNLNEWYVCQASGAPSHLHTPSSNGTTSETEDEEIYGNPEVVRTIH

SEQ ID NO: 98452 - protein, 412 aa, Homo sapiens
  Payload ID: 19651
  Gene Name: zinc activated ligand-gated ion channel
  Uniprot ID: Q401N2
  ENSP ID: ENSP00000334854
MMALWSLLHLTFLGFSITLLLVHGQGFQGTAAIWPSLFNVNLSKKVQESIQIPNNGSAPLLVDVRVFVSNVFNVDILRYTMSSMLLLRLSWLDTRLAWNTSAHPRHAITLPWESLWTPRLTILEALWVDWRDQSPQARVDQDGHVKLNLALATETNCNFELLHFPRDHSNCSLSFYALSNTAMELEFQAHVVNEIVSVKREYVVYDLKTQVPPQQLVPCFQVTLRLKNTALKSIIALLVPAEALLLADVCGGLLPLRAIERIGYKVTLLLSYLVLHSSLVQALPSSSSCNPLLIYYFTILLLLLFLSTIETVLLAGLLARGNLGAKSGPSPAPRGEQREHGNPGPHPAEEPSRGVKGSQRSWPETADRIFFLVYVVGVLCTQFVFAGIWMWAACKSDAAPGEAAPHGRRPRL

SEQ ID NO: 98453 - protein, 126 aa, Homo sapiens
  Payload ID: 19651
  Gene Name: zinc activated ligand-gated ion channel
  Uniprot ID: Q401N2
  ENSP ID: ENSP00000391936
MMALWSLLHLTFLGFSITLLLVHGQGFQGTAAIWPSLFNVNLSKKVQESIQIPNNGSAPLLVDVRVFVSNVFNVSSVLPRATALHSHGDCSGSAPCSKARGSGCHGLTPGNHLKVQPPCINPSGDI

SEQ ID NO: 98454 - protein, 266 aa, Homo sapiens
  Payload ID: 19651
  Gene Name: zinc activated ligand-gated ion channel
  Uniprot ID: Q401N2
  ENSP ID: ENSP00000397489
MMALWSLLHLTFLGFSITLLLVHGQGFQGTAAIWPSLFNVNLSKKVQESIQIPNNGSAPLLVDVRVFVSNVFNVDILRYTMSSMLLLRLSWLDTRLAWNTSAHPRHAITLPWESLWTPRLTILEALWVDWRDQSPQARVDQDGHVKLNLALATETNCNFELLHFPRDHSNCSLSFYALSNTGADRAGAAGLRRGGGRWGRGTPRSVVQGQGAGQGEGAKADRRRTPRSVFRAVYPRLRRAAPALPLRPPLEWQPISVLSGSLRAPL

SEQ ID NO: 98455 - protein, 278 aa, Homo sapiens
  Payload ID: 19652
  Gene Name: zinc and ring finger 1, E3 ubiquitin protein ligase
  Uniprot ID: Q8ND25
  ENSP ID: ENSP00000323362
MGGKQSTAARSRGPFPGVSTDDSAVPPPGGAPHFGHYRTGGGAMGLRSRSVSSVAGMGMDPSTAGGVPFGLYTPASRGTGDSERAPGGGGSASDSTYAHGNGYQETGGGHHRDGMLYLGSRASLADALPLHIAPRWFSSHSGFKCPICSKSVASDEMEMHFIMCLSKPRLSYNGRIQRSLRGAQPEKTWLSGRTLQEQPWRTECSWAPMAQMQSYPHCPVENREDDVLTKDAGECVICLEELLQGDTIARLPCLCIYHKSCIDSWFEVNRSCPEHPAD

SEQ ID NO: 98456 - protein, 227 aa, Homo sapiens
  Payload ID: 19652
  Gene Name: zinc and ring finger 1, E3 ubiquitin protein ligase
  Uniprot ID: Q8ND25
  ENSP ID: ENSP00000335091
MGGKQSTAARSRGPFPGVSTDDSAVPPPGGAPHFGHYRTGGGAMGLRSRSVSSVAGMGMDPSTAGGVPFGLYTPASRGTGDSERAPGGGGSASDSTYAHGNGYQETGGGHHRDGMLYLGSRASLADALPLHIAPRWFSSHSGFKCPICSKSVASDEMEMHFIMCLSKPRLSYNDDVLTKDAGECVICLEELLQGDTIARLPCLCIYHKSCIDSWFEVNRSCPEHPAD

SEQ ID NO: 98457 - protein, 227 aa, Homo sapiens; identical to SEQ ID NO: 98456
  Payload ID: 19652
  Gene Name: zinc and ring finger 1, E3 ubiquitin protein ligase
  Uniprot ID: Q8ND25
  ENSP ID: ENSP00000455601

SEQ ID NO: 98458 - protein, 209 aa, Homo sapiens
  Payload ID: 19652
  Gene Name: zinc and ring finger 1, E3 ubiquitin protein ligase
  ENSP ID: ENSP00000456168
MGGKQSTAARSRGPFPGVSTDDSAVPPPGGAPHFGHYRTGGGAMGLRSRSVSSVAGMGMDPSTAGGVPFGLYTPASRGTGDSERAPGGGGSASDSTYAHGNGYQETGGGHHRDGMLYLGSRASLADALPLHIAPRWFSSHSGFKCPICSKSVASDEMEMHFIMCLSKPRLSYNDDVLTKDAGECVICLEELLQGDTIARLPCLCIYHKR

SEQ ID NO: 98459 - protein, 78 aa, Homo sapiens
  Payload ID: 19652
  Gene Name: zinc and ring finger 1, E3 ubiquitin protein ligase
  ENSP ID: ENSP00000457606
  MOD_RES (1)..(1): Any amino acid
XDVLTKDAGECVICLEELLQGDTIARLPCLCIYHKRDRAPLLQGGGSPDPGAELSLGHQREQGTPSALTSRSWFSLPP

SEQ ID NO: 98460 - protein, 52 aa, Homo sapiens
  Payload ID: 19652
  Gene Name: zinc and ring finger 1, E3 ubiquitin protein ligase
  ENSP ID: ENSP00000462910
MEMHFIMCLSKPRLSYNDDVLTKDAGECVICLEELLQGDTIARLPCLCIYHK

SEQ ID NO: 98461 - protein, 242 aa, Homo sapiens
  Payload ID: 19653
  Gene Name: zinc and ring finger 2, E3 ubiquitin protein ligase
  Uniprot ID: Q8NHG8
  ENSP ID: ENSP00000323879
MGAKQSGPAAANGRTRAYSGSDLPSSSSGGANGTAGGGGGARAAAAGRFPAQVPSAHQPSASGGAAAAAAAPAAPAAPRSRSLGGAVGSVASGARAAQSPFSIPNSSSGPYGSQDSVHSSPEDGGGGRDRPVGGSPGGPRLVIGSLPAHLSPHMFGGFKCPVCSKFVSSDEMDLHLVMCLTKPRITYNEDVLSKDAGECAICLEELQQGDTIARLPCLCIYHKGCIDEWFEVNRSCPEHPSD

SEQ ID NO: 98462 - protein, 836 aa, Homo sapiens
  Payload ID: 19654
  Gene Name: zinc and ring finger 3
  Uniprot ID: Q9ULT6
  ENSP ID: ENSP00000384456
MHPLGLCNNNDEEDLYEYGWVGVVKLEQPELDPKPCLTVLGKAKRAVQRGATAVIFDVSENPEAIDQLNQGSEDPLKRPVVYVKGADAIKLMNIVNKQKVARARIQHRPPRQPTEYFDMGIFLAFFVVVSLVCLILLVKIKLKQRRSQNSMNRLAVQALEKMETRKFNSKSKGRREGSCGALDTLSSSSTSDCAICLEKYIDGEELRVIPCTHRFHRKCVDPWLLQHHTCPHCRHNIIEQKGNPSAVCVETSNLSRGRQQRVTLPVHYPGRVHRTNAIPAYPTRTSMDSHGNPVTLLTMDRHGEQSLYSPQTPAYIRSYPPLHLDHSLAAHRCGLEHRAYSPAHPFRRPKLSGRSFSKAACFSQYETMYQHYYFQGLSYPEQEGQSPPSLAPRGPARAFPPSGSGSLLFPTVVHVAPPSHLESGSTSSFSCYHGHRSVCSGYLADCPGSDSSSSSSSGQCHCSSSDSVVDCTEVSNQGVYGSCSTFRSSLSSDYDPFIYRSRSPCRASEAGGSGSSGRGPALCFEGSPPPEELPAVHSHGAGRGEPWPGPASPSGDQVSTCSLEMNYSSNSSLEHRGPNSSTSEVGLEASPGAAPDLRRTWKGGHELPSCACCCEPQPSPAGPSAGAAGSSTLFLGPHLYEGSGPAGGEPQSGSSQGLYGLHPDHLPRTDGVKYEGLPCCFYEEKQVARGGGGGSGCYTEDYSVSVQYTLTEEPPPGCYPGARDLSQRIPIIPEDVDCDLGLPSDCQGTHSLGSWGGTRGPDTPRPHRGLGATREEERALCCQARALLRPGCPPEEAGAVRANFPSALQDTQESSTTATEAAGPRSHSADSSSPGA

SEQ ID NO: 98463 - protein, 836 aa, Homo sapiens; identical to SEQ ID NO: 98462
  Payload ID: 19654
  Gene Name: zinc and ring finger 3
  Uniprot ID: Q9ULT6
  ENSP ID: ENSP00000384553

SEQ ID NO: 98464 - protein, 936 aa, Homo sapiens
  Payload ID: 19654
  Gene Name: zinc and ring finger 3
  Uniprot ID: Q9ULT6
  ENSP ID: ENSP00000443824
MRPRSGGRPGATGRRRRRLRRRPRGLRCSRLPPPPPLPLLLGLLLAAAGPGAARAKETAFVEVVLFESSPSGDYTTYTTGLTGRFSRAGATLSAEGEIVQMHPLGLCNNNDEEDLYEYGWVGVVKLEQPELDPKPCLTVLGKAKRAVQRGATAVIFDVSENPEAIDQLNQGSEDPLKRPVVYVKGADAIKLMNIVNKQKVARARIQHRPPRQPTEYFDMGIFLAFFVVVSLVCLILLVKIKLKQRRSQNSMNRLAVQALEKMETRKFNSKSKGRREGSCGALDTLSSSSTSDCAICLEKYIDGEELRVIPCTHRFHRKCVDPWLLQHHTCPHCRHNIIEQKGNPSAVCVETSNLSRGRQQRVTLPVHYPGRVHRTNAIPAYPTRTSMDSHGNPVTLLTMDRHGEQSLYSPQTPAYIRSYPPLHLDHSLAAHRCGLEHRAYSPAHPFRRPKLSGRSFSKAACFSQYETMYQHYYFQGLSYPEQEGQSPPSLAPRGPARAFPPSGSGSLLFPTVVHVAPPSHLESGSTSSFSCYHGHRSVCSGYLADCPGSDSSSSSSSGQCHCSSSDSVVDCTEVSNQGVYGSCSTFRSSLSSDYDPFIYRSRSPCRASEAGGSGSSGRGPALCFEGSPPPEELPAVHSHGAGRGEPWPGPASPSGDQVSTCSLEMNYSSNSSLEHRGPNSSTSEVGLEASPGAAPDLRRTWKGGHELPSCACCCEPQPSPAGPSAGAAGSSTLFLGPHLYEGSGPAGGEPQSGSSQGLYGLHPDHLPRTDGVKYEGLPCCFYEEKQVARGGGGGSGCYTEDYSVSVQYTLTEEPPPGCYPGARDLSQRIPIIPEDVDCDLGLPSDCQGTHSLGSWGGTRGPDTPRPHRGLGATREEERALCCQARALLRPGCPPEEAGAVRANFPSALQDTQESSTTATEAAGPRSHSADSSSPGA

SEQ ID NO: 98465 - protein, 429 aa, Homo sapiens
  Payload ID: 19655
  Gene Name: zinc and ring finger 4
  Uniprot ID: Q8WWF5
  ENSP ID: ENSP00000222033
MPLCRPEHLMPRASRVPVAASLPLSHAVIPTQLPSRPGHRPPGRPRRCPKASCLPPPVGPSSTQTAKRVTMGWPRPGRALVAVKALLVLSLLQVPAQAVVRAVLEDNSSSVDFADLPALFGVPLAPEGIRGYLMEVKPANACHPIEAPRLGNRSLGAIVLIRRYDCTFDLKVLNAQRAGFEAAIVHNVHSDDLVSMTHVYEDLRGQIAIPSVFVSEAASQDLRVILGCNKSAHALLLPDDPPCHDLGCHPVLTVSWVLGCTLALVVSAFFVLNHLWLWAQACCSHRRPVKTSTCQKAQVRTFTWHNDLCAICLDEYEEGDQLKILPCSHTYHCKCIDPWFSQAPRRSCPVCKQSVAATEDSFDSTTYSFRDEDPSLPGHRPPIWAIQVQLRSRRLELLGRASPHCHCSTTSLEAEYTTVSSAPPEAPGQ

SEQ ID NO: 98466 - protein, 377 aa, Homo sapiens
  Payload ID: 19656
  Gene Name: zinc binding alcohol dehydrogenase domain containing 2
  Uniprot ID: Q8N4Q0
  ENSP ID: ENSP00000323678
MLRLVPTGARAIVDMSYARHFLDFQGSAIPQAMQKLVVTRLSPNFREAVTLSRDCPVPLPGDGDLLVRNRFVGVNASDINYSAGRYDPSVKPPFDIGFEGIGEVVALGLSASARYTVGQAVAYMAPGSFAEYTVVPASIATPVPSVKPEYLTLLVSGTTAYISLKELGGLSEGKKVLVTAAAGGTGQFAMQLSKKAKCHVIGTCSSDEKSAFLKSLGCDRPINYKTEPVGTVLKQEYPEGVDVVYESVGGAMFDLAVDALATKGRLIVIGFISGYQTPTGLSPVKAGTLPAKLLKKSASVQGFFLNHYLSKYQAAMSHLLEMCVSGDLVCEVDLGDLSPEGRFTGLESIFRAVNYMYMGKNTGKIVVELPHSVNSKL

SEQ ID NO: 98467 - protein, 254 aa, Homo sapiens
  Payload ID: 19656
  Gene Name: zinc binding alcohol dehydrogenase domain containing 2
  Uniprot ID: Q8N4Q0
  ENSP ID: ENSP00000440111
MAPGSFAEYTVVPASIATPVPSVKPEYLTLLVSGTTAYISLKELGGLSEGKKVLVTAAAGGTGQFAMQLSKKAKCHVIGTCSSDEKSAFLKSLGCDRPINYKTEPVGTVLKQEYPEGVDVVYESVGGAMFDLAVDALATKGRLIVIGFISGYQTPTGLSPVKAGTLPAKLLKKSASVQGFFLNHYLSKYQAAMSHLLEMCVSGDLVCEVDLGDLSPEGRFTGLESIFRAVNYMYMGKNTGKIVVELPHSVNSKL

SEQ ID NO: 98468 - protein, 154 aa, Homo sapiens
  Payload ID: 19656
  Gene Name: zinc binding alcohol dehydrogenase domain containing 2
  ENSP ID: ENSP00000463106
MAPGSFAEYTVVPASIATPVPSVKPEYLTLLVSGTTAYISLKELGGLSEGKKVLVTAAAGGTGQFAMQLSKKAKCHVIGTCSSDEKSAFLKSLGCDRPINYKTEPVGTVLKQEYPEGVDVVYESVGGAMFDLAVDALATKGRLIVIGFISGYQT

SEQ ID NO: 98469 - protein, 101 aa, Homo sapiens
  Payload ID: 19656
  Gene Name: zinc binding alcohol dehydrogenase domain containing 2
  ENSP ID: ENSP00000463844
MAPGSFAEYTVVPASIATPVPSVKPEYLTLLVSGTTAYISLKELGGLSEGKKVLVTAAAGGTGQFAMQLSKKAKCHVIGTCSSDEKSAFLKSLGCDRPINY

SEQ ID NO: 98470 - protein, 479 aa, Homo sapiens
  Payload ID: 19657
  Gene Name: zinc finger (CCCH type), RNA-binding motif and serine/arginine rich 1
  Uniprot ID: Q15695
  ENSP ID: ENSP00000375133
MAALEKMTFPKKMTFPEKPSHKKYRAALKKEKRKKRRQELARLRDSGLSQEEEEDTFIEEQQLEEEKLLERERERLHEEWLLREQKAQEEFRIKKEKEEAAKKWLEEQERKLKEQWKEQQRKEREEEEQKQQEKKEKEEAVQKMLDQAENDLENSTTWQNPEPPVDFRVMEKDRANCPFYSKTGACRFGDRCSRKHNFPTSSPTLLIKSMFTTFGMEQCRRDDYDPDASLEYSEEETYQQFLDFYEDVLPEFKNVGKVIQFKVSCNLEPHLRGNVYVQYQSEEECQAALSLFNGRWYAGRQLQCEFCPVTRWKMAICGLFEIQQCPRGKHCNFLHVFRNPNNEFWEANRDIYLSSDQTGSSFGKNSERREKMGHHDHYYSRQRGRRNPSPDHTYKRNGESERKKSSHRGKKSHKRTSKSRERHNSPSRGRNRHRSWDQGRRSQSRRSHRSRSQSSSRCRSRGRRKSGNRDRTVQSPQSK

SEQ ID NO: 98471 - protein, 482 aa, Homo sapiens
  Payload ID: 19658
  Gene Name: zinc finger (CCCH type), RNA-binding motif and serine/arginine rich 2
  Uniprot ID: Q15696
  ENSP ID: ENSP00000303015
MAAPEKMTFPEKPSHKKYRAALKKEKRKKRRQELARLRDSGLSQKEEEEDTFIEEQQLEEEKLLERERQRLHEEWLLREQKAQEEFRIKKEKEEAAKKRQEEQERKLKEQWEEQQRKEREEEEQKRQEKKEKEEALQKMLDQAENELENGTTWQNPEPPVDFRVMEKDRANCPFYSKTGACRFGDRCSRKHNFPTSSPTLLIKSMFTTFGMEQCRRDDYDPDASLEYSEEETYQQFLDFYEDVLPEFKNVGKVIQFKVSCNLEPHLRGNVYVQYQSEEECQAALSLFNGRWYAGRQLQCEFCPVTRWKMAICGLFEIQQCPRGKHCNFLHVFRNPNNEFWEANRDIYLSPDRTGSSFGKNSERRERMGHHDDYYSRLRGRRNPSPDHSYKRNGESERKSSRHRGKKSHKRTSKSRERHNSRSRGRNRDRSRDRSRGRGSRSRSRSRSRRSRRSRSQSSSRSRSRGRRRSGNRDRTVQSPKSK

SEQ ID NO: 98472 - protein, 147 aa, Homo sapiens
  Payload ID: 19658
  Gene Name: zinc finger (CCCH type), RNA-binding motif and serine/arginine rich 2
  ENSP ID: ENSP00000369664
MAAPEKMTFPEKPSHKKYRAALKKEKRKKRRQELARLRDSGLSQKEEEEDTFIEEQQLEEEKLLERERLECSGVISAHRNLHLPGSHDSPASASRVAGITGTHRHTQLIFFCTFSRDGVSPCWPGWSRSLDLMICPPRPHKVLRLQV

SEQ ID NO: 98473 - protein, 1243 aa, Homo sapiens
  Payload ID: 19659
  Gene Name: zinc finger and AT hook domain containing
  Uniprot ID: Q9P243
  ENSP ID: ENSP00000367069
METRAAENTAIFMCKCCNLFSPNQSELLSHVSEKHMEEGVNVDEIIIPLRPLSTPEPPNSSKTGDEFLVMKRKRGRPKGSTKKSSTEEELAENIVSPTEDSPLAPEEGNSLPPSSLECSKCCRKFSNTRQLRKHICIIVLNLGEEEGEAGNESDLELEKKCKEDDREKASKRPRSQKTEKVQKISGKEARQLSGAKKPIISVVLTAHEAIPGATKIVPVEAGPPETGATNSETTSADLVPRRGYQEYAIQQTPYEQPMKSSRLGPTQLKIFTCEYCNKVFKFKHSLQAHLRIHTNEKPYKCPQCSYASAIKANLNVHLRKHTGEKFACDYCSFTCLSKGHLKVHIERVHKKIKQHCRFCKKKYSDVKNLIKHIRDAHDPQDKKVKEALDELCLMTREGKRQLLYDCHICERKFKNELDRDRHMLVHGDKWPFACELCGHGATKYQALELHVRKHPFVYVCAVCRKKFVSSIRLRTHIKEVHGAAQEALVFTSSINQSFCLLEPGGDIQQEALGDQLQLVEEEFALQGVNALKEEACPGDTQLEEGRKEPEAPGEMPAPAVHLASPQAESTALPPCELETTVVSSSDLHSQEVVSDDFLLKNDTSSAEAHAAPEKPPDMQHRSSVQTQGEVITLLLSKAQSAGSDQESHGAQSPLGEGQNMAVLSAGDPDPSRCLRSNPAEASDLLPPVAGGGDTITHQPDSCKAAPEHRSGITAFMKVLNSLQKKQMNTSLCERIRKVYGDLECEYCGKLFWYQVHFDMHVRTHTREHLYYCSQCHYSSITKNCLKRHVIQKHSNILLKCPTDGCDYSTPDKYKLQAHLKVHTALDKRSYSCPVCEKSFSEDRLIKSHIKTNHPEVSMSTISEVLGRRVQLKGLIGKRAMKCPYCDFYFMKNGSDLQRHIWAHEGVKPFKCSLCEYATRSKSNLKAHMNRHSTEKTHLCDMCGKKFKSKGTLKSHKLLHTADGKQFKCTVCDYTAAQKPQLLRHMEQHVSFKPFRCAHCHYSCNISGSLKRHYNRKHPNEEYANVGTGELAAEVLIQQGGLKCPVCSFVYGTKWEFNRHLKNKHGLKVVEIDGDPKWETATEAPEEPSTQYLHITEAEEDVQGTQAAVAALQDLRYTSESGDRLDPTAVNILQQIIELGAETHDATALASVVAMAPGTVTVVKQVTEEEPSSNHTVMIQETVQQASVELAEQHHLVVSSDDVEGIETVTVYTQGGEASEFIVYVQEAMQPVEEQAVEQPAQEL

SEQ ID NO: 98474 - protein, 1156 aa, Homo sapiens
  Payload ID: 19659
  Gene Name: zinc finger and AT hook domain containing
  ENSP ID: ENSP00000394501
MCKCCNLFSPNQSELLSHVSEKHMEEGVNVDEIIIPLRPLSTPEPPNSSKTGDEFLVMKRKRGRPKGSTKKSSTEEELAENIVSPTEDSPLAPEEGNSLPPSSLECSKCCRKFSNTRQLRKHICIIVLNLGEEEGEAGNESDLELEKKCKEDDREKASKRPRSQKTEKVQKISGKEARQLSGAKKPIISVVLTAHEAIPGATKIVPVEAGPPETGATNSETTSADLVPRRGYQEYAIQQTPYEQPMKSSRLGPTQLKIFTCEYCNKVFKFKHSLQAHLRIHTNEKPYKCPQCSYASAIKANLNVHLRKHTGEKFACDYCSFTCLSKGHLKVHIERVHKKIKQHCRFCKKKYSDVKNLIKHIRDAHDPQDKKVKEALDELCLMTREGKRQLLYDCHICERKFKNELDRDRHMLVHGDKWPFACELCGHGATKYQALELHVRKHPFVYVCAVCRKKFVSSIRLRTHIKEVHGAAQEALVFTSSINQSFCLLEPGGDIQQEALGDQLQLVEEEFALQGVNALKEEACPGDTQLEEGRKEPEAPGEMPAPAVHLASPQAESTALPPCELETTVVSSSDLHSQEVVSDDFLLKNDTSSAEAHAAPEKPPDMQHRSSVQTQGEVITLLLSKAQSAGSDQESHGAQSPLGEGQNMAVLSAGDPDPSRCLRSNPAEASDLLPPVAGGGDTITHQPDSCKAAPEHRSGITAFMKVLNSLQKKQMNTSLCERIRKVYGDLECEYCGKLFWYQVHFDMHVRTHTREHLYYCSQCHYSSITKNCLKRHVIQKHSNILLKCPTDGCDYSTPDKYKLQAHLKVHTALDKRSYSCPVCEKSFSEDRLIKSHIKTNHPEVSMSTISEVLGRRVQLKGLIGKRAMKCPYCDFYFMKNGSDLQRHIWAHEGVKPFKCSLCEYATRSKSNLKAHMNRHSTEKTHLCDMCGKKFKSKGTLKSHKLLHTADGKQFKCTVCDYTAAQKPQLLRHMEQHVSFKPFRCAHCHYSCNISGSLKRHYNRKHPNEEYANVGTGELAAEVLIQQGGLKCPVCSFVYGTKWEFNRHLKNKHGLKVVEIDGDPKWETATEAPEEPSTQYLHITEAEEDVQGTQAAVAALQDLRYTSESGDRLDPTAVNILQQLQPHGHDPGDGPASVRGACRAAPPGGVLRRRGGH

SEQ ID NO: 98475 - protein, 1231 aa, Homo sapiens
  Payload ID: 19659
  Gene Name: zinc finger and AT hook domain containing
  Uniprot ID: Q9P243
  ENSP ID: ENSP00000427831
MCKCCNLFSPNQSELLSHVSEKHMEEGVNVDEIIIPLRPLSTPEPPNSSKTGDEFLVMKRKRGRPKGSTKKSSTEEELAENIVSPTEDSPLAPEEGNSLPPSSLECSKCCRKFSNTRQLRKHICIIVLNLGEEEGEAGNESDLELEKKCKEDDREKASKRPRSQKTEKVQKISGKEARQLSGAKKPIISVVLTAHEAIPGATKIVPVEAGPPETGATNSETTSADLVPRRGYQEYAIQQTPYEQPMKSSRLGPTQLKIFTCEYCNKVFKFKHSLQAHLRIHTNEKPYKCPQCSYASAIKANLNVHLRKHTGEKFACDYCSFTCLSKGHLKVHIERVHKKIKQHCRFCKKKYSDVKNLIKHIRDAHDPQDKKVKEALDELCLMTREGKRQLLYDCHICERKFKNELDRDRHMLVHGDKWPFACELCGHGATKYQALELHVRKHPFVYVCAVCRKKFVSSIRLRTHIKEVHGAAQEALVFTSSINQSFCLLEPGGDIQQEALGDQLQLVEEEFALQGVNALKEEACPGDTQLEEGRKEPEAPGEMPAPAVHLASPQAESTALPPCELETTVVSSSDLHSQEVVSDDFLLKNDTSSAEAHAAPEKPPDMQHRSSVQTQGEVITLLLSKAQSAGSDQESHGAQSPLGEGQNMAVLSAGDPDPSRCLRSNPAEASDLLPPVAGGGDTITHQPDSCKAAPEHRSGITAFMKVLNSLQKKQMNTSLCERIRKVYGDLECEYCGKLFWYQVHFDMHVRTHTREHLYYCSQCHYSSITKNCLKRHVIQKHSNILLKCPTDGCDYSTPDKYKLQAHLKVHTALDKRSYSCPVCEKSFSEDRLIKSHIKTNHPEVSMSTISEVLGRRVQLKGLIGKRAMKCPYCDFYFMKNGSDLQRHIWAHEGVKPFKCSLCEYATRSKSNLKAHMNRHSTEKTHLCDMCGKKFKSKGTLKSHKLLHTADGKQFKCTVCDYTAAQKPQLLRHMEQHVSFKPFRCAHCHYSCNISGSLKRHYNRKHPNEEYANVGTGELAAEVLIQQGGLKCPVCSFVYGTKWEFNRHLKNKHGLKVVEIDGDPKWETATEAPEEPSTQYLHITEAEEDVQGTQAAVAALQDLRYTSESGDRLDPTAVNILQQIIELGAETHDATALASVVAMAPGTVTVVKQVTEEEPSSNHTVMIQETVQQASVELAEQHHLVVSSDDVEGIETVTVYTQGGEASEFIVYVQEAMQPVEEQAVEQPAQEL

SEQ ID NO: 98476 - protein, 1145 aa, Homo sapiens
  Payload ID: 19659
  Gene Name: zinc finger and AT hook domain containing
  ENSP ID: ENSP00000427879
MCKCCNLFSPNQSELLSHVSEKHMEEGVNVDEIIIPLRPLSTPEPPNSSKTGDEFLVMKRKRGRPKGSTKKSSTEEELAENIVSPTEDSPLAPEEGNSLPPSSLECSKCCRKFSNTRQLRKHICIIVLNLGEEEGEAGNESDLELEKKCKEDDREKASKRPRSQKTEKVQKISGKEARQLSGAKKPIISVVLTAHEAIPGATKIVPVEAGPPETGATNSETTSADLVPRRGYQEYAIQQTPYEQPMKSSRLGPTQLKIFTCEYCNKVFKFKHSLQAHLRIHTNEKPYKCPQCSYASAIKANLNVHLRKHTGEKFACDYCSFTCLSKGHLKVHIERVHKKIKQHCRFCKKKYSDVKNLIKHIRDAHDPQDKKVKEALDELCLMTREGKRQLLYDCHICERKFKNELDRDRHMLVHGDKWPFACELCGHGATKYQALELHVRKHPFVYVCAVCRKKFVSSIRLRTHIKEVHGAAQEALVFTSSINQSFCLLEPGGDIQQEALGDQLQLVEEEFALQGVNALKEEACPGDTQLEEGRKEPEAPGEMPAPAVHLASPQAESTALPPCELETTVVSSSDLHSQEVVSDDFLLKNDTSSAEAHAAPEKPPDMQHRSSVQTQGEVITLLLSKAQSAGSDQESHGAQSPLGEGQNMAVLSAGDPDPSRCLRSNPAEASDLLPPVAGGGDTITHQPDSCKAAPEHRSGITAFMKVLNSLQKKQMNTSLCERIRKVYGDLECEYCGKLFWYQVHFDMHVRTHTREHLYYCSQCHYSSITKNCLKRHVIQKHSNILLKCPTDGCDYSTPDKYKLQAHLKVHTALDKRSYSCPVCEKSFSEDRLIKSHIKTNHPEVSMSTISEVLGRRVQLKGLIGKRAMKCPYCDFYFMKNGSDLQRHIWAHEGVKPFKCSLCEYATRSKSNLKAHMNRHSTEKTHLCDMCGKKFKSKGTLKSHKLLHTADGKQFKCTVCDYTAAQKPQLLRHMEQHVSFKPFRCAHCHYSCNISGSLKRHYNRKHPNEEYANVGTGELAAEVLIQQGGLKCPVCSFVYGTKWEFNRHLKNKHGLKVVEIDGDPKWEVTEEEPSSNHTVMIQETVQQASVELAEQHHLVVSSDDVEGIETVTVYTQGGEASEFIVYVQEAMQPVEEQAVEQPAQEL

SEQ ID NO: 98477 - protein, 150 aa, Homo sapiens
  Payload ID: 19659
  Gene Name: zinc finger and AT hook domain containing
  ENSP ID: ENSP00000428192
MCKCCNLFSPNQSELLSHVSEKHMEEGVNVDEIIIPLRPLSTPEPPNSSKTGDEFLVMKRKRGRPKGSTKKSSTEEELAENIVSPTEDSPLAPEEGNSLPPSSLECSKCCRKFSNTRQLRKHICIIVLNLGEEEGEAGATKIVPVEAGPP

SEQ ID NO: 98478 - protein, 1231 aa, Homo sapiens; identical to SEQ ID NO: 98475
  Payload ID: 19659
  Gene Name: zinc finger and AT hook domain containing
  Uniprot ID: Q9P243
  ENSP ID: ENSP00000428483

SEQ ID NO: 98479 - protein, 58 aa, Homo sapiens
  Payload ID: 19659
  Gene Name: zinc finger and AT hook domain containing
  ENSP ID: ENSP00000429050
METRAAGLLEFAGGPLHTLFAWVSPVEAAEQQRLLPVPASGSFVPEGHLPDASQSSPV

SEQ ID NO: 98480 - protein, 1181 aa, Homo sapiens
  Payload ID: 19659
  Gene Name: zinc finger and AT hook domain containing
  Uniprot ID: Q9P243
  ENSP ID: ENSP00000429091
METRAAENTAIFMCKCCNLFSPNQSELLSHVSEKHMEEGVNVDEIIIPLRPLSTPEPPNSSKTGDEFLVMKRKRGRPKGSTKKSSTEEELAENIVSPTEDSPLAPEEGNSLPPSSLECSKCCRKFSNTRQLRKHICIIVLNLGEEEGEAGATKIVPVEAGPPETGATNSETTSADLVPRRGYQEYAIQQTPYEQPMKSSRLGPTQLKIFTCEYCNKVFKFKHSLQAHLRIHTNEKPYKCPQCSYASAIKANLNVHLRKHTGEKFACDYCSFTCLSKGHLKVHIERVHKKIKQHCRFCKKKYSDVKNLIKHIRDAHDPQDKKVKEALDELCLMTREGKRQLLYDCHICERKFKNELDRDRHMLVHGDKWPFACELCGHGATKYQALELHVRKHPFVYVCAVCRKKFVSSIRLRTHIKEVHGAAQEALVFTSSINQSFCLLEPGGDIQQEALGDQLQLVEEEFALQGVNALKEEACPGDTQLEEGRKEPEAPGEMPAPAVHLASPQAESTALPPCELETTVVSSSDLHSQEVVSDDFLLKNDTSSAEAHAAPEKPPDMQHRSSVQTQGEVITLLLSKAQSAGSDQESHGAQSPLGEGQNMAVLSAGDPDPSRCLRSNPAEASDLLPPVAGGGDTITHQPDSCKAAPEHRSGITAFMKVLNSLQKKQMNTSLCERIRKVYGDLECEYCGKLFWYQVHFDMHVRTHTREHLYYCSQCHYSSITKNCLKRHVIQKHSNILLKCPTDGCDYSTPDKYKLQAHLKVHTALDKRSYSCPVCEKSFSEDRLIKSHIKTNHPEVSMSTISEVLGRRVQLKGLIGKRAMKCPYCDFYFMKNGSDLQRHIWAHEGVKPFKCSLCEYATRSKSNLKAHMNRHSTEKTHLCDMCGKKFKSKGTLKSHKLLHTADGKQFKCTVCDYTAAQKPQLLRHMEQHVSFKPFRCAHCHYSCNISGSLKRHYNRKHPNEEYANVGTGELAAEVLIQQGGLKCPVCSFVYGTKWEFNRHLKNKHGLKVVEIDGDPKWETATEAPEEPSTQYLHITEAEEDVQGTQAAVAALQDLRYTSESGDRLDPTAVNILQQIIELGAETHDATALASVVAMAPGTVTVVKQVTEEEPSSNHTVMIQETVQQASVELAEQHHLVVSSDDVEGIETVTVYTQGGEASEFIVYVQEAMQPVEEQAVEQPAQEL

SEQ ID NO: 98481 - protein, 163 aa, Homo sapiens
  Payload ID: 19659
  Gene Name: zinc finger and AT hook domain containing
  ENSP ID: ENSP00000429600
NLWNFLAHTFIESAAERACWVLPGVQLRGQPHVRMLGLRARDRLDPTAVNILQQIIELGAETHDATALASVVAMAPGTVTVVKQVTEEEPSSNHTVMIQETVQQASVELAEQHHLVVSSDDVEGIETVTVYTQGGEASEFIVYVQEAMQPVEEQAVEQPAQEL

SEQ ID NO: 98482 - protein, 998 aa, Homo sapiens
  Payload ID: 19659
  Gene Name: zinc finger and AT hook domain containing
  ENSP ID: ENSP00000429930
METRAAENTAIFMCKCCNLFSPNQSELLSHVSEKHMEEGVNVDEIIIPLRPLSTPEPPNSSKTGDEFLVMKRKRGRPKGSTKKSSTEEELAENIVSPTEDSPLAPEEGNSLPPSSLECSKCCRKFSNTRQLRKHICIIVLNLGEEEGEAGNESDLELEKKCKEDDREKASKRPRSQKTEKVQKISGKEARQLSGAKKPIISVVLTAHEAIPGATKIVPVEAGPPETGATNSETTSADLVPRRGYQEYAIQQTPYEQPMKSSRLGPTQLKIFTCEYCNKVFKFKHSLQAHLRIHTNEKPYKCPQCSYASAIKANLNVHLRKHTGEKFACDYCSFTCLSKGHLKVHIERVHKKIKQHCRFCKKKYSDVKNLIKHIRDAHDPQDKKVKEALDELCLMTREGKRQLLYDCHICERKFKNELDRDRHMLVHGDKWPFACELCGHGATKYQALELHVRKHPFVYVCAVCRKKFVSSIRLRTHIKEVHGAAQEALVFTSSINQSFCLLEPGGDIQQEALGDQLQLVEEEFALQGVNALKEEACPGDTQLEEGRKEPEAPGEMPAPAVHLASPQAESTALPPCELETTVVSSSDLHSQEVVSDDFLLKNDTSSAEAHAAPEKPPDMQHRSSVQTQGEVITLLLSKAQSAGSDQESHGAQSPLGEGQNMAVLSAGDPDPSRCLRSNPAEASDLLPPVAGGGDTITHQPDSCKAAPEHRSGITAFMKVLNSLQKKQMNTSLCERIRKVYGDLECEYCGKLFWYQVHFDMHVRTHTREHLYYCSQCHYSSITKNCLKRHVIQKHSNILLKCPTDGCDYSTPDKYKLQAHLKVHTALDKRSYSCPVCEKSFSEDRLIKSHIKTNHPEVSMSTISEVLGRRVQLKGLIGKRAMKCPYCDFYFMKNGSDLQRHIWAHEGVKPFKCSLCEYATRSKSNLKAHMNRHSTEKTHLCDMCGKKFKSKGTLKSHKLLHTADGKQFKCTVCDYTAAQKPQLLRHMEQHVSFKKRSIAL

SEQ ID NO: 98483 - protein, 196 aa, Homo sapiens
  Payload ID: 19659
  Gene Name: zinc finger and AT hook domain containing
  ENSP ID: ENSP00000429983
MTREFLVMKRKRGRPKGSTKKSSTEEELAENIVSPTEDSPLAPEEGNSLPPSSLECSKCCRKFSNTRQLRKHICIIVLNLGEEEGEAGNESDLELEKKCKEDDREKASKRPRSQKTEKVQKISGKEARQLSGAKKPIISVVLTAHEAIPGATKIVPVEAGPPETGATNSETTSADLVPRRGYQEYAIQQTPYEQPM

SEQ ID NO: 98484 - protein, 98 aa, Homo sapiens
  Payload ID: 19659
  Gene Name: zinc finger and AT hook domain containing
  ENSP ID: ENSP00000430924
  MOD_RES (1)..(1): Any amino acid
XKLFWYQVHFDMHVRTHTREHLYYCSQCHYSSITKNCLKRHVIQKHSNILLKCPTDGCDYSTPDKYKLQAHLKVHTALVFGGGSCNTMNECLFLQILI

SEQ ID NO: 98485 - protein, 644 aa, Homo sapiens
  Payload ID: 19660
  Gene Name: zinc finger and BTB domain containing 1
  Uniprot ID: Q9Y2K1
  ENSP ID: ENSP00000351587
MAKPSHSSYVLQQLNNQREWGFLCDCCIAIDDIYFQAHKAVLAACSSYFRMFFMNHQHSTAQLNLSNMKISAECFDLILQFMYLGKIMTAPSSFEQFKVAMNYLQLYNVPDCLEDIQDADCSSSKCSSSASSKQNSKMIFGVRMYEDTVARNGNEANRWCAEPSSTVNTPHNREADEESLQLGNFPEPLFDVCKKSSVSKLSTPKERVSRRFGRSFTCDSCGFGFSCEKLLDEHVLTCTNRHLYQNTRSYHRIVDIRDGKDSNIKAEFGEKDSSKTFSAQTDKYRGDTSQAADDSASTTGSRKSSTVESEIASEEKSRAAERKRIIIKMEPEDIPTDELKDFNIIKVTDKDCNESTDNDELEDEPEEPFYRYYVEEDVSIKKSGRKTLKPRMSVSADERGGLENMRPPNNSSPVQEDAENASCELCGLTITEEDLSSHYLAKHIENICACGKCGQILVKGRQLQEHAQRCGEPQDLTMNGLGNTEEKMDLEENPDEQSEIRDMFVEMLDDFRDNHYQINSIQKKQLFKHSACPFRCPNCGQRFETENLVVEHMSSCLDQDMFKSAIMEENERDHRRKHFCNLCGKGFYQRCHLREHYTVHTKEKQFVCQTCGKQFLRERQLRLHNDMHKGMASGEIGPSKPVEK

SEQ ID NO: 98486 - protein, 130 aa, Homo sapiens
  Payload ID: 19660
  Gene Name: zinc finger and BTB domain containing 1
  ENSP ID: ENSP00000450689
MAKPSHSSYVLQQLNNQREWGFLCDCCIAIDDIYFQAHKAVLAACSSYFRMFFMNHQHSTAQLNLSNMKISAECFDLILQFMYLGKIMTAPSSFEQFKVAMNYLQLYNVPDCLEDIQDADCSSSKCSSSA

SEQ ID NO: 98487 - protein, 713 aa, Homo sapiens
  Payload ID: 19660
  Gene Name: zinc finger and BTB domain containing 1
  Uniprot ID: Q9Y2K1
  ENSP ID: ENSP00000451000
MAKPSHSSYVLQQLNNQREWGFLCDCCIAIDDIYFQAHKAVLAACSSYFRMFFMNHQHSTAQLNLSNMKISAECFDLILQFMYLGKIMTAPSSFEQFKVAMNYLQLYNVPDCLEDIQDADCSSSKCSSSASSKQNSKMIFGVRMYEDTVARNGNEANRWCAEPSSTVNTPHNREADEESLQLGNFPEPLFDVCKKSSVSKLSTPKERVSRRFGRSFTCDSCGFGFSCEKLLDEHVLTCTNRHLYQNTRSYHRIVDIRDGKDSNIKAEFGEKDSSKTFSAQTDKYRGDTSQAADDSASTTGSRKSSTVESEIASEEKSRAAERKRIIIKMEPEDIPTDELKDFNIIKVTDKDCNESTDNDELEDEPEEPFYRYYVEEDVSIKKSGRKTLKPRMSVSADERGGLENMRPPNNSSPVQEDAENASCELCGLTITEEDLSSHYLAKHIENICACGKCGQILVKGRQLQEHAQRCGEPQDLTMNGLGNTEEKMDLEENPDEQSEIRDMFVEMLDDFRDNHYQINSIQKKQLFKHSACPFRCPNCGQRFETENLVVEHMSSCLDQDMFKSAIMEENERDHRRKHFCNLCGKGFYQRCHLREHYTVHTKEKQFVCQTCGKQFLRERQLRLHNDMHKGMARYVCSICDQGNFRKHDHVRHMISHLSAGETICQVCFQIFPNNEQLEQHMDVHLYTCGICGAKFNLRKDMRSHYNAKHLKRT

SEQ ID NO: 98488 - protein, 34 aa, Homo sapiens
  Payload ID: 19660
  Gene Name: zinc finger and BTB domain containing 1
  ENSP ID: ENSP00000451332
MAKPSHSSYVLQQLNNQREWGFLCDCCIAIDDIY

SEQ ID NO: 98489 - protein, 155 aa, Homo sapiens
  Payload ID: 19660
  Gene Name: zinc finger and BTB domain containing 1
  ENSP ID: ENSP00000451584
MAKPSHSSYVLQQLNNQREWGFLCDCCIAIDDIYFQAHKAVLAACSSYFRMFFMNHQHSTAQLNLSNMKISAECFDLILQFMYLGKIMTAPSSFEQFKVAMNYLQLYNVPDCLEDIQDADCSSSKCSSSASSKQNSKMIFGVRMYEDTVARNGNE

SEQ ID NO: 98490 - protein, 579 aa, Homo sapiens
  Payload ID: 19661
  Gene Name: zinc finger and BTB domain containing 10
  Uniprot ID: Q96DT7
  ENSP ID: ENSP00000368384
MTRLERSSHRTVICKVPGELVAREGKCASRARESEIPSEEGYCDFNSRPNENSYCYQLLRQLNEQRKKGILCDVSIVVSGKIFKAHKNILVAGSRFFKTLYCFSNKESPNQNNTTHLDIAAVQGFSVILDFLYSGNLVLTSQNAIEVMTVASYLQMSEVVQTCRNFIKDALNISIKSEAPESVVVDYNNRKPVNRDGLSSSRDQKIASFWATRNLTNLASNVKIENDGCNVDEGQIENYQMNDSSWVQDGSPEMAENESEGQTKVFIWNNMGSQGIQETGKTRRKNQTTKRFIYNIPPNNETNLEDCSVMQPPVAYPEENTLLIKEEPDLDGALLSGPDGDRNVNANLLAEAGTSQDGGDAGTSHDFKYGLMPGPSNDFKYGLIPGTSNDFKYGLIPGASNDFKYGLLPESWPKQETWENGESSLIMNKLKCPHCSYVAKYRRTLKRHLLIHTGVRSFSCDICGKLFTRREHVKRHSLVHKKDKKYKCMVCKKIFMLAASVGIRHGSRRYGVCVDCADKSQPGGQEGVDQGQDTEFPRDEEYEENEVGEADEELVDDGEDQNDPSRWDESGEVCMSLDD

SEQ ID NO: 98491 - protein, 871 aa, Homo sapiens
  Payload ID: 19661
  Gene Name: zinc finger and BTB domain containing 10
  Uniprot ID: Q96DT7
  ENSP ID: ENSP00000387462
MSFSEMNRRTLAFRGGGLVTASGGGSTNNNAGGEASAWPPQPQPRQPPPPAPPALQPPNGRGADEEVELEGLEPQDLEASAGPAAGAAEEAKELLLPQDAGGPTSLGGGAGGPLLAERNRRTLAFRGGGGGGLGNNGSSRGRPETSVWPLRHFNGRGPATVDLELDALEGKELMQDGASLSDSTEDEEEGASLGDGSGAEGGSCSSSRRSGGDGGDEVEGSGVGAGEGETVQHFPLARPKSLMQKLQCSFQTSWLKDFPWLRYSKDTGLMSCGWCQKTPADGGSVDLPPVGHDELSRGTRNYKKTLLLRHHVSTEHKLHEANAQESEIPSEEGYCDFNSRPNENSYCYQLLRQLNEQRKKGILCDVSIVVSGKIFKAHKNILVAGSRFFKTLYCFSNKESPNQNNTTHLDIAAVQGFSVILDFLYSGNLVLTSQNAIEVMTVASYLQMSEVVQTCRNFIKDALNISIKSEAPESVVVDYNNRKPVNRDGLSSSRDQKIASFWATRNLTNLASNVKIENDGCNVDEGQIENYQMNDSSWVQDGSPEMAENESEGQTKVFIWNNMGSQGIQETGKTRRKNQTTKRFIYNIPPNNETNLEDCSVMQPPVAYPEENTLLIKEEPDLDGALLSGPDGDRNVNANLLAEAGTSQDGGDAGTSHDFKYGLMPGPSNDFKYGLIPGTSNDFKYGLIPGASNDFKYGLLPESWPKQETWENGESSLIMNKLKCPHCSYVAKYRRTLKRHLLIHTGVRSFSCDICGKLFTRREHVKRHSLVHKKDKKYKCMVCKKIFMLAASVGIRHGSRRYGVCVDCADKSQPGGQEGVDQGQDTEFPRDEEYEENEVGEADEELVDDGEDQNDPSRWDESGEVCMSLDD

SEQ ID NO: 98492 - protein, 871 aa, Homo sapiens; identical to SEQ ID NO: 98491
  Payload ID: 19661
  Gene Name: zinc finger and BTB domain containing 10
  Uniprot ID: Q96DT7
  ENSP ID: ENSP00000412036

SEQ ID NO: 98493 - protein, 847 aa, Homo sapiens
  Payload ID: 19661
  Gene Name: zinc finger and BTB domain containing 10
  Uniprot ID: Q96DT7
  ENSP ID: ENSP00000416134
MSFSEMNRRTLAFRGGGLVTASGGGSTNNNAGGEASAWPPQPQPRQPPPPAPPALQPPNGRGADEEVELEGLEPQDLEASAGPAAGAAEEAKELLLPQDAGGPTSLGGGAGGPLLAERNRRTLAFRGGGGGGLGNNGSSRGRPETSVWPLRHFNGRGPATVDLELDALEGKELMQDGASLSDSTEDEEEGASLGDGSGAEGGSCSSSRRSGGDGGDEVEGSGVGAGEGETVQHFPLARPKSLMQKLQCSFQTSWLKDFPWLRYSKDTGLMSCGWCQKTPADGGSVDLPPVGHDELSRGTRNYKKTLLLRHHVSTEHKLHEANAQESEIPSEEGYCDFNSRPNENSYCYQLLRQLNEQRKKGILCDVSIVVSGKIFKAHKNILVAGSRFFKTLYCFSNKESPNQNNTTHLDIAAVQGFSVILDFLYSGNLVLTSQNAIEVMTVASYLQMSEVVQTCRNFIKDALNISIKSEAPESVVVDYNNRKPVNRDGLSSSRDQKIASFWATRNLTNLASNVKIENDGCNVDEGQIENYQMNDSSWVQDGSPEMAENESEGQTKVFIWNNMGSQGIQETGKTRRKNQTTKRFIYNIPPNNETNLEDCSVMQPPVAYPEENTLLIKEEPDLDGALLSGPDGDRNVNANLLAEAGTSQDGGDAGTSHDFKYGLMPGASNDFKYGLLPESWPKQETWENGESSLIMNKLKCPHCSYVAKYRRTLKRHLLIHTGVRSFSCDICGKLFTRREHVKRHSLVHKKDKKYKCMVCKKIFMLAASVGIRHGSRRYGVCVDCADKSQPGGQEGVDQGQDTEFPRDEEYEENEVGEADEELVDDGEDQNDPSRWDESGEVCMSLDD

SEQ ID NO: 98494 - protein, 698 aa, Homo sapiens
  Payload ID: 19661
  Gene Name: zinc finger and BTB domain containing 10
  Uniprot ID: Q96DT7
  ENSP ID: ENSP00000484716
MQDGASLSDSTEDEEEGASLGDGSGAEGGSCSSSRRSGGDGGDEVEGSGVGAGEGETVQHFPLARPKSLMQKLQCSFQTSWLKDFPWLRYSKDTGLMSCGWCQKTPADGGSVDLPPVGHDELSRGTRNYKKTLLLRHHVSTEHKLHEANAQESEIPSEEGYCDFNSRPNENSYCYQLLRQLNEQRKKGILCDVSIVVSGKIFKAHKNILVAGSRFFKTLYCFSNKESPNQNNTTHLDIAAVQGFSVILDFLYSGNLVLTSQNAIEVMTVASYLQMSEVVQTCRNFIKDALNISIKSEAPESVVVDYNNRKPVNRDGLSSSRDQKIASFWATRNLTNLASNVKIENDGCNVDEGQIENYQMNDSSWVQDGSPEMAENESEGQTKVFIWNNMGSQGIQETGKTRRKNQTTKRFIYNIPPNNETNLEDCSVMQPPVAYPEENTLLIKEEPDLDGALLSGPDGDRNVNANLLAEAGTSQDGGDAGTSHDFKYGLMPGPSNDFKYGLIPGTSNDFKYGLIPGASNDFKYGLLPESWPKQETWENGESSLIMNKLKCPHCSYVAKYRRTLKRHLLIHTGVRSFSCDICGKLFTRREHVKRHSLVHKKDKKYKCMVCKKIFMLAASVGIRHGSRRYGVCVDCADKSQPGGQEGVDQGQDTEFPRDEEYEENEVGEADEELVDDGEDQNDPSRWDESGEVCMSLDD

SEQ ID NO: 98495 - protein, 1053 aa, Homo sapiens
  Payload ID: 19662
  Gene Name: zinc finger and BTB domain containing 11
  Uniprot ID: O95625
  ENSP ID: ENSP00000326200
MSSEESYRAILRYLTNEREPYAPGTEGNVKRKIRKAAACYVVRGGTLYYQRRQRHRKTFAELEVVLQPERRRDLIEAAHLGPGGTHHTRHQTWHYLSKTYWWRGILKQVKDYIKQCSKCQEKLDRSRPISDVSEMLEELGLDLESGEESNESEDDLSNFTSSPTTASKPAKKKPVSKHELVFVDTKGVVKRSSPKHCQAVLKQLNEQRLSNQFCDVTLLIEGEEYKAHKSVLSANSEYFRDLFIEKGAVSSHEAVVDLSGFCKASFLPLLEFAYTSVLSFDFCSMADVAILARHLFMSEVLEICESVHKLMEEKQLTVYKKGEVQTVASTQDLRVQNGGTAPPVASSEGTTTSLPTELGDCEIVLLVNGELPEAEQNGEVGRQPEPQVSSEAESALSSVGCIADSHPEMESVDLITKNNQTELETSNNRENNTVSNIHPKLSKENVISSSPEDSGMGNDISAEDICAEDIPKHRQKVDQPLKDQENLVASTAKTDFGPDDDTYRSRLRQRSVNEGAYIRLHKGMEKKLQKRKAVPKSAVQQVAQKLVQRGKKMKQPKRDAKENTEEASHKCGECGMVFQRRYALIMHKLKHERARDYKCPLCKKQFQYSASLRAHLIRHTRKDAPSSSSSNSTSNEASGTSSEKGRTKREFICSICGRTLPKLYSLRIHMLKHTGVKPHACQVCGKTFIYKHGLKLHQSLHQSQKQFQCELCVKSFVTKRSLQEHMSIHTGESKYLCSVCGKSFHRGSGLSKHFKKHQPKPEVRGYHCTQCEKSFFEARDLRQHMNKHLGVKPFQCQFCDKCYSWKKDWYSHVKSHSVTEPYRCNICGKEFYEKALFRRHVKKATHGKKGRAKQNLERVCEKCGRKFTQLREYRRHMNNHEGVKPFECLTCGVAWADARSLKRHVRTHTGERPYVCPVCSEAYIDARTLRKHMTKFHRDYVPCKIMLEKDTLQFHNQGTQVAHAVSILTAGMQEQESSGPQELETVVVTGETMEALEAVAATEEYPSVSTLSDQSIMQVVNYVLAQQQGQKLSEVAEAIQTVKVEVAHISGGE

SEQ ID NO: 98496 - protein, 215 aa, Homo sapiens
  Payload ID: 19662
  Gene Name: zinc finger and BTB domain containing 11
  ENSP ID: ENSP00000417369
MSSEESYRAILRYLTNEREPYAPGTEGNVKRKIRKAAACYVVRGGTLYYQRRQRHRKTFAELEVVLQPERRRDLIEAAHLGPGGTHHTRHQTWHYLSKTYWWRGILKQVKDYIKQCSKCQEKLDRSRPISDVSEMLEELGLDLESGEESNESEDDLSNFTSSPTTASKPAKKKPVSKHELVFVSGTLQSALRFVTSVLVFAALVTYFSQTTKTAY

SEQ ID NO: 98497 - protein, 459 aa, Homo sapiens
  Payload ID: 19663
  Gene Name: zinc finger and BTB domain containing 12
  Uniprot ID: Q9Y330
  ENSP ID: ENSP00000364675
MASGVEVLRFQLPGHEAATLRNMNQLRAEERFCDVTIVADSLKFRGHKVILAACSPFLRDQFLLNPSSELQVSLMHSARIVADLLLSCYTGALEFAVRDIVNYLTAASYLQMEHVVEKCRNALSQFIEPKIGLKEDGVSEASLVSSISATKSLLPPARTPKPAPKPPPPPPLPPPLLRPVKLEFPLDEDLELKAEEEDEDEDEDVSDICIVKVESALEVAHRLKPPGGLGGGLGIGGSVGGHLGELAQSSVPPSTVAPPQGVVKACYSLSEDAEGEGLLLIPGGRASVGATSGLVEAAAVAMAARGAGGSLGAGGSRGPLPGGFSGGNPLKNIKCTKCPEVFQGVEKLVFHMRAQHFIFMCPRCGKQFNHSSNLNRHMNVHRGVKSHSCGICGKCFTQKSTLHDHLNLHSGARPYRCSYCDVRFAHKPAIRRHLKEQHGKTTAENVLEASVAEINVLIR

SEQ ID NO: 98498 - protein, 459 aa, Homo sapiens; identical to SEQ ID NO: 98497
  Payload ID: 19663
  Gene Name: zinc finger and BTB domain containing 12
  Uniprot ID: Q9Y330
  ENSP ID: ENSP00000364677

SEQ ID NO: 98499 - protein, 459 aa, Homo sapiens; identical to SEQ ID NO: 98497
  Payload ID: 19663
  Gene Name: zinc finger and BTB domain containing 12
  Uniprot ID: Q9Y330
  ENSP ID: ENSP00000391563

SEQ ID NO: 98500 - protein, 459 aa, Homo sapiens; identical to SEQ ID NO: 98497
  Payload ID: 19663
  Gene Name: zinc finger and BTB domain containing 12
  Uniprot ID: Q9Y330
  ENSP ID: ENSP00000392328

SEQ ID NO: 98501 - protein, 459 aa, Homo sapiens; identical to SEQ ID NO: 98497
  Payload ID: 19663
  Gene Name: zinc finger and BTB domain containing 12
  Uniprot ID: Q9Y330
  ENSP ID: ENSP00000414777

SEQ ID NO: 98502 - protein, 459 aa, Homo sapiens; identical to SEQ ID NO: 98497
  Payload ID: 19663
  Gene Name: zinc finger and BTB domain containing 12
  Uniprot ID: Q9Y330
  ENSP ID: ENSP00000478943

SEQ ID NO: 98503 - protein, 449 aa, Homo sapiens
  Payload ID: 19664
  Gene Name: zinc finger and BTB domain containing 14
  Uniprot ID: O43829
  ENSP ID: ENSP00000349503
MEFFISMSETIKYNDDDHKTLFLKTLNEQRLEGEFCDIAIVVEDVKFRAHRCVLAACSTYFKKLFKKLEVDSSSVIEIDFLRSDIFEEVLNYMYTAKISVKKEDVNLMMSSGQILGIRFLDKLCSQKRDVSSPDENNGQSKSKYCLKINRPIGDAADTQDDDVEEIGDQDDSPSDDTVEGTPPSQEDGKSPTTTLRVQEAILKELGSEEVRKVNCYGQEVESMETPESKDLGSQTPQALTFNDGMSEVKDEQTPGWTTAASDMKFEYLLYGHHREQIACQACGKTFSDEGRLRKHEKLHTADRPFVCEMCTKGFTTQAHLKEHLKIHTGYKPYSCEVCGKSFIRAPDLKKHERVHSNERPFACHMCDKAFKHKSHLKDHERRHRGEKPFVCGSCTKAFAKASDLKRHENNMHSERKQVTPSAIQSETEQLQAAAMAAEAEQQLETIACS

SEQ ID NO: 98504 - protein, 449 aa, Homo sapiens; identical to SEQ ID NO: 98503
  Payload ID: 19664
  Gene Name: zinc finger and BTB domain containing 14
  Uniprot ID: O43829
  ENSP ID: ENSP00000383009

SEQ ID NO: 98505 - protein, 102 aa, Homo sapiens
  Payload ID: 19664
  Gene Name: zinc finger and BTB domain containing 14
  ENSP ID: ENSP00000462112
MEFFISMSETIKYNDDDHKTLFLKTLNEQRLEGEFCDIAIVVEDVKFRAHRCVLAACSTYFKKLFKKLEVDSSSVIEIDFLRSDIFEEVLNYMYTAKISVKK

SEQ ID NO: 98506 - protein, 165 aa, Homo sapiens
  Payload ID: 19664
  Gene Name: zinc finger and BTB domain containing 14
  ENSP ID: ENSP00000463414
MEFFISMSETIKYNDDDHKTLFLKTLNEQRLEGEFCDIAIVVEDVKFRAHRCVLAACSTYFKKLFKKLEVDSSSVIEIDFLRSDIFEEVLNYMYTAKISVKKEDVNLMMSSGQILGIRFLDKLCSQKRDVSSPDENNGQSKSKYCLKINRPIGDAADTQDDDVEE

SEQ ID NO: 98507 - protein, 221 aa, Homo sapiens
  Payload ID: 19664
  Gene Name: zinc finger and BTB domain containing 14
  ENSP ID: ENSP00000463555
MEFFISMSETIKYNDDDHKTLFLKTLNEQRLEGEFCDIAIVVEDVKFRAHRCVLAACSTYFKKLFKKLEVDSSSVIEIDFLRSDIFEEVLNYMYTAKISVKKEDVNLMMSSGQILGIRFLDKLCSQKRDVSSPDENNGQSKSKYCLKINRPIGDAADTQDDDVEEIGDQDDSPSDDTVEGTPPSQEDGKSPTTTLRVQEAILKELGSEEVRKVNCYGQEVE

SEQ ID NO: 98508 - protein, 449 aa, Homo sapiens; identical to SEQ ID NO: 98503
  Payload ID: 19664
  Gene Name: zinc finger and BTB domain containing 14
  Uniprot ID: O43829
  ENSP ID: ENSP00000478971

SEQ ID NO: 98509 - protein, 449 aa, Homo sapiens; identical to SEQ ID NO: 98503
  Payload ID: 19664
  Gene Name: zinc finger and BTB domain containing 14
  Uniprot ID: O43829
  ENSP ID: ENSP00000484129

SEQ ID NO: 98510 - protein, 673 aa, Homo sapiens
  Payload ID: 19665
  Gene Name: zinc finger and BTB domain containing 16
  Uniprot ID: Q05516
  ENSP ID: ENSP00000338157
MDLTKMGMIQLQNPSHPTGLLCKANQMRLAGTLCDVVIMVDSQEFHAHRTVLACTSKMFEILFHRNSQHYTLDFLSPKTFQQILEYAYTATLQAKAEDLDDLLYAAEILEIEYLEEQCLKMLETIQASDDNDTEATMADGGAEEEEDRKARYLKNIFISKHSSEESGYASVAGQSLPGPMVDQSPSVSTSFGLSAMSPTKAAVDSLMTIGQSLLQGTLQPPAGPEEPTLAGGGRHPGVAEVKTEMMQVDEVPSQDSPGAAESSISGGMGDKVEERGKEGPGTPTRSSVITSARELHYGREESAEQVPPPAEAGQAPTGRPEHPAPPPEKHLGIYSVLPNHKADAVLSMPSSVTSGLHVQPALAVSMDFSTYGGLLPQGFIQRELFSKLGELAVGMKSESRTIGEQCSVCGVELPDNEAVEQHRKLHSGMKTYGCELCGKRFLDSLRLRMHLLAHSAGAKAFVCDQCGAQFSKEDALETHRQTHTGTDMAVFCLLCGKRFQAQSALQQHMEVHAGVRSYICSECNRTFPSHTALKRHLRSHTGDHPYECEFCGSCFRDESTLKSHKRIHTGEKPYECNGCGKKFSLKHQLETHYRVHTGEKPFECKLCHQRSRDYSAMIKHLRTHNGASPYQCTICTEYCPSLSSMQKHMKGHKPEEIPPDWRIEKTYLYLCYV

SEQ ID NO: 98511 - protein, 673 aa, Homo sapiens; identical to SEQ ID NO: 98510
  Payload ID: 19665
  Gene Name: zinc finger and BTB domain containing 16
  Uniprot ID: Q05516
  ENSP ID: ENSP00000376721

SEQ ID NO: 98512 - protein, 115 aa, Homo sapiens
  Payload ID: 19665
  Gene Name: zinc finger and BTB domain containing 16
  ENSP ID: ENSP00000437716
MDLTKMGMIQLQNPSHPTGLLCKANQMRLAGTLCDVVIMVDSQEFHAHRTVLACTSKMFEILFHRNSQHYTLDFLSPKTFQQILEYAYTATLQAKAEDLDDLLYAAEILEIEYLE

SEQ ID NO: 98513 - protein, 148 aa, Homo sapiens
  Payload ID: 19665
  Gene Name: zinc finger and BTB domain containing 16
  ENSP ID: ENSP00000443013
MDLTKMGMIQLQNPSHPTGLLCKANQMRLAGTLCDVVIMVDSQEFHAHRTVLACTSKMFEILFHRNSQHYTLDFLSPKTFQQILEYAYTATLQAKAEDLDDLLYAAEILEIEYLEEQCLKMLETIQASDDNDTEATMADGGAEEEEDR

SEQ ID NO: 98514 - protein, 55 aa, Homo sapiens
  Payload ID: 19665
  Gene Name: zinc finger and BTB domain containing 16
  ENSP ID: ENSP00000445047
  MOD_RES (1)..(1): Any amino acid
XGGLLPQGFIQRELFSKLGELAVGMKSESRTIGEQCSVCGVELPDNEAVEQHRVF

SEQ ID NO: 98515 - protein, 810 aa, Homo sapiens
  Payload ID: 19666
  Gene Name: zinc finger and BTB domain containing 17
  Uniprot ID: Q13105
  ENSP ID: ENSP00000364885
MDFPQHSQHVLEQLNQQRQLGLLCDCTFVVDGVHFKAHKAVLAACSEYFKMLFVDQKDVVHLDISNAAGLGQVLEFMYTAKLSLSPENVDDVLAVATFLQMQDIITACHALKSLAEPATSPGGNAEALATEGGDKRAKEEKVATSTLSRLEQAGRSTPIGPSRDLKEERGGQAQSAASGAEQTEKADAPREPPPVELKPDPTSGMAAAEAEAALSESSEQEMEVEPARKGEEEQKEQEEQEEEGAGPAEVKEEGSQLENGEAPEENENEESAGTDSGQELGSEARGLRSGTYGDRTESKAYGSVIHKCEDCGKEFTHTGNFKRHIRIHTGEKPFSCRECSKAFSDPAACKAHEKTHSPLKPYGCEECGKSYRLISLLNLHKKRHSGEARYRCEDCGKLFTTSGNLKRHQLVHSGEKPYQCDYCGRSFSDPTSKMRHLETHDTDKEHKCPHCDKKFNQVGNLKAHLKIHIADGPLKCRECGKQFTTSGNLKRHLRIHSGEKPYVCIHCQRQFADPGALQRHVRIHTGEKPCQCVMCGKAFTQASSLIAHVRQHTGEKPYVCERCGKRFVQSSQLANHIRHHDNIRPHKCSVCSKAFVNVGDLSKHIIIHTGEKPYLCDKCGRGFNRVDNLRSHVKTVHQGKAGIKILEPEEGSEVSVVTVDDMVTLATEALAATAVTQLTGPATLPAVVPVGAAVTADETEVLKAEISKAVKQVQEEDPNTHILYACDSCGDKFLDANSLAQHVRIHTAQALVMFQTDADFYQQYGPGGTWPAGQVLQAGELVFRPRDGAEGQPALAETSPTAPECPPPAE

SEQ ID NO: 98516 - protein, 803 aa, Homo sapiens
  Payload ID: 19666
  Gene Name: zinc finger and BTB domain containing 17
  Uniprot ID: Q13105
  ENSP ID: ENSP00000364895
MDFPQHSQHVLEQLNQQRQLGLLCDCTFVVDGVHFKAHKAVLAACSEYFKMLFVDQKDVVHLDISNAAGLGQVLEFMYTAKLSLSPENVDDVLAVATFLQMQDIITACHALKSLAEPATSPGGNAEALATEGGDKRAKEEKVATSTLSRLEQAGRSTPIGPSRDLKEERGGQAQSAASGAEQTEKADAPREPPPVELKPDPTSGMAAAEAEAALSESSEQEMEVEPARKGEEEQKEQEEQEEEGAGPAEVKEEGSQLENGEAPEENENEESAGTDSGQELGSEARGLRSGTYGDRTESKAYGSVIHKCEDCGKEFTHTGNFKRHIRIHTGEKPFSCRECSKAFSDPAACKAHEKTHSPLKPYGCEECGKSYRLISLLNLHKKRHSGEARYRCEDCGKLFTTSGNLKRHQLVHSGEKPYQCDYCGRSFSDPTSKMRHLETHDTDKEHKCPHCDKKFNQVGNLKAHLKIHIADGPLKCRECGKQFTTSGNLKRHLRIHSGEKPYVCIHCQRQFADPGALQRHVRIHTGEKPCQCVMCGKAFTQASSLIAHVRQHTGEKPYVCERCGKRFVQSSQLANHIRHHDNIRPHKCSVCSKAFVNVGDLSKHIIIHTGEKPYLCDKCGRGFNRVDNLRSHVKTVHQGKAGIKILEPEEGSEVSVVTVDDMVTLATEALAATAVTQLTVVPVGAAVTADETEVLKAEISKAVKQVQEEDPNTHILYACDSCGDKFLDANSLAQHVRIHTAQALVMFQTDADFYQQYGPGGTWPAGQVLQAGELVFRPRDGAEGQPALAETSPTAPECPPPAE

SEQ ID NO: 98517 - protein, 210 aa, Homo sapiens
  Payload ID: 19666
  Gene Name: zinc finger and BTB domain containing 17
  ENSP ID: ENSP00000400827
  MOD_RES (1)..(1): Any amino acid
XSKHIIIHTGEKPYLCDKCGRGFNRVDNLRSHVKTVHQGKAGIKILEPEEGSEVSVVTVDDMVTLATEALAATAVTQLTGPATLPAVVPVGAAVTADETEVLKAEISKAVKQVQEEDPNTHILYACDSCGDKFLDANSLAQHVRIHTAQALVMFQTDADFYQQYGPGGTWPAGQVLQAGELVFRPRDGAEGQPALAETSPTAPECPPPAE

SEQ ID NO: 98518 - protein, 241 aa, Homo sapiens
  Payload ID: 19666
  Gene Name: zinc finger and BTB domain containing 17
  ENSP ID: ENSP00000408483
  MOD_RES (1)..(1): Any amino acid
XEALPVRLLRPLLLRPHFQDAPPGDPRHGQGAQVPTLRQEVQPGNLKRHLRIHSGEKPYVCIHCQRQFADPGALQRHVRIHTGEKPCQCVMCGKAFTQASSLIAHVRQHTGEKPYVCERCGKRFVQSSQLANHIRHHDNIRPHKCSVCSKAFVNVGDLSKHIIIHTGEKPYLCDKCGRGFNRVDNLRSHVKTVHQGKAGIKILEPEEGSEVSVVTVDDMVTLATEALAATAVTQLTVVPVG

SEQ ID NO: 98519 - protein, 721 aa, Homo sapiens
  Payload ID: 19666
  Gene Name: zinc finger and BTB domain containing 17
  Uniprot ID: Q13105
  ENSP ID: ENSP00000438529
MMCWPWPLSSKCRTSSRPAMPSSHLLSRLPALGEMRRPWPQKVCPVPSPGGDKRAKEEKVATSTLSRLEQAGRSTPIGPSRDLKEERGGQAQSAASGAEQTEKADAPREPPPVELKPDPTSGMAAAEAEAALSESSEQEMEVEPARKGEEEQKEQEEQEEEGAGPAEVKEEGSQLENGEAPEENENEESAGTDSGQELGSEARGLRSGTYGDRTESKAYGSVIHKCEDCGKEFTHTGNFKRHIRIHTGEKPFSCRECSKAFSDPAACKAHEKTHSPLKPYGCEECGKSYRLISLLNLHKKRHSGEARYRCEDCGKLFTTSGNLKRHQLVHSGEKPYQCDYCGRSFSDPTSKMRHLETHDTDKEHKCPHCDKKFNQVGNLKAHLKIHIADGPLKCRECGKQFTTSGNLKRHLRIHSGEKPYVCIHCQRQFADPGALQRHVRIHTGEKPCQCVMCGKAFTQASSLIAHVRQHTGEKPYVCERCGKRFVQSSQLANHIRHHDNIRPHKCSVCSKAFVNVGDLSKHIIIHTGEKPYLCDKCGRGFNRVDNLRSHVKTVHQGKAGIKILEPEEGSEVSVVTVDDMVTLATEALAATAVTQLTVVPVGAAVTADETEVLKAEISKAVKQVQEEDPNTHILYACDSCGDKFLDANSLAQHVRIHTAQALVMFQTDADFYQQYGPGGTWPAGQVLQAGELVFRPRDGAEGQPALAETSPTAPECPPPAE

SEQ ID NO: 98520 - protein, 531 aa, Homo sapiens
  Payload ID: 19667
  Gene Name: zinc finger and BTB domain containing 18
  Uniprot ID: Q99592
  ENSP ID: ENSP00000351539
MCPKGYEDSMEFPDHSRHLLQCLSEQRHQGFLCDCTVLVGDAQFRAHRAVLASCSMYFHLFYKDQLDKRDIVHLNSDIVTAPAFALLLEFMYEGKLQFKDLPIEDVLAAASYLHMYDIVKVCKKKLKEKATTEADSTKKEEDASSCSDKVESLSDGSSHIAGDLPSDEDEGEDEKLNILPSKRDLAAEPGNMWMRLPSDSAGIPQAGGEAEPHATAAGKTVASPCSSTESLSQRSVTSVRDSADVDCVLDLSVKSSLSGVENLNSSYFSSQDVLRSNLVQVKVEKEASCDESDVGTNDYDMEHSTVKESVSTNNRVQYEPAHLAPLREDSVLRELDREDKASDDEMMTPESERVQVEGGMESSLLPYVSNILSPAGQIFMCPLCNKVFPSPHILQIHLSTHFREQDGIRSKPAADVNVPTCSLCGKTFSCMYTLKRHERTHSGEKPYTCTQCGKSFQYSHNLSRHAVVHTREKPHACKWCERRFTQSGDLYRHIRKFHCELVNSLSVKSEALSLPTVRDWTLEDSSQELWK

SEQ ID NO: 98521 - protein, 522 aa, Homo sapiens
  Payload ID: 19667
  Gene Name: zinc finger and BTB domain containing 18
  Uniprot ID: Q99592
  ENSP ID: ENSP00000481278
MEFPDHSRHLLQCLSEQRHQGFLCDCTVLVGDAQFRAHRAVLASCSMYFHLFYKDQLDKRDIVHLNSDIVTAPAFALLLEFMYEGKLQFKDLPIEDVLAAASYLHMYDIVKVCKKKLKEKATTEADSTKKEEDASSCSDKVESLSDGSSHIAGDLPSDEDEGEDEKLNILPSKRDLAAEPGNMWMRLPSDSAGIPQAGGEAEPHATAAGKTVASPCSSTESLSQRSVTSVRDSADVDCVLDLSVKSSLSGVENLNSSYFSSQDVLRSNLVQVKVEKEASCDESDVGTNDYDMEHSTVKESVSTNNRVQYEPAHLAPLREDSVLRELDREDKASDDEMMTPESERVQVEGGMESSLLPYVSNILSPAGQIFMCPLCNKVFPSPHILQIHLSTHFREQDGIRSKPAADVNVPTCSLCGKTFSCMYTLKRHERTHSGEKPYTCTQCGKSFQYSHNLSRHAVVHTREKPHACKWCERRFTQSGDLYRHIRKFHCELVNSLSVKSEALSLPTVRDWTLEDSSQELWK

SEQ ID NO: 98522 - protein, 514 aa, Homo sapiens
  Payload ID: 19668
  Gene Name: zinc finger and BTB domain containing 2
  Uniprot ID: Q8N680
  ENSP ID: ENSP00000323183
MDLANHGLILLQQLNAQREFGFLCDCTVAIGDVYFKAHKSVLASFSNYFKMLFVHQTSECVRLKPTDIQPDIFSYLLHLMYTGKMAPQLIDPVRLEQGIKFLHAYPLIQEASLASQGAFSHPDQVFPLASSLYGIQIADHQLRQATKIASAPEKLGRDPRPQTSRISQEQVPEASQLSQLTSNLAQVNRTNMTPSDPLQTSLSPELVSTPVPPPPPGEETNLEASSSDEQPASLTIAHVKPSIMKRNGSFPKYYACHLCGRRFTLRSSLREHLQIHTGVPFTSSQQGESRVPLTLCSNAADLGKDAMEVPEAGMISDSELQHISDSPIIDGQQQSETPPPSDIADIDNLEQADQEREVKRRKYECTICGRKFIQKSHWREHMYIHTGKPFKCSTCDKSFCRANQAARHVCLNQSIDTYTMVDKQTLELCTFEEGSQMDNMLVQTNKPYKCNLCDKTFSTPNEVVKHSCQNQNSDVFALDEGRSILLGSGDSEVTEPDHPVLASIKKEQETVLLD

SEQ ID NO: 98523 - protein, 668 aa, Homo sapiens
  Payload ID: 19669
  Gene Name: zinc finger and BTB domain containing 20
  Uniprot ID: Q9HC78
  ENSP ID: ENSP00000349803
MTERIHSINLHNFSNSVLETLNEQRNRGHFCDVTVRIHGSMLRAHRCVLAAGSPFFQDKLLLGYSDIEIPSVVSVQSVQKLIDFMYSGVLRVSQSEALQILTAASILQIKTVIDECTRIVSQNVGDVFPGIQDSGQDTPRGTPESGTSGQSSDTESGYLQSHPQHSVDRIYSALYACSMQNGSGERSFYSGAVVSHHETALGLPRDHHMEDPSWITRIHERSQQMERYLSTTPETTHCRKQPRPVRIQTLVGNIHIKQEMEDDYDYYGQQRVQILERNESEECTEDTDQAEGTESEPKGESFDSGVSSSIGTEPDSVEQQFGPGAARDSQAEPTQPEQAAEAPAEGGPQTNQLETGASSPERSNEVEMDSTVITVSNSSDKSVLQQPSVNTSIGQPLPSTQLYLRQTETLTSNLRMPLTLTSNTQVIGTAGNTYLPALFTTQPAGSGPKPFLFSLPQPLAGQQTQFVTVSQPGLSTFTAQLPAPQPLASSAGHSTASGQGEKKPYECTLCNKTFTAKQNYVKHMFVHTGEKPHQCSICWRSFSLKDYLIKHMVTHTGVRAYQCSICNKRFTQKSSLNVHMRLHRGEKSYECYICKKKFSHKTLLERHVALHSASNGTPPAGTPPGARAGPPGVVACTEGTTYVCSVCPAKFDQIEQFNDHMRMHVSDG

SEQ ID NO: 98524 - protein, 668 aa, Homo sapiens; identical to SEQ ID NO: 98523
  Payload ID: 19669
  Gene Name: zinc finger and BTB domain containing 20
  Uniprot ID: Q9HC78
  ENSP ID: ENSP00000377375

SEQ ID NO: 98525 - protein, 668 aa, Homo sapiens; identical to SEQ ID NO: 98523
  Payload ID: 19669
  Gene Name: zinc finger and BTB domain containing 20
  Uniprot ID: Q9HC78
  ENSP ID: ENSP00000417307

SEQ ID NO: 98526 - protein, 668 aa, Homo sapiens; identical to SEQ ID NO: 98523
  Payload ID: 19669
  Gene Name: zinc finger and BTB domain containing 20
  Uniprot ID: Q9HC78
  ENSP ID: ENSP00000418092

SEQ ID NO: 98527 - protein, 741 aa, Homo sapiens
  Payload ID: 19669
  Gene Name: zinc finger and BTB domain containing 20
  Uniprot ID: Q9HC78
  ENSP ID: ENSP00000419153
MLERKKPKTAENQKASEENEITQPGGSSAKPGLPCLNFEAVLSPDPALIHSTHSLTNSHAHTGSSDCDISCKGMTERIHSINLHNFSNSVLETLNEQRNRGHFCDVTVRIHGSMLRAHRCVLAAGSPFFQDKLLLGYSDIEIPSVVSVQSVQKLIDFMYSGVLRVSQSEALQILTAASILQIKTVIDECTRIVSQNVGDVFPGIQDSGQDTPRGTPESGTSGQSSDTESGYLQSHPQHSVDRIYSALYACSMQNGSGERSFYSGAVVSHHETALGLPRDHHMEDPSWITRIHERSQQMERYLSTTPETTHCRKQPRPVRIQTLVGNIHIKQEMEDDYDYYGQQRVQILERNESEECTEDTDQAEGTESEPKGESFDSGVSSSIGTEPDSVEQQFGPGAARDSQAEPTQPEQAAEAPAEGGPQTNQLETGASSPERSNEVEMDSTVITVSNSSDKSVLQQPSVNTSIGQPLPSTQLYLRQTETLTSNLRMPLTLTSNTQVIGTAGNTYLPALFTTQPAGSGPKPFLFSLPQPLAGQQTQFVTVSQPGLSTFTAQLPAPQPLASSAGHSTASGQGEKKPYECTLCNKTFTAKQNYVKHMFVHTGEKPHQCSICWRSFSLKDYLIKHMVTHTGVRAYQCSICNKRFTQKSSLNVHMRLHRGEKSYECYICKKKFSHKTLLERHVALHSASNGTPPAGTPPGARAGPPGVVACTEGTTYVCSVCPAKFDQIEQFNDHMRMHVSDG

SEQ ID NO: 98528 - protein, 19 aa, Homo sapiens
  Payload ID: 19669
  Gene Name: zinc finger and BTB domain containing 20
  ENSP ID: ENSP00000419480
MLERKKPKTAENQKASEEN

SEQ ID NO: 98529 - protein, 668 aa, Homo sapiens; identical to SEQ ID NO: 98523
  Payload ID: 19669
  Gene Name: zinc finger and BTB domain containing 20
  Uniprot ID: Q9HC78
  ENSP ID: ENSP00000419902

SEQ ID NO: 98530 - protein, 668 aa, Homo sapiens; identical to SEQ ID NO: 98523
  Payload ID: 19669
  Gene Name: zinc finger and BTB domain containing 20
  Uniprot ID: Q9HC78
  ENSP ID: ENSP00000420324

SEQ ID NO: 98531 - protein, 57 aa, Homo sapiens
  Payload ID: 19669
  Gene Name: zinc finger and BTB domain containing 20
  ENSP ID: ENSP00000420684
MTERIHSINLHNFSNSVLETLNEQRNRGHFCDVTVRIHGSMLRAHRCVLAAGSPFFQ

SEQ ID NO: 98532 - protein, 1066 aa, Homo sapiens
  Payload ID: 19670
  Gene Name: zinc finger and BTB domain containing 21
  Uniprot ID: Q9ULJ3
  ENSP ID: ENSP00000308759
MEGLLHYINPAHAISLLSALNEERLKGQLCDVLLIVGDQKFRAHKNVLAASSEYFQSLFTNKENESQTVFQLDFCEPDAFDNVLNYIYSSSLFVEKSSLAAVQELGYSLGISFLTNIVSKTPQAPFPTCPNRKKVFVEDDENSSQKRSVIVCQSRNEAQGKTVSQNQPDVSHTSRPSPSIAVKANTNKPHVPKPIEPLHNLSLTEKSWPKDSSVVYAKSLEHSGSLDDPNRISLVKRNAVLPSKPLQDREAMDDKPGVSGQLPKGKALELALKRPRPPVLSVCSSSETPYLLKETNKGNGQGEDRNLLYYSKLGLVIPSSGSGSGNQSIDRSGPLVKSLLRRSLSMDSQVPVYSPSIDLKSSQGSSSVSSDAPGNVLCALSQKSSLKDCSEKTALDDRPQVLQPHRLRSFSASQSTDREGASPVTEVRIKTEPSSPLSDPSDIIRVTVGDAATTAAASSSSVTRDLSLKTEDDQKDMSRLPAKRRFQADRRLPFKKLKVNEHGSPVSEDNFEEGSSPTLLDADFPDSDLNKDEFGELEGTRPNKKFKCKHCLKIFRSTAGLHRHVNMYHNPEKPYACDICHKRFHTNFKVWTHCQTQHGIVKNPSPASSSHAVLDEKFQRKLIDIVREREIKKALIIKLRRGKPGFQGQSSSQAQQVIKRNLRSRAKGAYICTYCGKAYRFLSQFKQHIKMHPGEKPLGVNKVAKPKEHAPLASPVENKEVYQCRLCNAKLSSLLEQGSHERLCRNAAVCPYCSLRFFSPELKQEHESKCEYKKLTCLECMRTFKSSFSIWRHQVEVHNQNNMAPTENFSLPVLDHNGDVTGSSRPQSQPEPNKVNHIVTTKDDNVFSDSSEQVNFDSEDSSCLPEDLSLSKQLKIQVKEEPVEEAEEEAPEASTAPKEAGPSKEASLWPCEKCGKMFTVHKQLERHQELLCSVKPFICHVCNKAFRTNFRLWSHFQSHMSQASEESAHKESEVCPVPTNSPSPPPLPPPPPLPKIQPLEPDSPTGLSENPTPATEKLFVPQESDTLFYHAPPLSAITFKRQFMCKLCHRTFKTAFSLWSHEQTHN

SEQ ID NO: 98533 - protein, 49 aa, Homo sapiens
  Payload ID: 19670
  Gene Name: zinc finger and BTB domain containing 21
  ENSP ID: ENSP00000381510
MEGLLHYINPAHAISLLSALNEERLKGQLCDVLLIVGDQKFRAHKNVLA

SEQ ID NO: 98534 - protein, 1066 aa, Homo sapiens; identical to SEQ ID NO: 98532
  Payload ID: 19670
  Gene Name: zinc finger and BTB domain containing 21
  Uniprot ID: Q9ULJ3
  ENSP ID: ENSP00000381512

SEQ ID NO: 98535 - protein, 865 aa, Homo sapiens
  Payload ID: 19670
  Gene Name: zinc finger and BTB domain containing 21
  Uniprot ID: Q9ULJ3
  ENSP ID: ENSP00000381517
MEGLLHYINPAHAISLLSALNEERLKGQLCDVLLIVGDQKFRAHKNVLAASSEYFQSLFTNKENESQTVFQLDFCEPDAFDNVLNYIYSSSLFVEKSSLAAVQELGYSLGISFLTNIVSKTPQAPFPTCPNRKKVFVEDDENSSQKRSVIVCQSRNEAQGKTVSQNQPDVSHTSRPSPSIAVKANTNKPHVPKPIEPLHNLSLTEKSWPKDSSVVYAKSLEHSGSLDDPNRISLVKRNAVLPSKPLQDREAMDDKPGVSGQLPKGKALELALKRPRPPVLSVCSSSETPYLLKETNKGNGQGEDRNLLYYSKLGLVIPSSGSGSGNQSIDRSGPLVKSLLRRSLSMDSQVPVYSPSIDLKSSQGSSSVSSDAPGNVLCALSQKSSLKDCSEKTALDDRPQVLQPHRLRSFSASQSTDREGASPVTEVRIKTEPSSPLSDPSDIIRVTVGDAATTAAASSSSVTRDLSLKTEDDQKDMSRLPAKRRFQADRRLPFKKLKVNEHGSPVSEDNFEEGSSPTLLDADFPDSDLNKDEFEQGSHERLCRNAAVCPYCSLRFFSPELKQEHESKCEYKKLTCLECMRTFKSSFSIWRHQVEVHNQNNMAPTENFSLPVLDHNGDVTGSSRPQSQPEPNKVNHIVTTKDDNVFSDSSEQVNFDSEDSSCLPEDLSLSKQLKIQVKEEPVEEAEEEAPEASTAPKEAGPSKEASLWPCEKCGKMFTVHKQLERHQELLCSVKPFICHVCNKAFRTNFRLWSHFQSHMSQASEESAHKESEVCPVPTNSPSPPPLPPPPPLPKIQPLEPDSPTGLSENPTPATEKLFVPQESDTLFYHAPPLSAITFKRQFMCKLCHRTFKTAFSLWSHEQTHN

SEQ ID NO: 98536 - protein, 1066 aa, Homo sapiens; identical to SEQ ID NO: 98532
  Payload ID: 19670
  Gene Name: zinc finger and BTB domain containing 21
  Uniprot ID: Q9ULJ3
  ENSP ID: ENSP00000381523

SEQ ID NO: 98537 - protein, 118 aa, Homo sapiens
  Payload ID: 19670
  Gene Name: zinc finger and BTB domain containing 21
  ENSP ID: ENSP00000387788
MEGLLHYINPAHAISLLSALNEERLKGQLCDVLLIVGDQKFRAHKNVLAASSEYFQSLFTNKENESQTVFQLDFCEPDAFDNVLNYIYSSSLFVEKSSLAAVQELGYSLGISFLTNIV

SEQ ID NO: 98538 - protein, 49 aa, Homo sapiens; identical to SEQ ID NO: 98533
  Payload ID: 19670
  Gene Name: zinc finger and BTB domain containing 21
  ENSP ID: ENSP00000395186

SEQ ID NO: 98539 - protein, 634 aa, Homo sapiens
  Payload ID: 19671
  Gene Name: zinc finger and BTB domain containing 22
  Uniprot ID: O15209
  ENSP ID: ENSP00000372683
MEPSPLSPSGAALPLPLSLAPPPLPLPAAAVVHVSFPEVTSALLESLNQQRLQGQLCDVSIRVQGREFRAHRAVLAASSPYFHDQVLLKGMTSISLPSVMDPGAFETVLASAYTGRLSMAAADIVNFLTVGSVLQMWHIVDKCTELLREGRASATTTITTAAATSVTVPGAGVPSGSGGTVAPATMGSARSHASSRASENQSPSSSNYFSPRESTDFSSSSQEAFAASAVGSGERRGGGPVFPAPVVGSGGATSGKLLLEADELCDDGGDGRGAVVPGAGLRRPTYTPPSIMPQKHWVYVKRGGNCPAPAPLVPQDPDLEEEEEEEDLVLTCEDDEDEELGGSSRVPVGGGPEATLSISDVRTLSEPPDKGEEQVNFCESSNDFGPYEGGGPVAGLDDSGGPTPSSYAPSHPPRPLLPLDMQGNQILVFPSSSSSSSSQAPGQPPGNQAEHGAVTVGGTSVGSLGVPGSVGGVPGGTGSGDGNKIFLCHCGKAFSHKSMRDRHVNMHLNLRPFDCPVCNKKFKMKHHLTEHMKTHTGLKPYECGVCAKKFMWRDSFMRHRGHCERRHRLGGVGAVPGPGTPTGPSLPSKRESPGVGGGSGDEASAATPPSSRRVWSPPRVHKVEMGFGGGGGAN

SEQ ID NO: 98540 - protein, 634 aa, Homo sapiens; identical to SEQ ID NO: 98539
  Payload ID: 19671
  Gene Name: zinc finger and BTB domain containing 22
  Uniprot ID: O15209
  ENSP ID: ENSP00000388191

SEQ ID NO: 98541 - protein, 149 aa, Homo sapiens
  Payload ID: 19671
  Gene Name: zinc finger and BTB domain containing 22
  ENSP ID: ENSP00000391135
MEPSPLSPSGAALPLPLSLAPPPLPLPAAAVVHVSFPEVTSALLESLNQQRLQGQLCDVSIRVQGREFRAHRAVLAASSPYFHDQVLLKGMTSISLPSVMDPGAFETVLASAYTGRLSMAAADIVNFLTVGSVLQMWHIVDKCTELLRE

SEQ ID NO: 98542 - protein, 634 aa, Homo sapiens; identical to SEQ ID NO: 98539
  Payload ID: 19671
  Gene Name: zinc finger and BTB domain containing 22
  Uniprot ID: O15209
  ENSP ID: ENSP00000393514

SEQ ID NO: 98543 - protein, 149 aa, Homo sapiens; identical to SEQ ID NO: 98541
  Payload ID: 19671
  Gene Name: zinc finger and BTB domain containing 22
  ENSP ID: ENSP00000394349

SEQ ID NO: 98544 - protein, 634 aa, Homo sapiens
  Payload ID: 19671
  Gene Name: zinc finger and BTB domain containing 22
  Uniprot ID: O15209
  ENSP ID: ENSP00000396292
MEPSPLSPSGAALPLPLSLAPPPLPLPAAAVVHVSFPEVTSALLESLNQQRLQGQLCDVSIRVQGREFRAHRAVLAASSPYFHDQVLLKGMTSISLPSVMDPGAFETVLASAYTGRLSMAAADIVNFLTVGSVLQMWHIVDKCTELLREGRASATTTITTAAATSVTVPGAGVPSGSGGTVAPATMGSARSHASSRASENQSPSSSNYFSPRESTDFSSSSQEAFAASAVGSGERRGGGPVFPAPVVGSGGATSGKLLLEADELCDDGGDGRGAVVPGAGLRRPTYTPPSIMPQKHWVYVKRGGNCPAPTPLVPQDPDLEEEEEEEDLVLTCEDDEDEELGGSSRVPVGGGPEATLSISDVRTLSEPPDKGEEQVNFCESSNDFGPYEGGGPVAGLDDSGGPTPSSYAPSHPPRPLLPLDMQGNQILVFPSSSSSSSSQAPGQPPGNQAEHGAVTVGGTSVGSLGVPGSVGGVPGGTGSGDGNKIFLCHCGKAFSHKSMRDRHVNMHLNLRPFDCPVCNKKFKMKHHLTEHMKTHTGLKPYECGVCAKKFMWRDSFMRHRGHCERRHRLGGVGAVPGPGTPTGPSLPSKRESPGVGGGSGDEASAATPPSSRRVWSPPRVHKVEMGFGGGGGAN

SEQ ID NO: 98545 - protein, 149 aa, Homo sapiens; identical to SEQ ID NO: 98541
  Payload ID: 19671
  Gene Name: zinc finger and BTB domain containing 22
  ENSP ID: ENSP00000402785

SEQ ID NO: 98546 - protein, 634 aa, Homo sapiens; identical to SEQ ID NO: 98544
  Payload ID: 19671
  Gene Name: zinc finger and BTB domain containing 22
  Uniprot ID: O15209
  ENSP ID: ENSP00000404403

SEQ ID NO: 98547 - protein, 634 aa, Homo sapiens; identical to SEQ ID NO: 98544
  Payload ID: 19671
  Gene Name: zinc finger and BTB domain containing 22
  Uniprot ID: O15209
  ENSP ID: ENSP00000407545

SEQ ID NO: 98548 - protein, 149 aa, Homo sapiens; identical to SEQ ID NO: 98541
  Payload ID: 19671
  Gene Name: zinc finger and BTB domain containing 22
  ENSP ID: ENSP00000412427

SEQ ID NO: 98549 - protein, 149 aa, Homo sapiens; identical to SEQ ID NO: 98541
  Payload ID: 19671
  Gene Name: zinc finger and BTB domain containing 22
  ENSP ID: ENSP00000413172

SEQ ID NO: 98550 - protein, 697 aa, Homo sapiens
  Payload ID: 19672
  Gene Name: zinc finger and BTB domain containing 24
  Uniprot ID: O43167
  ENSP ID: ENSP00000230122
MAETSPEPSGQLVVHSDAHSDTVLASFEDQRKKGFLCDITLIVENVHFRAHKALLAASSEYFSMMFAEEGEIGQSIYMLEGMVADTFGILLEFIYTGYLHASEKSTEQILATAQFLKVYDLVKAYTDFQNNHSSPKPTTLNTAGAPVVVISNKKNDPPKRKRGRPKKVNTLQEEKSELAAEEEIQLRVNNSVQNRQNFVVKGDSGVLNEQIAAKEKEESEPTCEPSREEEMPVEKDENYDPKTEDGQASQSRYSKRRIWRSVKLKDYKLVGDQEDHGSAKRICGRRKRPGGPEARCKDCGKVFKYNHFLAIHQRSHTGERPFKCNECGKGFAQKHSLQVHTRMHTGERPYTCTVCSKALTTKHSLLEHMSLHSGQKSFTCDQCGKYFSQNRQLKSHYRVHTGHSLPECKDCHRKFMDVSQLKKHLRTHTGEKPFTCEICGKSFTAKSSLQTHIRIHRGEKPYSCGICGKSFSDSSAKRRHCILHTGKKPFSCPECNLQFARLDNLKAHLKIHSKEKHASDASSISGSSNTEEVRNILQLQPYQLSTSGEQEIQLLVTDSVHNINFMPGPSQGISIVTAESSQNMTADQAANLTLLTQQPEQLQNLILSAQQEQTEHIQSLNMIESQMGPSQTEPVHVITLSKETLEHLHAHQEQTEELHLATSTSDPAQHLQLTQEPGPPPPTHHVPQPTPLGQEQS

SEQ ID NO: 98551 - protein, 435 aa, Homo sapiens
  Payload ID: 19673
  Gene Name: zinc finger and BTB domain containing 25
  Uniprot ID: P24278
  ENSP ID: ENSP00000378204
MDTASHSLVLLQQLNMQREFGFLCDCTVAIGDVYFKAHRAVLAAFSNYFKMIFIHQTSECIKIQPTDIQPDIFSYLLHIMYTGKGPKQIVDHSRLEEGIRFLHADYLSHIATEMNQVFSPETVQSSNLYGIQISTTQKTVVKQGLEVKEAPSSNSGNRAAVQGDHPQLQLSLAIGLDDGTADQQRACPATQALEEHQKPPVSIKQERCDPESVISQSHPSPSSEVTGPTFTENSVKIHLCHYCGERFDSRSNLRQHLHTHVSGSLPFGVPASILESNDLGEVHPLNENSEALECRRLSSFIVKENEQQPDHTNRGTTEPLQISQVSLISKDTEPVELNCNFSFSRKRKMSCTICGHKFPRKSQLLEHMYTHKGKSYRYNRCQRFGNALAQRFQPYCDSWSDVSLKSSRLSQEHLDLPCALESELTQENVDTILVE

SEQ ID NO: 98552 - protein, 86 aa, Homo sapiens
  Payload ID: 19673
  Gene Name: zinc finger and BTB domain containing 25
  ENSP ID: ENSP00000450718
MDTASHSLVLLQQLNMQREFGFLCDCTVAIGDVYFKAHRAVLAAFSNYFKMIFIHQTRQQITHLEVIKELEAAGCLCCSLDGLSQG

SEQ ID NO: 98553 - protein, 94 aa, Homo sapiens
  Payload ID: 19673
  Gene Name: zinc finger and BTB domain containing 25
  ENSP ID: ENSP00000451046
MDTASHSLVLLQQLNMQREFGFLCDCTVAIGDVYFKAHRAVLAAFSNYFKMIFIHQTRKRKMSCTICGHKFPRKSQLLEHMYTHKDSKSPTLRS

SEQ ID NO: 98554 - protein, 435 aa, Homo sapiens; identical to SEQ ID NO: 98551
  Payload ID: 19673
  Gene Name: zinc finger and BTB domain containing 25
  Uniprot ID: P24278
  ENSP ID: ENSP00000476746

SEQ ID NO: 98555 - protein, 441 aa, Homo sapiens
  Payload ID: 19674
  Gene Name: zinc finger and BTB domain containing 26
  Uniprot ID: Q9HCK0
  ENSP ID: ENSP00000362758
MSERSDLLHFKFENYGDSMLQKMNKLREENKFCDVTVLIDDIEVQGHKIVFAAGSPFLRDQFLLNDSREVKISILQSSEVGRQLLLSCYSGVLEFPEMELVNYLTAASFLQMSHIVERCTQALWKFIKPKQPMDSKEGCEPQSASPQSKEQQGDARGSPKQDSPCIHPSEDSMDMEDSDIQIVKVESIGDVSEVRSKKDQNQFISSEPTALHSSEPQHSLINSTVENRVSEIEQNHLHNYALSYTGSDNIIMASKDVFGPNIRGVDKGLQWHHQCPKCTRVFRHLENYANHLKMHKLFMCLLCGKTFTQKGNLHRHMRVHAGIKPFQCKICGKTFSQKCSLQDHLNLHSGDKPHKCNYCDMVFAHKPVLRKHLKQLHGKNSFDNANERNVQDLTVDFDSFACTTVTDSKGCQPQPDATQVLDAGKLAQAVLNLRNDSTCVN

SEQ ID NO: 98556 - protein, 441 aa, Homo sapiens; identical to SEQ ID NO: 98555
  Payload ID: 19674
  Gene Name: zinc finger and BTB domain containing 26
  Uniprot ID: Q9HCK0
  ENSP ID: ENSP00000362760

SEQ ID NO: 98557 - protein, 574 aa, Homo sapiens
  Payload ID: 19675
  Gene Name: zinc finger and BTB domain containing 3
  Uniprot ID: Q9H5J0
  ENSP ID: ENSP00000378286
MLREFSKWGVEASPGKAWERKRSLLRGAVGRYRGATGGDLFWAPFPSWGTMEFPEHSQQLLQSLREQRSQGFLCDCTVMVGSTQFLAHRAVLASCSPFFQLFYKERELDKRDLVCIHNEIVTAPAFGLLLDFMYAGQLTLRGDTPVEDVLAAASYLHMNDIVKVCKRRLQARALAEADSTKKEEETNSQLPSLEFLSSTSRGTQPSLASAETSGHWGKGEWKGSAAPSPTVRPPDEPPMSSGADTTQPGMEVDAPHLRAPHPPVADVSLASPSSSTETIPTNYFSSGISAVSLEPLPSLDVGPESLRVVEPKDPGGPLQGFYPPASAPTSAPAPVSAPVPSQAPAPAEAELVQVKVEAIVISDEETDVSDEQPQGPERAFPSGGAVYGAQPSQPEAFEDPGAAGLEEVGPSDHFLPTDPHLPYHLLPGAGQYHRGLVTSPLPAPASLHEPLYLSSEYEAAPGSFGVFTEDVPTCKTCGKTFSCSYTLRRHATVHTRERPYECRYCLRSYTQSGDLYRHIRKAHNEDLAKRSKPDPEVGPLLGVQPLPGSPTADRQSSSGGGPPKDFVLAPKTNI

SEQ ID NO: 98558 - protein, 115 aa, Homo sapiens
  Payload ID: 19675
  Gene Name: zinc finger and BTB domain containing 3
  ENSP ID: ENSP00000432731
MEFPEHSQQLLQSLREQRSQGFLCDCTVMVGSTQFLAHRAVLASCSPFFQLFYKERELDKRDLVCIHNEIVTAPAFGLLLDFMYAGQLTLRGDTPVEDVLAAASYLHMNDIVKVC

SEQ ID NO: 98559 - protein, 3 aa, Homo sapiens
  Payload ID: 19675
  Gene Name: zinc finger and BTB domain containing 3
  ENSP ID: ENSP00000433691
  MOD_RES (1)..(1): Any amino acid
XNI

SEQ ID NO: 98560 - protein, 487 aa, Homo sapiens
  Payload ID: 19676
  Gene Name: zinc finger and BTB domain containing 32
  Uniprot ID: Q9Y2Y4
  ENSP ID: ENSP00000262630
MSLPPIRLPSPYGSDRLVQLAARLRPALCDTLITVGSQEFPAHSLVLAGVSQQLGRRGQWALGEGISPSTFAQLLNFVYGESVELQPGELRPLQEAARALGVQSLEEACWRARGDRAKKPDPGLKKHQEEPEKPSRNPERELGDPGEKQKPEQVSRTGGREQEMLHKHSPPRGRPEMAGATQEAQQEQTRSKEKRLQAPVGQRGADGKHGVLTWLRENPGGSEESLRKLPGPLPPAGSLQTSVTPRPSWAEAPWLVGGQPALWSILLMPPRYGIPFYHSTPTTGAWQEVWREQRIPLSLNAPKGLWSQNQLASSSPTPGSLPQGPAQLSPGEMEESDQGHTGALATCAGHEDKAGCPPRPHPPPAPPARSRPYACSVCGKRFSLKHQMETHYRVHTGEKPFSCSLCPQRSRDFSAMTKHLRTHGAAPYRCSLCGAGCPSLASMQAHMRGHSPSQLPPGWTIRSTFLYSSSRPSRPSTSPCCPSSSTT

SEQ ID NO: 98561 - protein, 487 aa, Homo sapiens; identical to SEQ ID NO: 98560
  Payload ID: 19676
  Gene Name: zinc finger and BTB domain containing 32
  Uniprot ID: Q9Y2Y4
  ENSP ID: ENSP00000376035

SEQ ID NO: 98562 - protein, 302 aa, Homo sapiens
  Payload ID: 19676
  Gene Name: zinc finger and BTB domain containing 32
  ENSP ID: ENSP00000433657
MSLPPIRLPSPYGSDRLVQLAARLRPALCDTLITVGSQEFPAHSLVLAGVSQQLGRRGQWALGEGISPSTFAQLLNFVYGESVELQPGELRPLQEAARALGVQSLEEACWRARGDRAKKPDPGLKKHQEEPEKPSRNPERELGDPGEKQKPEQVSRTGGREQEMLHKHSPPRGRPEMAGATQEAQQEQTRSKEKRLQAPVGQRGADGKHGVLTWLRENPGGSEESLRKLPGPLPPAGSLQTSVTPRPSWAEAPWLVGGQPALWSILLMPPRYGIPFYHSTPTTGAWQEVWREQRRTCNLCGS

SEQ ID NO: 98563 - protein, 71 aa, Homo sapiens
  Payload ID: 19676
  Gene Name: zinc finger and BTB domain containing 32
  ENSP ID: ENSP00000466524
MEESDQGHTGALATCAGHEDKAGCPPRPHPPPAPPARSRPYACSVCGKRFSLKHQMETHYRVHTGEKPFSC

SEQ ID NO: 98564 - protein, 672 aa, Homo sapiens
  Payload ID: 19677
  Gene Name: zinc finger and BTB domain containing 33
  Uniprot ID: Q86T24
  ENSP ID: ENSP00000314153
MESRKLISATDIQYSGSLLNSLNEQRGHGLFCDVTVIVEDRKFRAHKNILSASSTYFHQLFSVAGQVVELSFIRAEIFAEILNYIYSSKIVRVRSDLLDELIKSGQLLGVKFIAELGVPLSQVKSISGTAQDGNTEPLPPDSGDKNLVIQKSKDEAQDNGATIMPIITESFSLSAEDYEMKKIIVTDSDDDDDDVIFCSEILPTKETLPSNNTVAQVQSNPGPVAISDVAPSASNNSPPLTNITPTQKLPTPVNQATLSQTQGSEKLLVSSAPTHLTPNIILLNQTPLSTPPNVSSSLPNHMPSSINLLVQNQQTPNSAILTGNKANEEEEEEIIDDDDDTISSSPDSAVSNTSLVPQADTSQNTSFDGSLIQKMQIPTLLQEPLSNSLKISDIITRNTNDPGVGSKHLMEGQKIITLDTATEIEGLSTGCKVYANIGEDTYDIVIPVKDDPDEGEARLENEIPKTSGSEMANKRMKVKHDDHYELIVDGRVYYICIVCKRSYVCLTSLRRHFNIHSWEKKYPCRYCEKVFPLAEYRTKHEIHHTGERRYQCLACGKSFINYQFMSSHIKSVHSQDPSGDSKLYRLHPCRSLQIRQYAYLSDRSSTIPAMKDDGIGYKVDTGKEPPVGTTTSTQNKPMTWEDIFIQQENDSIFKQNVTDGSTEFEFIIPESY

SEQ ID NO: 98565 - protein, 672 aa, Homo sapiens; identical to SEQ ID NO: 98564
  Payload ID: 19677
  Gene Name: zinc finger and BTB domain containing 33
  Uniprot ID: Q86T24
  ENSP ID: ENSP00000450969

SEQ ID NO: 98566 - protein, 504 aa, Homo sapiens
  Payload ID: 19678
  Gene Name: zinc finger and BTB domain containing 34
  ENSP ID: ENSP00000317534
MSVEMDSSSFIQFDVPEYSSTVLSQLNELRLQGKLCDIIVHIQGQPFRAHKAVLAASSPYFRDHSALSTMSGLSISVIKNPNVFEQLLSFCYTGRMSLQLKDVVSFLTAASFLQMQCVIDKCTQILESIHSKISVGDVDSVTVGAEENPESRNGVKDSSFFANPVEISPPYCSQGRQPTASSDLRMETTPSKALRSRLQEEGHSDRGSSGSVSEYEIQIEGDHEQGDLLVRESQITEVKVKMEKSDRPSCSDSSSLGDDGYHTEMVDGEQVVAVNVGSYGSVLQHAYSYSQAASQPTNVSEAFGSLSNSSPSRSMLSCFRGGRARQKRALSVHLHSDLQGLVQGSDSEAMMNNPGYESSPRERSARGHWYPYNERLICIYCGKSFNQKGSLDRHMRLHMGITPFVCKFCGKKYTRKDQLEYHIRGHTDDKPFRCEICGKCFPFQGTLNQHLRKNHPGVAEVRSRIESPERTDVYVEQKLENDASASEMGLDSRMEIHTVSDAPD

SEQ ID NO: 98567 - protein, 500 aa, Homo sapiens
  Payload ID: 19678
  Gene Name: zinc finger and BTB domain containing 34
  Uniprot ID: Q8NCN2
  ENSP ID: ENSP00000362551
MDSSSFIQFDVPEYSSTVLSQLNELRLQGKLCDIIVHIQGQPFRAHKAVLAASSPYFRDHSALSTMSGLSISVIKNPNVFEQLLSFCYTGRMSLQLKDVVSFLTAASFLQMQCVIDKCTQILESIHSKISVGDVDSVTVGAEENPESRNGVKDSSFFANPVEISPPYCSQGRQPTASSDLRMETTPSKALRSRLQEEGHSDRGSSGSVSEYEIQIEGDHEQGDLLVRESQITEVKVKMEKSDRPSCSDSSSLGDDGYHTEMVDGEQVVAVNVGSYGSVLQHAYSYSQAASQPTNVSEAFGSLSNSSPSRSMLSCFRGGRARQKRALSVHLHSDLQGLVQGSDSEAMMNNPGYESSPRERSARGHWYPYNERLICIYCGKSFNQKGSLDRHMRLHMGITPFVCKFCGKKYTRKDQLEYHIRGHTDDKPFRCEICGKCFPFQGTLNQHLRKNHPGVAEVRSRIESPERTDVYVEQKLENDASASEMGLDSRMEIHTVSDAPD

SEQ ID NO: 98568 - protein, 503 aa, Homo sapiens
  Payload ID: 19679
  Gene Name: zinc finger and BTB domain containing 37
  Uniprot ID: Q5TC79
  ENSP ID: ENSP00000356674
MEKGGNIQLEIPDFSNSVLSHLNQLRMQGRLCDIVVNVQGQAFRAHKVVLAASSPYFRDHMSLNEMSTVSISVIKNPTVFEQLLSFCYTGRICLQLADIISYLTAASFLQMQHIIDKCTQILEGIHFKINVAEVEAELSQTRTKHQERPPESHRVTPNLNRSLSPRHNTPKGNRRGQVSAVLDIRELSPPEESTSPQIIEPSSDVESREPILRINRAGQWYVETGVADRGGRSDDEVRVLGAVHIKTENLEEWLGPENQPSGEDGSSAEEVTAMVIDTTGHGSVGQENYTLGSSGAKVARPTSSEVDRFSPSGSVVPLTERHRARSESPGRMDEPKQPSSQVEESAMMGVSGYVEYLREQEVSERWFRYNPRLTCIYCAKSFNQKGSLDRHMRLHMGITPFVCRMCGKKYTRKDQLEYHIRKHTGNKPFHCHVCGKSFPFQAILNQHFRKNHPGCIPLEGPHSISPETTVTSRGQAEEESPSQEETVAPGEAVQGSVSTTGPD

SEQ ID NO: 98569 - protein, 361 aa, Homo sapiens
  Payload ID: 19679
  Gene Name: zinc finger and BTB domain containing 37
  Uniprot ID: Q5TC79
  ENSP ID: ENSP00000356675
MEKGGNIQLEIPDFSNSVLSHLNQLRMQGRLCDIVVNVQGQAFRAHKVVLAASSPYFRDHMSLNEMSTVSISVIKNPTVFEQLLSFCYTGRICLQLADIISYLTAASFLQMQHIIDKCTQILEGIHFKINVAEVEAELSQTRTKHQERPPESHRVTPNLNRSLSPRHNTPKGNRRGQVSAVLDIRELSPPEESTSPQIIEPSSDVESREPILRINRAGQWYVETGVADRGGRSDDEVRVLGAVHIKTENLEEWLGPENQPSGEDGSSAEEVTAMVIDTTGHGSVGQENYTLGSSGAKVARPTSSEVDRFSPSGSVVPLTERHRARSESPGRMDEPKQPSSQVWSCGFRTALVVGGIATVYE

SEQ ID NO: 98570 - protein, 308 aa, Homo sapiens
  Payload ID: 19679
  Gene Name: zinc finger and BTB domain containing 37
  Uniprot ID: Q5TC79
  ENSP ID: ENSP00000356677
MEKGGNIQLEIPDFSNSVLSHLNQLRMQGRLCDIVVNVQGQAFRAHKVVLAASSPYFRDHMSLNEMSTVSISVIKNPTVFEQLLSFCYTGRICLQLADIISYLTAASFLQMQHIIDKCTQILEGIHFKINVAEVEAELSQTRTKHQERPPESHRVTPNLNRSLSPRHNTPKGNRRGQVSAVLDIRELSPPEESTSPQIIEPSSDVESREPILRINRAGQWYVETGVADRGGRSDDEVRVLGAVHIKTENLEEWLGPENQPSGEDGSSAEEVTAMVIDTTGHGSVGQENYTLGSSGAKVARPTSSEVDR

SEQ ID NO: 98571 - protein, 411 aa, Homo sapiens
  Payload ID: 19679
  Gene Name: zinc finger and BTB domain containing 37
  ENSP ID: ENSP00000409408
MPATGRYHQLPNSCQFSANAAYYRQMYTDPGGHSFQINVAEVEAELSQTRTKHQERPPESHRVTPNLNRSLSPRHNTPKGNRRGQVSAVLDIRELSPPEESTSPQIIEPSSDVESREPILRINRAGQWYVETGVADRGGRSDDEVRVLGAVHIKTENLEEWLGPENQPSGEDGSSAEEVTAMVIDTTGHGSVGQENYTLGSSGAKVARPTSSEVDRFSPSGSVVPLTERHRARSESPGRMDEPKQPSSQVEESAMMGVSGYVEYLREQEVSERWFRYNPRLTCIYCAKSFNQKGSLDRHMRLHMGITPFVCRMCGKKYTRKDQLEYHIRKHTGNKPFHCHVCGKSFPFQAILNQHFRKNHPGCIPLEGPHSISPETTVTSRGQAEEESPSQEETVAPGEAVQGSVSTTGPD

SEQ ID NO: 98572 - protein, 503 aa, Homo sapiens; identical to SEQ ID NO: 98568
  Payload ID: 19679
  Gene Name: zinc finger and BTB domain containing 37
  Uniprot ID: Q5TC79
  ENSP ID: ENSP00000415293

SEQ ID NO: 98573 - protein, 1195 aa, Homo sapiens
  Payload ID: 19680
  Gene Name: zinc finger and BTB domain containing 38
  Uniprot ID: Q8NAP3
  ENSP ID: ENSP00000372635
MTVMSLSRDLKDDFHSDTVLSILNEQRIRGILCDVTIIVEDTKFKAHSNVLAASSLYFKNIFWSHTICISSHVLELDDLKAEVFTEILNYIYSSTVVVKRQETVTDLAAAGKKLGISFLEDLTDRNFSNSPGPYVFCITEKGVVKEEKNEKRHEEPAITNGPRITNAFSIIETENSNNMFSPLDLRASFKKVSDSMRTASLCLERTDVCHEAEPVRTLAEHSYAVSSVAEAYRSQPVREHDGSSPGNTGKENCEALAAKPKTCRKPKTFSIPQDSDSATENIPPPPVSNLEVNQERSPQPAAVLTRSKSPNNEGDVHFSREDENQSSDVPGPPAAEVPPLVYNCSCCSKAFDSSTLLSAHMQLHKPTQEPLVCKYCNKQFTTLNRLDRHEQICMRSSHMPIPGGNQRFLENYPTIGQNGGSFTGPEPLLSENRIGEFSSTGSTLPDTDHMVKFVNGQMLYSCVVCKRSYVTLSSLRRHANVHSWRRTYPCHYCNKVFALAEYRTRHEIWHTGERRYQCIFCLETFMTYYILKNHQKSFHAIDHRLSISKKTANGGLKPSVYPYKLYRLLPMKCKRAPYKSYRNSSYENARENSQMNESAPGTYVVQNPHSSELPTLNFQDTVNTLTNSPAIPLETSACQDIPTSANVQNAEGTKWGEEALKMDLDNNFYSTEVSVSSTENAVSSDLRAGDVPVLSLSNSSENAASVISYSGSAPSVIVHSSQFSSVIMHSNAIAAMTSSNHRAFSDPAVSQSLKDDSKPEPDKVGRFASRPKSIKEKKKTTSHTRGEIPEESNYVADPGGSLSKTTNIAEETSKIETYIAKPALPGTSTNSNVAPLCQITVKIGNEAIVKRHILGSKLFYKRGRRPKYQMQEEPLPQGNDPEPSGDSPLGLCQSECMEMSEVFDDASDQDSTDKPWRPYYNYKPKKKSRQLKKMRKVNWRKEHGNRSPSHKCKYPAELDCAVGKAPQDKPFEEEETKEMPKLQCELCDGDKAVGAGNQGRPHRHLTSRPYACELCAKQFQSPSTLKMHMRCHTGEKPYQCKTCGRCFSVQGNLQKHERIHLGLKEFVCQYCNKAFTLNETLKIHERIHTGEKRYHCQFCFQRFLYLSTKRNHEQRHIREHNGKGYACFQCPKICKTAAALGMHQKKHLFKSPSQQEKIGDVCHENSNPLENQHFIGSEDNDQKDNIQTGVENVVL

SEQ ID NO: 98574 - protein, 1195 aa, Homo sapiens; identical to SEQ ID NO: 98573
  Payload ID: 19680
  Gene Name: zinc finger and BTB domain containing 38
  Uniprot ID: Q8NAP3
  ENSP ID: ENSP00000406955

SEQ ID NO: 98575 - protein, 118 aa, Homo sapiens
  Payload ID: 19680
  Gene Name: zinc finger and BTB domain containing 38
  ENSP ID: ENSP00000421037
MTVMSLSRDLKDDFHSDTVLSILNEQRIRGILCDVTIIVEDTKFKAHSNVLAASSLYFKNIFWSHTICISSHVLELDDLKAEVFTEILNYIYSSTVVVKRQETVTDLAAAGKKLGISF

SEQ ID NO: 98576 - protein, 34 aa, Homo sapiens
  Payload ID: 19680
  Gene Name: zinc finger and BTB domain containing 38
  ENSP ID: ENSP00000422051
MTVMSLSRDLKDDFHSDTVLSILNEQRIRGILCD

SEQ ID NO: 98577 - protein, 210 aa, Homo sapiens
  Payload ID: 19680
  Gene Name: zinc finger and BTB domain containing 38
  ENSP ID: ENSP00000422081
MTVMSLSRDLKDDFHSDTVLSILNEQRIRGILCDVTIIVEDTKFKAHSNVLAASSLYFKNIFWSHTICISSHVLELDDLKAEVFTEILNYIYSSTVVVKRQETVTDLAAAGKKLGISFLEDLTDRNFSNSPGPYVFCITEKGVVKEEKNEKRHEEPAITNGPRITNAFSIIETENSNNMFSPLDLRASFKKVSDSMRTASLCLERTDVCH

SEQ ID NO: 98578 - protein, 94 aa, Homo sapiens
  Payload ID: 19680
  Gene Name: zinc finger and BTB domain containing 38
  ENSP ID: ENSP00000422347
MTVMSLSRDLKDDFHSDTVLSILNEQRIRGILCDVTIIVEDTKFKAHSNVLAASSLYFKNIFWSHTICISSHVLELDDLKAEVFTEILNYIYSS

SEQ ID NO: 98579 - protein, 69 aa, Homo sapiens
  Payload ID: 19680
  Gene Name: zinc finger and BTB domain containing 38
  ENSP ID: ENSP00000422757
MTVMSLSRDLKDDFHSDTVLSILNEQRIRGILCDVTIIVEDTKFKAHSNVLAASSLYFKNIFWSHTICI

SEQ ID NO: 98580 - protein, 111 aa, Homo sapiens
  Payload ID: 19680
  Gene Name: zinc finger and BTB domain containing 38
  ENSP ID: ENSP00000422894
MTVMSLSRDLKDDFHSDTVLSILNEQRIRGILCDVTIIVEDTKFKAHSNVLAASSLYFKNIFWSHTICISSHVLELDDLKAEVFTEILNYIYSSTVVVKRQETVTDLAAAG

SEQ ID NO: 98581 - protein, 771 aa, Homo sapiens
  Payload ID: 19680
  Gene Name: zinc finger and BTB domain containing 38
  ENSP ID: ENSP00000424254
MTVMSLSRDLKDDFHSDTVLSILNEQRIRGILCDVTIIVEDTKFKAHSNVLAASSLYFKNIFWSHTICISSHVLELDDLKAEVFTEILNYIYSSTVVVKRQETVTDLAAAGKKLGISFLEDLTDRNFSNSPGPYVFCITEKGVVKEEKNEKRHEEPAITNGPRITNAFSIIETENSNNMFSPLDLRASFKKVSDSMRTASLCLERTDVCHEAEPVRTLAEHSYAVSSVAEAYRSQPVREHDGSSPGNTGKENCEALAAKPKTCRKPKTFSIPQDSDSATENIPPPPVSNLEVNQERSPQPAAVLTRSKSPNNEGDVHFSREDENQSSDVPGPPAAEVPPLVYNCSCCSKAFDSSTLLSAHMQLHKPTQEPLVCKYCNKQFTTLNRLDRHEQICMRSSHMPIPGGNQRFLENYPTIGQNGGSFTGPEPLLSENRIGEFSSTGSTLPDTDHMVKFVNGQMLYSCVVCKRSYVTLSSLRRHANVHSWRRTYPCHYCNKVFALAEYRTRHEIWHTGERRYQCIFCLETFMTYYILKNHQKSFHAIDHRLSISKKTANGGLKPSVYPYKLYRLLPMKCKRAPYKSYRNSSYENARENSQMNESAPGTYVVQNPHSSELPTLNFQDTVNTLTNSPAIPLETSACQDIPTSANVQNAEGTKWGEEALKMDLDNNFYSTEVSVSSTENAVSSDLRAGDVPVLSLSNSSENAASVISYSGSAPSVIVHSSQFSSVIMHSNAIAAMTSSNHRAFSDPAVSQSLKDDSKPEPDKVGRFASRP

SEQ ID NO: 98582 - protein, 146 aa, Homo sapiens
  Payload ID: 19680
  Gene Name: zinc finger and BTB domain containing 38
  ENSP ID: ENSP00000425705
MTVMSLSRDLKDDFHSDTVLSILNEQRIRGILCDVTIIVEDTKFKAHSNVLAASSLYFKNIFWSHTICISSHVLELDDLKAEVFTEILNYIYSSTVVVKRQETVTDLAAAGKKLGISFLEDLTDRNFSNSPGPYVFCITEKGVVKE

SEQ ID NO: 98583 - protein, 108 aa, Homo sapiens
  Payload ID: 19680
  Gene Name: zinc finger and BTB domain containing 38
  ENSP ID: ENSP00000426288
MTVMSLSRDLKDDFHSDTVLSILNEQRIRGILCDVTIIVEDTKFKAHSNVLAASSLYFKNIFWSHTICISSHVLELDDLKAEVFTEILNYIYSSTVVVKRQETVTDLA

SEQ ID NO: 98584 - protein, 1195 aa, Homo sapiens; identical to SEQ ID NO: 98573
  Payload ID: 19680
  Gene Name: zinc finger and BTB domain containing 38
  Uniprot ID: Q8NAP3
  ENSP ID: ENSP00000426387

SEQ ID NO: 98585 - protein, 150 aa, Homo sapiens
  Payload ID: 19680
  Gene Name: zinc finger and BTB domain containing 38
  ENSP ID: ENSP00000426931
MTVMSLSRDLKDDFHSDTVLSILNEQRIRGILCDVTIIVEDTKFKAHSNVLAASSLYFKNIFWSHTICISSHVLELDDLKAEVFTEILNYIYSSTVVVKRQETVTDLAAAGKKLGISFLEDLTDRNFSNSPGPYVFCITEKGVVKEEKNE

SEQ ID NO: 98586 - protein, 712 aa, Homo sapiens
  Payload ID: 19681
  Gene Name: zinc finger and BTB domain containing 39
  Uniprot ID: O15060
  ENSP ID: ENSP00000300101
MGMRIKLQSTNHPNNLLKELNKCRLSETMCDVTIVVGSRSFPAHKAVLACAAGYFQNLFLNTGLDAARTYVVDFITPANFEKVLSFVYTSELFTDLINVGVIYEVAERLGMEDLLQACHSTFPDLESTARAKPLTSTSESHSGTLSCPSAEPAHPLGELRGGGDYLGADRNYVLPSDAGGSYKEEEKNVASDANHSLHLPQPPPPPPKTEDHDTPAPFTSIPSMMTQPLLGTVSTGIQTSTSSCQPYKVQSNGDFSKNSFLTPDNAVDITTGTNSCLSNSEHSKDPGFGQMDELQLEDLGDDDLQFEDPAEDIGTTEEVIELSDDSEDELAFGENDNRENKAMPCQVCKKVLEPNIQLIRQHARDHVDLLTGNCKVCETHFQDRNSRVTHVLSHIGIFLFSCDMCETKFFTQWQLTLHRRDGIFENNIIVHPNDPLPGKLGLFSGAASPELKCAACGKVLAKDFHVVRGHILDHLNLKGQACSVCDQRHLNLCSLMWHTLSHLGISVFSCSVCANSFVDWHLLEKHMAVHQSLEDALFHCRLCSQSFKSEAAYRYHVSQHKCNSGLDARPGFGLQHPALQKRKLPAEEFLGEELALQGQPGNSKYSCKVCGKRFAHTSEFNYHRRIHTGEKPYQCKVCHKFFRGRSTIKCHLKTHSGALMYRCTVCGHYSSTLNLMSKHVGVHKGSLPPDFTIEQTFMYIIHSKEADKNPDS

SEQ ID NO: 98587 - protein, 1013 aa, Homo sapiens
  Payload ID: 19682
  Gene Name: zinc finger and BTB domain containing 4
  Uniprot ID: Q9P1Z0
  ENSP ID: ENSP00000307858
MPPPAEVTDPSHAPAVLRQLNEQRLRGLFCDVTLIAGDTKFPAHRSVLAASSPFFREALLTSAPLPLPPATGGAAPNPATTTAASSSSSSSSSSSSSSSSASSSSSSSSSSPPPASPPASSPPRVLELPGVPAAAFSDVLNFIYSARLALPGGGGDGAAVAEIGALGRRLGISRLQGLGEGGDAWVPPTPAPMATSQPEEDSFGPGPRPAGEWEGDRAEAQAPDLQCSLPRRPLPCPQCGKSFIHPKRLQTHEAQCRRGASTRGSTGLGAGGAGPGGPAGVDASALPPPVGFRGGPEHVVKVVGGHVLYVCAACERSYVTLSSLKRHSNVHSWRRKYPCRYCEKVFALAEYRTKHEVWHTGERRYQCIFCWETFVTYYNLKTHQRAFHGISPGLLASEKTPNGGYKPKLNTLKLYRLLPMRAAKRPYKTYSQGAPEAPLSPTLNTPAPVAMPASPPPGPPPAPEPGPPPSVITFAHPAPSVIVHGGSSSGGGGSGTASTGGSQAASVITYTAPPRPPKKREYPPPPPEPAATPTSPATAVSPATAAGPAMATTTEEAKGRNPRAGRTLTYTAKPVGGIGGGGGPPTGAGRGPSQLQAPPPLCQITVRIGEEAIVKRRISETDLRPGELSGEEMEESEEDEEEEDEEEEEEDEEESKAGGEDQLWRPYYSYKPKRKAGAAGGASVGGSGLPRGRRPPRWRQKLERRSWEETPAAESPAGRARTERRHRCGDCAQTFTTLRKLRKHQEAHGGGSHSSRAGRRPSTRFTCPHCAKVCKTAAALSRHGQRHAAERPGGTPTPVIAYSKGSAGTRPGDVKEEAPQEMQVSSSSGEAGGGSTAAEEASETASLQDPIISGGEEPPVVASGGSYVYPPVQEFPLALIGGGREPGGGRGKSGSEGPVGAGEGDRMEGIGAAKVTFYPEPYPLVYGPQLLAAYPYNFSNLAALPVALNMVLPDEKGAGALPFLPGVFGYAVNPQAAPPAPPTPPPPTLPPPIPPKGEGERAGVERTQKGDVG

SEQ ID NO: 98588 - protein, 1013 aa, Homo sapiens; identical to SEQ ID NO: 98587
  Payload ID: 19682
  Gene Name: zinc finger and BTB domain containing 4
  Uniprot ID: Q9P1Z0
  ENSP ID: ENSP00000369973

SEQ ID NO: 98589 - protein, 1127 aa, Homo sapiens
  Payload ID: 19683
  Gene Name: zinc finger and BTB domain containing 40
  ENSP ID: ENSP00000363782
MELPNYSRQLLQQLYTLCKEQQFCDCTISIGTIYFRAHKLVLAAASLLFKTLLDNTDTISIDASVVSPEEFALLLEMMYTGKLPVGKHNFSKIISLADSLQMFDVAVSCKNLLTSLVNCSVQGQVVRDVSAPSSETFRKEPEKPQVEILSSEGAGEPHSSPELAATPGGPVKAETEEAAHSVSQEMSVNSPTAQESQRNAETPAETPTTAEACSPSPAVQTFSEAKKTSTEPGCERKHYQLNFLLENEGVFSDALMVTQDVLKKLEMCSEIKGPQKEVILNCCEGRTPKETIENLLHRMTEEKTLTAEGLVKLLQAVKTTFPNLGLLLEKLQKSATLPSTTVQPSPDDYGTELLRRYHENLSEIFTDNQILLKMISHMTSLAPGEREVMEKLVKRDSGSGGFNSLISAVLEKQTLSATAIWQLLLVVQETKTCPLDLLMEEIRREPGADAFFRAVTTPEHATLETILRHNQLILEAIQQKIEYKLFTSEEEHLAETVKEILSIPSETASPEASLRAVLSRAMEKSVPAIEICHLLCSVHKSFPGLQPVMQELAYIGVLTKEDGEKETWKVSNKFHLEANNKEDEKAAKEDSQPGEQNDQGETGSLPGQQEKEASASPDPAKKSFICKACDKSFHFYCRLKVHMKRCRVAKSKQVQCKECSETKDSKKELDKHQLEAHGAGGEPDAPKKKKKRLPVTCDLCGREFAHASGMQYHKLTEHFDEKPFSCEECGAKFAANSTLKNHLRLHTGDRPFMCKHCLMTFTQASALAYHTKKKHSEGKMYACQYCDAVFAQSIELSRHVRTHTGDKPYVCRDCGKGFRQANGLSIHLHTFHNIEDPYDCKKCRMSFPTLQDHRKHIHEVHSKEYHPCPTCGKIFSAPSMLERHVVTHVGGKPFSCGICNKAYQQLSGLWYHNRTHHPDVFAAQNHRSSKFSSLQCSSCDKTFPNTIEHKKHIKAEHADMKFHECDQCKELFPTPALLQVHVKCQHSGSQPFRCLYCAATFRFPGALQHHVTTEHFKQSETTFPCELCGELFTSQAQLDSHLESEHPKVMSTETQAAASQMAQVIQTPEPVAPTEQVITLEETQLAGSQVFVTLPDSQASQASSELVAVTVEDLLDGTVTLICGEAK

SEQ ID NO: 98590 - protein, 1239 aa, Homo sapiens
  Payload ID: 19683
  Gene Name: zinc finger and BTB domain containing 40
  Uniprot ID: Q9NUA8
  ENSP ID: ENSP00000364798
MELPNYSRQLLQQLYTLCKEQQFCDCTISIGTIYFRAHKLVLAAASLLFKTLLDNTDTISIDASVVSPEEFALLLEMMYTGKLPVGKHNFSKIISLADSLQMFDVAVSCKNLLTSLVNCSVQGQVVRDVSAPSSETFRKEPEKPQVEILSSEGAGEPHSSPELAATPGGPVKAETEEAAHSVSQEMSVNSPTAQESQRNAETPAETPTTAEACSPSPAVQTFSEAKKTSTEPGCERKHYQLNFLLENEGVFSDALMVTQDVLKKLEMCSEIKGPQKEMIVKCFEGEGGHSAFQRILGKVREESLDVQTVVSLLRLYQYSNPAVKTALLDRKPEDVDTVQPKGSTEEGKTLSVLLLEHKEDLIQCVTQLRPIMESLETAKEEFLTGTEKRVILNCCEGRTPKETIENLLHRMTEEKTLTAEGLVKLLQAVKTTFPNLGLLLEKLQKSATLPSTTVQPSPDDYGTELLRRYHENLSEIFTDNQILLKMISHMTSLAPGEREVMEKLVKRDSGSGGFNSLISAVLEKQTLSATAIWQLLLVVQETKTCPLDLLMEEIRREPGADAFFRAVTTPEHATLETILRHNQLILEAIQQKIEYKLFTSEEEHLAETVKEILSIPSETASPEASLRAVLSRAMEKSVPAIEICHLLCSVHKSFPGLQPVMQELAYIGVLTKEDGEKETWKVSNKFHLEANNKEDEKAAKEDSQPGEQNDQGETGSLPGQQEKEASASPDPAKKSFICKACDKSFHFYCRLKVHMKRCRVAKSKQVQCKECSETKDSKKELDKHQLEAHGAGGEPDAPKKKKKRLPVTCDLCGREFAHASGMQYHKLTEHFDEKPFSCEECGAKFAANSTLKNHLRLHTGDRPFMCKHCLMTFTQASALAYHTKKKHSEGKMYACQYCDAVFAQSIELSRHVRTHTGDKPYVCRDCGKGFRQANGLSIHLHTFHNIEDPYDCKKCRMSFPTLQDHRKHIHEVHSKEYHPCPTCGKIFSAPSMLERHVVTHVGGKPFSCGICNKAYQQLSGLWYHNRTHHPDVFAAQNHRSSKFSSLQCSSCDKTFPNTIEHKKHIKAEHADMKFHECDQCKELFPTPALLQVHVKCQHSGSQPFRCLYCAATFRFPGALQHHVTTEHFKQSETTFPCELCGELFTSQAQLDSHLESEHPKVMSTETQAAASQMAQVIQTPEPVAPTEQVITLEETQLAGSQVFVTLPDSQASQASSELVAVTVEDLLDGTVTLICGEAK

SEQ ID NO: 98591 - protein, 453 aa, Homo sapiens
  Payload ID: 19683
  Gene Name: zinc finger and BTB domain containing 40
  ENSP ID: ENSP00000383098
MELPNYSRQLLQQLYTLCKEQQFCDCTISIGTIYFRAHKLVLAAASLLFKTLLDNTDTISIDASVVSPEEFALLLEMMYTGKLPVGKHNFSKIISLADSLQMFDVAVSCKNLLTSLVNCSVQGQVVRDVSAPSSETFRKEPEKPQVEILSSEGAGEPHSSPELAATPGGPVKAETEEAAHSVSQEMSVNSPTAQESQRNAETPAETPTTAEACSPSPAVQTFSEAKKTSTEPGCERKHYQLNFLLENEGVFSDALMVTQDVLKKLEMCSEIKGPQKEMIVKCFEGEGGHSAFQRILGKVREESLDVQTVVSLLRLYQYSNPAVKTALLDRKPEDVDTVQPKGSTEEGKTLSVLLLEHKEDLIQCVTQLRPIMESLETAKEEFLTGTEKRVILNCCEGRTPKETIENLLHRMTEEKTLTAEGLVKLLQAVKTTFPNLGLLLEKLQKSATLPSTT

SEQ ID NO: 98592 - protein, 1239 aa, Homo sapiens; identical to SEQ ID NO: 98590
  Payload ID: 19683
  Gene Name: zinc finger and BTB domain containing 40
  Uniprot ID: Q9NUA8
  ENSP ID: ENSP00000384527

SEQ ID NO: 98593 - protein, 909 aa, Homo sapiens
  Payload ID: 19684
  Gene Name: zinc finger and BTB domain containing 41
  Uniprot ID: Q5SVQ8
  ENSP ID: ENSP00000356375
MKKRRKVTSNLEKIHLGYHKDSSEGNVAVECDQVTYTHSAGRPTPEALHCYQELPPSPDQRKLLSSLQYNKNLLKYLNDDRQKQPSFCDLLIIVEGKEFSAHKVVVAVGSSYFHACLSKNPSTDVVTLDHVTHSVFQHLLEFLYTSEFFVYKYEIPLVLEAAKFLDIIDAVKLLNNENVAPFHSELTEKSSPEETLNELTGRLSNNHQCKFCSRHFCYKKSLENHLAKTHRSLLLGKKHGLKMLERSFSARRSKRNRKCPVKFDDTSDDEQESGDGSDNLNQENFDKEKSDRNDSEDPGSEYNAEEDELEEEMSDEYSDIEEQSEKDHNDAEEEPEAGDSVGNVHEGLTPVVIQNSNKKILQCPKCDKTFDRIGKYESHTRVHTGEKPFECDICHQRYSTKSNLTVHRKKHSNETEFHKKEHKCPYCNKLHASKKTLAKHVKRFHPENAQEFISIKKTKSESWKCDICKKSFTRRPHLEEHMILHSQDKPFKCTYCEEHFKSRFARLKHQEKFHLGPFPCDICGRQFNDTGNLKRHIECTHGGKRKWTCFICGKSVRERTTLKEHLRIHSGEKPHLCSICGQSFRHGSSYRLHLRVHHDDKRYECDECGKTFIRHDHLTKHKKIHSGEKAHQCEECGKCFGRRDHLTVHYKSVHLGEKVWQKYKATFHQCDVCKKIFKGKSSLEMHFRTHSGEKPYKCQICNQSFRIKKTLTKHLVIHSDARPFNCQHCNATFKRKDKLKYHIDHVHEIKSPDDPLSTSEEKLVSLPVEYSSDDKIFQTETKQYMDQPKVYQSEAKTMLQNVSAEVCVPVTLVPVQMPDTPSDLVRHTTTLPPSSHEILSPQPQSTDYPRAADLAFLEKYTLTPQPANIVHPVRPEQMLDPREQSYLGTLLGLDSTTGVQNISTNEHHS

SEQ ID NO: 98594 - protein, 422 aa, Homo sapiens
  Payload ID: 19685
  Gene Name: zinc finger and BTB domain containing 42
  Uniprot ID: B2RXF5
  ENSP ID: ENSP00000409107
MEFPEHGGRLLGRLRQQRELGFLCDCTVLVGDARFPAHRAVLAACSVYFHLFYRDRPAGSRDTVRLNGDIVTAPAFGRLLDFMYEGRLDLRSLPVEDVLAAASYLHMYDIVKVCKGRLQEKDRSLDPGNPAPGAEPAQPPCPWPVWTADLCPAARKAKLPPFGVKAALPPRASGPPPCQVPEESDQALDLSLKSGPRQERVHPPCVLQTPLCSQRQPGAQPLVKDERDSLSEQEESSSSRSPHSPPKPPPVPAAKGLVVGLQPLPLSGEGSRELELGAGRLASEDELGPGGPLCICPLCSKLFPSSHVLQLHLSAHFRERDSTRARLSPDGVAPTCPLCGKTFSCTYTLKRHERTHSGEKPYTCVQCGKSFQYSHNLSRHTVVHTREKPHACRWCERRFTQSGDLYRHVRKFHCGLVKSLLV

SEQ ID NO: 98595 - protein, 422 aa, Homo sapiens; identical to SEQ ID NO: 98594
  Payload ID: 19685
  Gene Name: zinc finger and BTB domain containing 42
  Uniprot ID: B2RXF5
  ENSP ID: ENSP00000450673

SEQ ID NO: 98596 - protein, 467 aa, Homo sapiens
  Payload ID: 19686
  Gene Name: zinc finger and BTB domain containing 43
  Uniprot ID: O43298
  ENSP ID: ENSP00000362556
MEPGTNSFRVEFPDFSSTILQKLNQQRQQGQLCDVSIVVQGHIFRAHKAVLAASSPYFCDQVLLKNSRRIVLPDVMNPRVFENILLSSYTGRLVMPAPEIVSYLTAASFLQMWHVVDKCTEVLEGNPTVLCQKLNHGSDHQSPSSSSYNGLVESFELGSGGHTDFPKAQELRDGENEEESTKDELSSQLTEHEYLPSNSSTEHDRLSTEMASQDGEEGASDSAEFHYTRPMYSKPSIMAHKRWIHVKPERLEQACEGMDVHATYDEHQVTESINTVQTEHTVQPSGVEEDFHIGEKKVEAEFDEQADESNYDEQVDFYGSSMEEFSGERSDGNLIGHRQEAALAAGYSENIEMVTGIKEEASHLGFSATDKLYPCQCGKSFTHKSQRDRHMSMHLGLRPYGCGVCGKKFKMKHHLVGHMKIHTGIKPYECNICAKRFMWRDSFHRHVTSCTKSYEAAKAEQNTTEAN

SEQ ID NO: 98597 - protein, 467 aa, Homo sapiens; identical to SEQ ID NO: 98596
  Payload ID: 19686
  Gene Name: zinc finger and BTB domain containing 43
  Uniprot ID: O43298
  ENSP ID: ENSP00000362563

SEQ ID NO: 98598 - protein, 467 aa, Homo sapiens; identical to SEQ ID NO: 98596
  Payload ID: 19686
  Gene Name: zinc finger and BTB domain containing 43
  Uniprot ID: O43298
  ENSP ID: ENSP00000390344

SEQ ID NO: 98599 - protein, 195 aa, Homo sapiens
  Payload ID: 19686
  Gene Name: zinc finger and BTB domain containing 43
  ENSP ID: ENSP00000412145
MEPGTNSFRVEFPDFSSTILQKLNQQRQQGQLCDVSIVVQGHIFRAHKAVLAASSPYFCDQVLLKNSRRIVLPDVMNPRVFENILLSSYTGRLVMPAPEIVSYLTAASFLQMWHVVDKCTEVLEGNPTVLCQKLNHGSDHQSPSSSSYNGLVESFELGSGGHTDFPKAQELRDGENEEESTKDELSSQLTEHEYL

SEQ ID NO: 98600 - protein, 570 aa, Homo sapiens
  Payload ID: 19687
  Gene Name: zinc finger and BTB domain containing 44
  ENSP ID: ENSP00000350574
MGVKTFTHSSSSHSQEMLGKLNMLRNDGHFCDITIRVQDKIFRAHKVVLAACSDFFRTKLVGQAEDENKNVLDLHHVTVTGFIPLLEYAYTATLSINTENIIDVLAAASYMQMFSVASTCSEFMKSSILWNTPNSQPEKGLDAGQENNSNCNFTSRDGSISPVSSECSVVERTIPVCRESRRKRKSYIVMSPESPVKCGTQTSSPQVLNSSASYSENRNQPVDSSLAFPWTFPFGIDRRIQPEKVKQAENTRTLELPGPSETGRRMADYVTCESTKTTLPLGTEEDVRVKVERLSDEEVHEEVSQPVSASQSSLSDQQTVPGSEQVQEDLLISPQSSSIGSVDEGVSEGLPTLQSTSSTNAPPDDDDRLENVQYPYQLYIAPSTSSTERPSPNGPDRPFQCPTCGVRFTRIQNLKQHMLIHSGIKPFQCDRCGKKFTRAYSLKMHRLKHEGKRCFRCQICSATFTSFGEYKHHMRVSRHIIRKPRIYECKTCGAMFTNSGNLIVHLRSLNHEASELANYFQSSDFLVPDYLNQEQEETLVQYDLGEHGFESNSSVQMPVISQYHSKGKEP

SEQ ID NO: 98601 - protein, 570 aa, Homo sapiens; identical to SEQ ID NO: 98600
  Payload ID: 19687
  Gene Name: zinc finger and BTB domain containing 44
  ENSP ID: ENSP00000380861

SEQ ID NO: 98602 - protein, 467 aa, Homo sapiens
  Payload ID: 19687
  Gene Name: zinc finger and BTB domain containing 44
  Uniprot ID: Q8NCP5
  ENSP ID: ENSP00000408079
MGVKTFTHSSSSHSQEMLGKLNMLRNDGHFCDITIRVQDKIFRAHKVVLAACSDFFRTKLVGQAEDENKNVLDLHHVTVTGFIPLLEYAYTATLSINTENIIDVLAAASYMQMFSVASTCSEFMKSSILWNTPNSQPEKGLDAGQENNSNCNFTSRDGSISPVSSECSVVERTIPVCRESRRKRKSYIVMSPESPVKCGTQTSSPQVLNSSASYSENRNQPVDSSLAFPWTFPFGIDRRIQPEKVKQAENTRTLELPGPSETGRRMADYVTCESTKTTLPLGTEEDVRVKVERLSDEEVHEEVSQPVSASQSSLSDQQTVPGSEQVQEDLLISPQSSSIGSVDEGVSEGLPTLQSTSSTNAPPDDDDRLENVQYPYQLYIAPSTSSTERPSPNGPDRPFQCPTCGVRFTRIQNLKQHMLIHSGIKPFQCDRCGKKFTRAYSLKMHRLKHEGHPRKSASRSSSATNCC

SEQ ID NO: 98603 - protein, 328 aa, Homo sapiens
  Payload ID: 19687
  Gene Name: zinc finger and BTB domain containing 44
  ENSP ID: ENSP00000432558
  MOD_RES (1)..(1): Any amino acid
XNSNCNFTSRDGSISPVSSECSVVERTIPVCRESRRKRKSYIVMSPESPVKCGTQTSSPQVLNSSASYSENRNQPVDSSLAFPWTFPFGIDRRIQPEKVKQAENTRTLELPGPSETGRRMADYVTCESTKTTLPLGTEEDVRVKVERLSDEEVHEEVSQPVSASQSSLSDQQTVPGSEQVQEDLLISPQSSSIGSVDEGVSEGLPTLQSTSSTNAPPDDDDRLENVQYPYQLYIAPSTSSTERPSPNGPDRPFQCPTCGVRFTRIQNLKQHMLIHSGIKPFQCDRCGKKFTRAYSLKMHRLKHEVPLQRQGTMIDNSQAVDEMTRNGE

SEQ ID NO: 98604 - protein, 453 aa, Homo sapiens
  Payload ID: 19687
  Gene Name: zinc finger and BTB domain containing 44
  Uniprot ID: Q8NCP5
  ENSP ID: ENSP00000433457
MGVKTFTHSSSSHSQEMLGKLNMLRNDGHFCDITIRVQDKIFRAHKVVLAACSDFFRTKLVGQAEDENKNVLDLHHVTVTGFIPLLEYAYTATLSINTENIIDVLAAASYMQMFSVASTCSEFMKSSILWNTPNSQPEKGLDAGQENNSNCNFTSRDGSISPVSSECSVVERTIPVCRESRRKRKSYIVMSPESPVKCGTQTSSPQVLNSSASYSENRNQPVDSSLAFPWTFPFGIDRRIQPEKVKQAENTRTLELPGPSETGRRMADYVTCESTKTTLPLGTEEDVRVKVERLSDEEVHEEVSQPVSASQSSLSDQQTVPGSEQVQEDLLISPQSSSIGSVDEGVSEGLPTLQSTSSTNAPPDDDDRLENVQYPYQLYIAPSTSSTERPSPNGPDRPFQCPTCGVRFTRIQNLKQHMLIHSGIKPFQCDRCGKKFTRAYSLKMHRLKHEVIS

SEQ ID NO: 98605 - protein, 474 aa, Homo sapiens
  Payload ID: 19687
  Gene Name: zinc finger and BTB domain containing 44
  Uniprot ID: Q8NCP5
  ENSP ID: ENSP00000434177
MGVKTFTHSSSSHSQEMLGKLNMLRNDGHFCDITIRVQDKIFRAHKVVLAACSDFFRTKLVGQAEDENKNVLDLHHVTVTGFIPLLEYAYTATLSINTENIIDVLAAASYMQMFSVASTCSEFMKSSILWNTPNSQPEKGLDAGQENNSNCNFTSRDGSISPVSSECSVVERTIPVCRESRRKRKSYIVMSPESPVKCGTQTSSPQVLNSSASYSENRNQPVDSSLAFPWTFPFGIDRRIQPEKVKQAENTRTLELPGPSETGRRMADYVTCESTKTTLPLGTEEDVRVKVERLSDEEVHEEVSQPVSASQSSLSDQQTVPGSEQVQEDLLISPQSSSIGSVDEGVSEGLPTLQSTSSTNAPPDDDDRLENVQYPYQLYIAPSTSSTERPSPNGPDRPFQCPTCGVRFTRIQNLKQHMLIHSGIKPFQCDRCGKKFTRAYSLKMHRLKHEVPLQRQGTMIDNSQAVDEMTRNGE

SEQ ID NO: 98606 - protein, 180 aa, Homo sapiens
  Payload ID: 19687
  Gene Name: zinc finger and BTB domain containing 44
  ENSP ID: ENSP00000435413
  MOD_RES (1)..(1): Any amino acid
XELPGPSETGRRMADYVTCESTKTTLPLGTEEDVRVKVERLSDEEVHEEVSQPVSASQSSLSDQQTVPGSEQVQEDLLISPQSSSIGSVDEGVSEGLPTLQSTSSTNAPPDDDDRSTERPSPNGPDRPFQCPTCGVRFTRIQNLKQHMLIHSGIKPFQCDRCGKKFTRAYSLKMHRLKHE

SEQ ID NO: 98607 - protein, 595 aa, Homo sapiens
  Payload ID: 19687
  Gene Name: zinc finger and BTB domain containing 44
  ENSP ID: ENSP00000436187
  MOD_RES (1)..(1): Any amino acid
XTFTHSSSSHSQEMLGKLNMLRNDGHFCDITIRVQDKIFRAHKVVLAACSDFFRTKLVGQAEDENKNVLDLHHVTVTGFIPLLEYAYTATLSINTENIIDVLAAASYMQMFSVASTCSEFMKSSILWNTPNSQPEKGLDAGQENNSNCNFTSRDGSISPVSSECSVVERTIPVCRESRRKRKSYIVMSPESPVKCGTQTSSPQVLNSSASYSENRNQPVDSSLAFPWTFPFGIDRRIQPEKVKQAENTRTLELPGPSETGRRMADYVTCESTKTTLPLGTEEDVRVKVERLSDEEVHEEVSQPVSASQSSLSDQQTVPGSEQVQEDLLISPQSSSIGSVDEGVSEGLPTLQSTSSTNAPPDDDDRTERPSPNGPDRPFQCPTCGVRFTRIQNLKQHMLIHSGIKPFQCDRCGKKFTRAYSLKMHRLKHEGKRCFRCQICSATFTSFGEYKHHMRVSRHIIRKPRIYECKTCGAMFTNSGNLIVHLRSLNHEASELANYFQSSDFLVPDYLNQEQEETLVQYDLGEHGFESNSSVQMPVISQVSSTQNCESTFPLGSLGGLAEKEEEVPEQPKSSACAEATRDDPPKSELSSITIE

SEQ ID NO: 98608 - protein, 202 aa, Homo sapiens
  Payload ID: 19687
  Gene Name: zinc finger and BTB domain containing 44
  ENSP ID: ENSP00000479214
MLTATLSINTENIIDVLAAASYMQMFSVASTCSEFMKSSILWNTPNSQPEKGLDAGQENNSNCNFTSRDGSISPVSSECSVVERTIPVCRESRRKRKSYIVMSPESPVKCGTQTSSPQVLNSSASYSENRNQPVDSSLAFPWTFPFGIDRRIQPEKVKQAENTRTLELPGPSETGRRMADYVTCESTKTTLPLGTEEDVRSK

SEQ ID NO: 98609 - protein, 511 aa, Homo sapiens
  Payload ID: 19688
  Gene Name: zinc finger and BTB domain containing 45
  Uniprot ID: Q96K62
  ENSP ID: ENSP00000346603
MAAAEAVHHIHLQNFSRSLLETLNGQRLGGHFCDVTVRIREASLRAHRCVLAAGSPFFQDKLLLGHSEIRVPPVVPAQTVRQLVEFLYSGSLVVAQGEALQVLTAASVLRIQTVIDECTQIIARARAPGTSAPTPLPTPVPPPLAPAQLRHRLRHLLAARPPGHPGAAHSRKQRQPARLQLPAPPTPAKAEGPDADPSLSAAPDDRGDEDDEESDDETDGEDGEGGGPGEGQAPPSFPDCAAGFLTAAADSACEEPPAPTGLADYSGAGRDFLRGAGSAEDVFPDSYVSTWHDEDGAVPEGCPTETPVQPDCILSGSRPPGVKTPGPPVALFPFHLGAPGPPAPPPSAPSGPAPAPPPAFYPTLQPEAAPSTQLGEVPAPSAAPTTAPSGTPARTPGAEPPTYECSHCRKTFSSRKNYTKHMFIHSGEKPHQCAVCWRSFSLRDYLLKHMVTHTGVRAFQCAVCAKRFTQKSSLNVHMRTHRPERAPCPACGKVFSHRALLERHLAAHPAP

SEQ ID NO: 98610 - protein, 511 aa, Homo sapiens; identical to SEQ ID NO: 98609
  Payload ID: 19688
  Gene Name: zinc finger and BTB domain containing 45
  Uniprot ID: Q96K62
  ENSP ID: ENSP00000469089

SEQ ID NO: 98611 - protein, 121 aa, Homo sapiens
  Payload ID: 19688
  Gene Name: zinc finger and BTB domain containing 45
  ENSP ID: ENSP00000470316
MAAAEAVHHIHLQNFSRSLLETLNGQRLGGHFCDVTVRIREASLRAHRCVLAAGSPFFQDKLLLGHSEIRVPPVVPAQTVRQLVEFLYSGSLVVAQGEALQVLTAASVLRIQTVIDECTQI

SEQ ID NO: 98612 - protein, 17 aa, Homo sapiens
  Payload ID: 19688
  Gene Name: zinc finger and BTB domain containing 45
  ENSP ID: ENSP00000471885
MAAAEAVHHIHLQNFSR

SEQ ID NO: 98613 - protein, 511 aa, Homo sapiens; identical to SEQ ID NO: 98609
  Payload ID: 19688
  Gene Name: zinc finger and BTB domain containing 45
  Uniprot ID: Q96K62
  ENSP ID: ENSP00000473072

SEQ ID NO: 98614 - protein, 589 aa, Homo sapiens
  Payload ID: 19689
  Gene Name: zinc finger and BTB domain containing 46
  Uniprot ID: Q86UZ6
  ENSP ID: ENSP00000245663
MNNRKEDMEITSHYRHLLRELNEQRQHGVLCDVCVVVEGKVFKAHKNVLLGSSRYFKTLYCQVQKTSEQATVTHLDIVTAQGFKAIIDFMYSAHLALTSRNVIEVMSAASFLQMTDIVQACHDFIKAALDISIKSDASDELAEFEIGASSSSSTEALISAVMAGRSISPWLARRTSPANSSGDSAIASCHDGGSSYGKEDQEPKADGPDDVSSQPLWPGDVGYGPLRIKEEQVSPSQYGGSELPSAKDGAVQNSFSEQSAGDAWQPTGRRKNRKNKETVRHITQQVEDDSRASSPVPSFLPTSGWPFSSRDSNADLSVTEASSSDSRGERAELYAQVEEGLLGGEASYLGPPLTPEKDDALHQATAVANLRAALMSKNSLLSLKADVLGDDGSLLFEYLPRGAHSLSLNEFTVIRKKFKCPYCSFSAMHQCILKRHMRSHTGERPYPCEICGKKFTRREHMKRHTLVHSKDKKYVCKVCSRVFMSAASVGIRHGSRRHGVCTDCAGRGMAGPLDHGGGGGEGSPEALFPGDGPYLEDPEDPRGEAEELGEDDEGLAPEDALLADDKDEEDSPRPRSPPGGPDKDFAWLS

SEQ ID NO: 98615 - protein, 589 aa, Homo sapiens; identical to SEQ ID NO: 98614
  Payload ID: 19689
  Gene Name: zinc finger and BTB domain containing 46
  Uniprot ID: Q86UZ6
  ENSP ID: ENSP00000303102

SEQ ID NO: 98616 - protein, 589 aa, Homo sapiens; identical to SEQ ID NO: 98614
  Payload ID: 19689
  Gene Name: zinc finger and BTB domain containing 46
  Uniprot ID: Q86UZ6
  ENSP ID: ENSP00000378536

SEQ ID NO: 98617 - protein, 747 aa, Homo sapiens
  Payload ID: 19690
  Gene Name: zinc finger and BTB domain containing 47
  Uniprot ID: Q9UFB7
  ENSP ID: ENSP00000232974
MGRLNEQRLFQPDLCDVDLVLVPQRSVFPAHKGVLAAYSQFFHSLFTQNKQLQRVELSLEALAPGGLQQILNFIYTSKLLVNAANVHEVLSAASLLQMADIAASCQELLDARSLGPPGPGTVALAQPAASCTPAAPPYYCDIKQEADTPGLPKIYAREGPDPYSVRVEDGAGTAGGTVPATIGPAQPFFKEEKEGGVEEAGGPPASLCKLEGGEELEEELGGSGTYSRREQSQIIVEVNLNNQTLHVSTGPEGKPGAGPSPATVVLGREDGLQRHSDEEEEDDEEEEEEEEEEEGGGSGREEEEEEEGGSQGEEEEEEEDGHSEQEEEEEEEEEEGPSEQDQESSEEEEGEEGEAGGKQGPRGSRSSRADPPPHSHMATRSRENARRRGTPEPEEAGRRGGKRPKPPPGVASASARGPPATDGLGAKVKLEEKQHHPCQKCPRVFNNRWYLEKHMNVTHSRMQICDQCGKRFLLESELLLHRQTDCERNIQCVTCGKAFKKLWSLHEHNKIVHGYAEKKFSCEICEKKFYTMAHVRKHMVAHTKDMPFTCETCGKSFKRSMSLKVHSLQHSGEKPFRCENCNERFQYKYQLRSHMSIHIGHKQFMCQWCGKDFNMKQYFDEHMKTHTGEKPYICEICGKSFTSRPNMKRHRRTHTGEKPYPCDVCGQRFRFSNMLKAHKEKCFRVSHTLAGDGVPAAPGLPPTQPQAHALPLLPGLPQTLPPPPHLPPPPPLFPTTASPGGRMNANN

SEQ ID NO: 98618 - protein, 293 aa, Homo sapiens
  Payload ID: 19690
  Gene Name: zinc finger and BTB domain containing 47
  ENSP ID: ENSP00000420968
MNVTHSRMQICDQCGKRFLLESELLLHRQTDCERNIQCVTCGKAFKKLWSLHEHNKIVHGYAEKKFSCEICEKKFYTMAHVRKHMVAHTKDMPFTCETCGKSFKRSMSLKVHSLQHSGEKPFRCENCNERFQYKYQLRSHMSIHIGHKQFMCQWCGKDFNMKQYFDEHMKTHTGEKPYICEICGKSFTSRPNMKRHRRTHTGEKPYPCDVCGQRFRFSNMLKAHKEKCFRVSHTLAGDGVPAAPGLPPTQPQAHALPLLPGLPQTLPPPPHLPPPPPLFPTTASPGGRMNANN

SEQ ID NO: 98619 - protein, 310 aa, Homo sapiens
  Payload ID: 19691
  Gene Name: zinc finger and BTB domain containing 48
  ENSP ID: ENSP00000313416
MDGSFVQHSVRVLQELNKQREKGQYCDATLDVGGLVFKAHWSVLACCSHFFQSLYGDGSGGSVVLPAGFAEIFGLLLDFFYTGHLALTSGNRDQVLLAARELRVPEAVELCQSFKPKTSVGQAAGGQSGLGPPASQNVNSHVKEPAGLEEEEVSRTLGLVPRDQEPRGSHSPQRPQLHSPAQSEGPSSLCGKLKQALKPCPLEDKKPEDCKVPPRPLEAEGAQLQGGSNEWEVVVQVEDDGDGDYMSEPEAVLTRRKSNVIRKPCAAEPALSAGSLAAEPAENRKGTAVPVECPTCHKKFLSKYYLKVHN

SEQ ID NO: 98620 - protein, 688 aa, Homo sapiens
  Payload ID: 19691
  Gene Name: zinc finger and BTB domain containing 48
  Uniprot ID: P10074
  ENSP ID: ENSP00000366902
MDGSFVQHSVRVLQELNKQREKGQYCDATLDVGGLVFKAHWSVLACCSHFFQSLYGDGSGGSVVLPAGFAEIFGLLLDFFYTGHLALTSGNRDQVLLAARELRVPEAVELCQSFKPKTSVGQAAGGQSGLGPPASQNVNSHVKEPAGLEEEEVSRTLGLVPRDQEPRGSHSPQRPQLHSPAQSEGPSSLCGKLKQALKPCPLEDKKPEDCKVPPRPLEAEGAQLQGGSNEWEVVVQVEDDGDGDYMSEPEAVLTRRKSNVIRKPCAAEPALSAGSLAAEPAENRKGTAVPVECPTCHKKFLSKYYLKVHNRKHTGEKPFECPKCGKCYFRKENLLEHEARNCMNRSEQVFTCSVCQETFRRRMELRVHMVSHTGEMPYKCSSCSQQFMQKKDLQSHMIKLHGAPKPHACPTCAKCFLSRTELQLHEAFKHRGEKLFVCEECGHRASSRNGLQMHIKAKHRNERPHVCEFCSHAFTQKANLNMHLRTHTGEKPFQCHLCGKTFRTQASLDKHNRTHTGERPFSCEFCEQRFTEKGPLLRHVASRHQEGRPHFCQICGKTFKAVEQLRVHVRRHKGVRKFECTECGYKFTRQAHLRRHMEIHDRVENYNPRQRKLRNLIIEDEKMVVVALQPPAELEVGSAEVIVESLAQGGLASQLPGQRLCAEESFTGPGVLEPSLIITAAVPEDCDT

SEQ ID NO: 98621 - protein, 292 aa, Homo sapiens
  Payload ID: 19691
  Gene Name: zinc finger and BTB domain containing 48
  ENSP ID: ENSP00000416054
MDGSFVQHSVRVLQELNKQREKGQYCDATLDVGGLVFKAHWSVLACCSHFFQSLYGDGSGGSVVLPAGFAEIFGLLLDFFYTGHLALTSGNRDQVLLAARELRVPEAVELCQSFKPKTSVGQAAGGQSGLGPPASQNVNSHVKEPAGLEEEEVSRTLGLVPRDQEPRGSHSPQRPQLHSPAQSEGPSSLCGKLKQALKPCPLEDKKPEDCKVPPRPLEAEGAQLQGGSNEWEVVVQVEDDGDGDYMSEPEAVLTRRKSNVIRKPCAAEPALSAGSLAAEPAENRKGTAVPVE

SEQ ID NO: 98622 - protein, 230 aa, Homo sapiens
  Payload ID: 19691
  Gene Name: zinc finger and BTB domain containing 48
  ENSP ID: ENSP00000466390
MSEPEAVLTRRKSNVIRKPCAAEPALSAGSLAAEPAENRKGTAVPVECPTCHKKFLSKYYLKVHNRKHTGEKPFECPKCGKCYFRKENLLEHEARNCMNRSEQVFTCSVCQETFRRRMELRVHMVSHTGEMPYKCSSCSQQFMQKKDLQSHMIKLHGAPKPHACPTCAKCFLSRTELQLHEAFKHRGEKLFVCEECGHRASSRNGLQMHIKAKHRNERPHVCEFCSHAFT

SEQ ID NO: 98623 - protein, 128 aa, Homo sapiens
  Payload ID: 19691
  Gene Name: zinc finger and BTB domain containing 48
  ENSP ID: ENSP00000467104
MIKLHGAPKPHASCSCMKLSSTVVRSCLCVRSVGTGPRAGMACRCTSRPSTGMRGHTYVSSAATPSPKRPISTCTCAHTRVRSPSSATSVARPSEPKPAWTSTTAPTPGKGPSVASSVNSASLRRGPS

SEQ ID NO: 98624 - protein, 131 aa, Homo sapiens
  Payload ID: 19691
  Gene Name: zinc finger and BTB domain containing 48
  ENSP ID: ENSP00000482731
MELRVHMVSHTGEMPYKVRLGLSPGPGLGGPRILPAEPFTWGAVRHLPHSSCQGACLPCLPCLSSAPLSRQGLSAASPPRSLLGPCFFPWRTGLASSGQLSPEALLCTILHTRSGVLPESSHRGLPLVPAL

SEQ ID NO: 98625 - protein, 765 aa, Homo sapiens
  Payload ID: 19692
  Gene Name: zinc finger and BTB domain containing 49
  Uniprot ID: Q6ZSB9
  ENSP ID: ENSP00000338807
MDPVATHSCHLLQQLHEQRIQGLLCDCMLVVKGVCFKAHKNVLAAFSQYFRSLFQNSSSQKNDVFHLDVKNVSGIGQILDFMYTSHLDLNQDNIQVMLDTAQCLQVQNVLSLCHTFLKSATVVQPPGMPCNSTLSLQSTLTPDATCVISENYPPHLLQECSADAQQNKTLDESHPHASPSVNRHHSAGEISKQAPDTSDGSCTELPFKQPNYYYKLRNFYSKQYHKHAAGPSQERVVEQPFAFSTSTDLTTVESQPCAVSHSECILESPEHLPSNFLAQPVNDSAPHPESDATCQQPVKQMRLKKAIHLKKLNFLKSQKYAEQVSEPKSDDGLTKRLESASKNTLEKASSQSAEEKESEEVVSCENFNCISETERPEDPAALEDQSQTLQSQRQYACELCGKPFKHPSNLELHKRSHTGEKPFECNICGKHFSQAGNLQTHLRRHSGEKPYICEICGKRFAASGDVQRHIIIHSGEKPHLCDICGRGFSNFSNLKEHKKTHTADKVFTCDECGKSFNMQRKLVKHRIRHTGERPYSCSACGKCFGGSGDLRRHVRTHTGEKPYTCEICNKCFTRSAVLRRHKKMHCKAGDESPDVLEELSQAIETSDLEKSQSSDSFSQDTSVTLMPVSVKLPVHPVENSVAEFDSHSGGSYCKLRSMIQPHGVSDQEKLSLDPGKLAKPQMQQTQPQAYAYSDVDTPAGGEPLQADGMAMIRSSLAALDNHGGDPLGSRASSTTYRNSEGQFFSSMTLWGLAMKTLQNENELDQ

SEQ ID NO: 98626 - protein, 174 aa, Homo sapiens
  Payload ID: 19692
  Gene Name: zinc finger and BTB domain containing 49
  ENSP ID: ENSP00000421654
  MOD_RES (1)..(1): Any amino acid
XILESPEHLPSNFLAQPVNDSAPHPESDATCQQPVKQMRLKKAIHLKKLNFLKSQKYAEQVSEPKSDDGLTKRLESASKNTLEKASSQSAEEKESEEVVSCENFNCISETERPEDPAALEDQSQTLQSQRQYACELCGKPFKHPSNLELHKRSHTGKCFGGSGDLRRHVRTHTG

SEQ ID NO: 98627 - protein, 453 aa, Homo sapiens
  Payload ID: 19692
  Gene Name: zinc finger and BTB domain containing 49
  ENSP ID: ENSP00000422321
MDPVATHSCHLLQQLHEQRIQGLLCDCMLVVKGVCFKAHKNVLAAFSQYFRSLFQNSSSQKNDVFHLDVKNVSGIGQILDFMYTSHLDLNQDNIQVMLDTAQCLQVQNVLSLCHTFLKSATVVQPPGMPCNSTLSLQSTLTPDATCVISENYPPHLLQECSADAQQNKTLDESHPHASPSVNRHHSAGEISKQAPDTSDGSCTELPFKQPNYYYKLRNFYSKQYHKHAAGPSQERVVEQPFAFSTSTDLTTVESQPCAVSHSECILESPEHLPSNFLAQPVNDSAPHPESDATCQQPVKQMRLKKAIHLKKLNFLKSQKYAEQVSEPKSDDGLTKRLESASKNTLEKASSQSAEEKESEEVVSCENFNCISETERPEDPAALEDQSQTLQSQRQYACELCGKPFKHPSNLELHKRSHTGLQPLATSSVTLLFTQEKNHTCVTSVVEGLVTSVI

SEQ ID NO: 98628 - protein, 144 aa, Homo sapiens
  Payload ID: 19692
  Gene Name: zinc finger and BTB domain containing 49
  ENSP ID: ENSP00000424525
MDPVATHSCHLLQQLHEQRIQGLLCDCMLVVKGVCFKAHKNVLAAFSQYFRNVQQMHSRTKRWMNRIRMLHHQLIVITPQVKSQNKLLILQMAAAQNCLSNSQITITNSETFTVSSTINTQLVPVRRELLSSLLLSAPLQTLPR

SEQ ID NO: 98629 - protein, 146 aa, Homo sapiens
  Payload ID: 19692
  Gene Name: zinc finger and BTB domain containing 49
  ENSP ID: ENSP00000425747
MDPVATHSCHLLQQLHEQRIQGLLCDCMLVVKGVCFKAHKNVLAAFSQYFRSLFQNSSSQKNDVFHLDVKNVSGIGQILDFMYTSHLDLNQDNIQVMLDTAQCLQVQNVLSLCHTFLKSATVVQPPGMPCNSTLSLQSTLTPDATC

SEQ ID NO: 98630 - protein, 122 aa, Homo sapiens
  Payload ID: 19692
  Gene Name: zinc finger and BTB domain containing 49
  ENSP ID: ENSP00000426765
  MOD_RES (1)..(1): Any amino acid
XQMRLKKAIHLKKLNFLKSQKYAEQVSEPKSDDGLTKRLESASKNTLEKASSQSAEEKESEEVVSCENFNCISETERPEDPAALEDQSQTLQSQRQYACELCGKPFKHPSNLELHKRSHTGR

SEQ ID NO: 98631 - protein, 677 aa, Homo sapiens
  Payload ID: 19693
  Gene Name: zinc finger and BTB domain containing 5
  Uniprot ID: O15062
  ENSP ID: ENSP00000307604
MDFPGHFEQIFQQLNYQRLHGQLCDCVIVVGNRHFKAHRSVLAACSTHFRALFSVAEGDQTMNMIQLDSEVVTAEAFAALIDMMYTSTLMLGESNVMDVLLAASHLHLNSVVKACKHYLTTRTLPMSPPSERVQEQSARMQRSFMLQQLGLSIVSSALNSSQNGEEQPAPMSSSMRSNLDQRTPFPMRRLHKRKQSAEERARQRLRPSIDESAISDVTPENGPSGVHSREEFFSPDSLKIVDNPKADGMTDNQEDSAIMFDQSFGTQEDAQVPSQSDNSAGNMAQLSMASRATQVETSFDQEAAPEKSSFQCENPEVGLGEKEHMRVVVKSEPLSSPEPQDEVSDVTSQAEGSESVEVEGVVVSAEKIDLSPESSDRSFSDPQSSTDRVGDIHILEVTNNLEHKSTFSISNFLNKSRGNNFTANQNNDDNIPNTTSDCRLESEAPYLLSPEAGPAGGPSSAPGSHVENPFSEPADSHFVRPMQEVMGLPCVQTSGYQGGEQFGMDFSRSGLGLHSSFSRVMIGSPRGGASNFPYYRRIAPKMPVVTSVRSSQIPENSTSSQLMMNGATSSFENGHPSQPGPPQLTRASADVLSKCKKALSEHNVLVVEGARKYACKICCKTFLTLTDCKKHIRVHTGEKPYACLKCGKRFSQSSHLYKHSKTTCLRWQSSNLPSTLL

SEQ ID NO: 98632 - protein, 424 aa, Homo sapiens
  Payload ID: 19694
  Gene Name: zinc finger and BTB domain containing 6
  Uniprot ID: Q15916
  ENSP ID: ENSP00000362763
MAAESDVLHFQFEQQGDVVLQKMNLLRQQNLFCDVSIYINDTEFQGHKVILAACSTFMRDQFLLTQSKHVRITILQSAEVGRKLLLSCYTGALEVKRKELLKYLTAASYLQMVHIVEKCTEALSKYLEIDLSMKNNNQHTDLCQSSDPDVKNEDENSDKDCEIIEISEDSPVNIDFHVKEEESNALQSTVESLTSERKEMKSPELSTVDIGFKDNEICILHVESISTAGVENGQFSQPCTSSKASMYFSETQHSLINSTVESRVAEVPGNQDQGLFCENTEGSYGTVSEIQNLEEGYSLRHQCPRCPRGFLHVENYLRHLKMHKLFLCLQCGKTFTQKKNLNRHIRGHMGIRPFQCTVCLKTFTAKSTLQDHLNIHSGDRPYKCHCCDMDFKHKSALKKHLTSVHGRSSGEKLSRPDLKRQSLL

SEQ ID NO: 98633 - protein, 584 aa, Homo sapiens
  Payload ID: 19695
  Gene Name: zinc finger and BTB domain containing 7A
  Uniprot ID: O95365
  ENSP ID: ENSP00000323670
MAGGVDGPIGIPFPDHSSDILSGLNEQRTQGLLCDVVILVEGREFPTHRSVLAACSQYFKKLFTSGAVVDQQNVYEIDFVSAEALTALMDFAYTATLTVSTANVGDILSAARLLEIPAVSHVCADLLDRQILAADAGADAGQLDLVDQIDQRNLLRAKEYLEFFQSNPMNSLPPAAAAAAASFPWSAFGASDDDLDATKEAVAAAVAAVAAGDCNGLDFYGPGPPAERPPTGDGDEGDSNPGLWPERDEDAPTGGLFPPPVAPPAATQNGHYGRGGEEEAASLSEAAPEPGDSPGFLSGAAEGEDGDGPDVDGLAASTLLQQMMSSVGRAGAAAGDSDEESRADDKGVMDYYLKYFSGAHDGDVYPAWSQKVEKKIRAKAFQKCPICEKVIQGAGKLPRHIRTHTGEKPYECNICKVRFTRQDKLKVHMRKHTGEKPYLCQQCGAAFAHNYDLKNHMRVHTGLRPYQCDSCCKTFVRSDHLHRHLKKDGCNGVPSRRGRKPRVRGGAPDPSPGATATPGAPAQPSSPDARRNGQEKHFKDEDEDEDVASPDGLGRLNVAGAGGGGDSGGGPGAATDGNFTAGLA

SEQ ID NO: 98634 - protein, 584 aa, Homo sapiens; identical to SEQ ID NO: 98633
  Payload ID: 19695
  Gene Name: zinc finger and BTB domain containing 7A
  Uniprot ID: O95365
  ENSP ID: ENSP00000471865

SEQ ID NO: 98635 - protein, 539 aa, Homo sapiens
  Payload ID: 19696
  Gene Name: zinc finger and BTB domain containing 7B
  Uniprot ID: O15156
  ENSP ID: ENSP00000292176
MGSPEDDLIGIPFPDHSSELLSCLNEQRQLGHLCDLTIRTQGLEYRTHRAVLAACSHYFKKLFTEGGGGAVMGAGGSGTATGGAGAGVCELDFVGPEALGALLEFAYTATLTTSSANMPAVLQAARLLEIPCVIAACMEILQGSGLEAPSPDEDDCERARQYLEAFATATASGVPNGEDSPPQVPLPPPPPPPPRPVARRSRKPRKAFLQTKGARANHLVPEVPTVPAHPLTYEEEEVAGRVGSSGGSGPGDSYSPPTGTASPPEGPQSYEPYEGEEEEEELVYPPAYGLAQGGGPPLSPEELGSDEDAIDPDLMAYLSSLHQDNLAPGLDSQDKLVRKRRSQMPQECPVCHKIIHGAGKLPRHMRTHTGEKPFACEVCGVRFTRNDKLKIHMRKHTGERPYSCPHCPARFLHSYDLKNHMHLHTGDRPYECHLCHKAFAKEDHLQRHLKGQNCLEVRTRRRRKDDAPPHYPPPSTAAASPAGLDLSNGHLDTFRLSLARFWEQSAPTGPPVSTPGPPDDDEEEGAPTTPQAEGAMESS

SEQ ID NO: 98636 - protein, 539 aa, Homo sapiens; identical to SEQ ID NO: 98635
  Payload ID: 19696
  Gene Name: zinc finger and BTB domain containing 7B
  Uniprot ID: O15156
  ENSP ID: ENSP00000357411

SEQ ID NO: 98637 - protein, 573 aa, Homo sapiens
  Payload ID: 19696
  Gene Name: zinc finger and BTB domain containing 7B
  Uniprot ID: O15156
  ENSP ID: ENSP00000406286
MLQPGPHPPSPQAAAPGEAWPGPSQAPWQSLEEKMGSPEDDLIGIPFPDHSSELLSCLNEQRQLGHLCDLTIRTQGLEYRTHRAVLAACSHYFKKLFTEGGGGAVMGAGGSGTATGGAGAGVCELDFVGPEALGALLEFAYTATLTTSSANMPAVLQAARLLEIPCVIAACMEILQGSGLEAPSPDEDDCERARQYLEAFATATASGVPNGEDSPPQVPLPPPPPPPPRPVARRSRKPRKAFLQTKGARANHLVPEVPTVPAHPLTYEEEEVAGRVGSSGGSGPGDSYSPPTGTASPPEGPQSYEPYEGEEEEEELVYPPAYGLAQGGGPPLSPEELGSDEDAIDPDLMAYLSSLHQDNLAPGLDSQDKLVRKRRSQMPQECPVCHKIIHGAGKLPRHMRTHTGEKPFACEVCGVRFTRNDKLKIHMRKHTGERPYSCPHCPARFLHSYDLKNHMHLHTGDRPYECHLCHKAFAKEDHLQRHLKGQNCLEVRTRRRRKDDAPPHYPPPSTAAASPAGLDLSNGHLDTFRLSLARFWEQSAPTGPPVSTPGPPDDDEEEGAPTTPQAEGAMESS

SEQ ID NO: 98638 - protein, 539 aa, Homo sapiens; identical to SEQ ID NO: 98635
  Payload ID: 19696
  Gene Name: zinc finger and BTB domain containing 7B
  Uniprot ID: O15156
  ENSP ID: ENSP00000438647

SEQ ID NO: 98639 - protein, 619 aa, Homo sapiens
  Payload ID: 19697
  Gene Name: zinc finger and BTB domain containing 7C
  Uniprot ID: A1YPR0
  ENSP ID: ENSP00000439781
MANDIDELIGIPFPNHSSEVLCSLNEQRHDGLLCDVLLVVQEQEYRTHRSVLAACSKYFKKLFTAGTLASQPYVYEIDFVQPEALAAILEFAYTSTLTITAGNVKHILNAARMLEIQCIVNVCLEIMEPGGDGGEEDDKEDDDDDEDDDDEEDEEEEEEEEEDDDDDTEDFADQENLPDPQDISCHQSPSKTDHLTEKAYSDTPRDFPDSFQAGSPGHLGVIRDFSIESLLRENLYPKANIPDRRPSLSPFAPDFFPHLWPGDFGAFAQLPEQPMDSGPLDLVIKNRKIKEEEKEELPPPPPPPFPNDFFKDMFPDLPGGPLGPIKAENDYGAYLNFLSATHLGGLFPPWPLVEERKLKPKASQQCPICHKVIMGAGKLPRHMRTHTGEKPYMCTICEVRFTRQDKLKIHMRKHTGERPYLCIHCNAKFVHNYDLKNHMRIHTGVRPYQCEFCYKSFTRSDHLHRHIKRQSCRMARPRRGRKPAAWRAASLLFGPGGPAPDKAAFVMPPALGEVGGHLGGAAVCLPGPSPAKHFLAAPKGALSLQELERQFEETQMKLFGRAQLEAERNAGGLLAFALAENVAAARPYFPLPDPWAAGLAGLPGLAGLNHVASMSEANN

SEQ ID NO: 98640 - protein, 25 aa, Homo sapiens
  Payload ID: 19697
  Gene Name: zinc finger and BTB domain containing 7C
  ENSP ID: ENSP00000464724
MANDIDELIGIPFPNHSSEVLCSLN

SEQ ID NO: 98641 - protein, 18 aa, Homo sapiens
  Payload ID: 19697
  Gene Name: zinc finger and BTB domain containing 7C
  ENSP ID: ENSP00000465160
MANDIDELIGIPFPNHSS

SEQ ID NO: 98642 - protein, 25 aa, Homo sapiens
  Payload ID: 19697
  Gene Name: zinc finger and BTB domain containing 7C
  ENSP ID: ENSP00000465265
MANDIDELIGIPFPNHSSEVLCSLN

SEQ ID NO: 98643 - protein, 15 aa, Homo sapiens
  Payload ID: 19697
  Gene Name: zinc finger and BTB domain containing 7C
  ENSP ID: ENSP00000465494
MANDIDELIGIPFPN

SEQ ID NO: 98644 - protein, 25 aa, Homo sapiens
  Payload ID: 19697
  Gene Name: zinc finger and BTB domain containing 7C
  ENSP ID: ENSP00000465760
MANDIDELIGIPFPNHSSEVLCSLN

SEQ ID NO: 98645 - protein, 15 aa, Homo sapiens
  Payload ID: 19697
  Gene Name: zinc finger and BTB domain containing 7C
  ENSP ID: ENSP00000465832
MANDIDELIGIPFPN

SEQ ID NO: 98646 - protein, 25 aa, Homo sapiens
  Payload ID: 19697
  Gene Name: zinc finger and BTB domain containing 7C
  ENSP ID: ENSP00000465835
MANDIDELIGIPFPNHSSEVLCSLN

SEQ ID NO: 98647 - protein, 25 aa, Homo sapiens
  Payload ID: 19697
  Gene Name: zinc finger and BTB domain containing 7C
  ENSP ID: ENSP00000466006
MANDIDELIGIPFPNHSSEVLCSLN

SEQ ID NO: 98648 - protein, 18 aa, Homo sapiens
  Payload ID: 19697
  Gene Name: zinc finger and BTB domain containing 7C
  ENSP ID: ENSP00000466088
MANDIDELIGIPFPNHSS

SEQ ID NO: 98649 - protein, 18 aa, Homo sapiens
  Payload ID: 19697
  Gene Name: zinc finger and BTB domain containing 7C
  ENSP ID: ENSP00000466944
MANDIDELIGIPFPNHSS

SEQ ID NO: 98650 - protein, 25 aa, Homo sapiens
  Payload ID: 19697
  Gene Name: zinc finger and BTB domain containing 7C
  ENSP ID: ENSP00000467147
MANDIDELIGIPFPNHSSEVLCSLN

SEQ ID NO: 98651 - protein, 66 aa, Homo sapiens
  Payload ID: 19697
  Gene Name: zinc finger and BTB domain containing 7C
  ENSP ID: ENSP00000467323
MANDIDELIGIPFPNHSSEVLCSLNEQRHDGLLCDVLLVVQEQEYRTHRSVLAACSKYFKKLFTAG

SEQ ID NO: 98652 - protein, 15 aa, Homo sapiens
  Payload ID: 19697
  Gene Name: zinc finger and BTB domain containing 7C
  ENSP ID: ENSP00000467338
MANDIDELIGIPFPN

SEQ ID NO: 98653 - protein, 15 aa, Homo sapiens
  Payload ID: 19697
  Gene Name: zinc finger and BTB domain containing 7C
  ENSP ID: ENSP00000467456
MANDIDELIGIPFPN

SEQ ID NO: 98654 - protein, 18 aa, Homo sapiens
  Payload ID: 19697
  Gene Name: zinc finger and BTB domain containing 7C
  ENSP ID: ENSP00000467758
MANDIDELIGIPFPNHSS

SEQ ID NO: 98655 - protein, 619 aa, Homo sapiens; identical to SEQ ID NO: 98639
  Payload ID: 19697
  Gene Name: zinc finger and BTB domain containing 7C
  Uniprot ID: A1YPR0
  ENSP ID: ENSP00000467877

SEQ ID NO: 98656 - protein, 25 aa, Homo sapiens
  Payload ID: 19697
  Gene Name: zinc finger and BTB domain containing 7C
  ENSP ID: ENSP00000468019
MANDIDELIGIPFPNHSSEVLCSLN

SEQ ID NO: 98657 - protein, 25 aa, Homo sapiens
  Payload ID: 19697
  Gene Name: zinc finger and BTB domain containing 7C
  ENSP ID: ENSP00000468087
MANDIDELIGIPFPNHSSEVLCSLN

SEQ ID NO: 98658 - protein, 15 aa, Homo sapiens
  Payload ID: 19697
  Gene Name: zinc finger and BTB domain containing 7C
  ENSP ID: ENSP00000468152
MANDIDELIGIPFPN

SEQ ID NO: 98659 - protein, 619 aa, Homo sapiens; identical to SEQ ID NO: 98639
  Payload ID: 19697
  Gene Name: zinc finger and BTB domain containing 7C
  Uniprot ID: A1YPR0
  ENSP ID: ENSP00000468254

SEQ ID NO: 98660 - protein, 25 aa, Homo sapiens
  Payload ID: 19697
  Gene Name: zinc finger and BTB domain containing 7C
  ENSP ID: ENSP00000468306
MANDIDELIGIPFPNHSSEVLCSLN

SEQ ID NO: 98661 - protein, 25 aa, Homo sapiens
  Payload ID: 19697
  Gene Name: zinc finger and BTB domain containing 7C
  ENSP ID: ENSP00000468502
MANDIDELIGIPFPNHSSEVLCSLN

SEQ ID NO: 98662 - protein, 25 aa, Homo sapiens
  Payload ID: 19697
  Gene Name: zinc finger and BTB domain containing 7C
  ENSP ID: ENSP00000468537
MANDIDELIGIPFPNHSSEVLCSLN

SEQ ID NO: 98663 - protein, 25 aa, Homo sapiens
  Payload ID: 19697
  Gene Name: zinc finger and BTB domain containing 7C
  ENSP ID: ENSP00000468659
MANDIDELIGIPFPNHSSEVLCSLN

SEQ ID NO: 98664 - protein, 15 aa, Homo sapiens
  Payload ID: 19697
  Gene Name: zinc finger and BTB domain containing 7C
  ENSP ID: ENSP00000468752
MANDIDELIGIPFPN

SEQ ID NO: 98665 - protein, 619 aa, Homo sapiens; identical to SEQ ID NO: 98639
  Payload ID: 19697
  Gene Name: zinc finger and BTB domain containing 7C
  Uniprot ID: A1YPR0
  ENSP ID: ENSP00000468782

SEQ ID NO: 98666 - protein, 18 aa, Homo sapiens
  Payload ID: 19697
  Gene Name: zinc finger and BTB domain containing 7C
  ENSP ID: ENSP00000468814
MANDIDELIGIPFPNHSS

SEQ ID NO: 98667 - protein, 76 aa, Homo sapiens
  Payload ID: 19698
  Gene Name: zinc finger and BTB domain containing 8 opposite strand
  ENSP ID: ENSP00000343760
MKGGSRVSNPAVMAQEEEDVRDYNLTEEQKAIKAKYPPVNRKYEYQQTHLLQSPHRIYSHLHSSAIWNPYLHLMGT

SEQ ID NO: 98668 - protein, 131 aa, Homo sapiens
  Payload ID: 19698
  Gene Name: zinc finger and BTB domain containing 8 opposite strand
  Uniprot ID: Q8IWT0
  ENSP ID: ENSP00000362600
MFQSWLHAWGDTLEEAFEQCAMAMFGYMTDTGTVEPLQTVEVETQGDDLQSLLFHFLDEWLYKFSADEFFIPREVKVLSIDQRNFKLRSIGWGEEFSLSKHPQGTEVKAITYSAMQVYNEENPEVFVIIDI

SEQ ID NO: 98669 - protein, 147 aa, Homo sapiens
  Payload ID: 19698
  Gene Name: zinc finger and BTB domain containing 8 opposite strand
  ENSP ID: ENSP00000413485
  MOD_RES (1)..(1): Any amino acid
XGGSRVSNPAVMAQEEEDVRDYNLTEEQKAIKAKYPPVNRKYEYLDHTADVQLHAWGDTLEEAFEQCAMAMFGYMTDTGTVEPLQTVEVETQGDDLQSLLFHFLDEWLYKFSADEFFIPRVGRRIFIVQAPSGNRSQSNNIFSNAGL

SEQ ID NO: 98670 - protein, 179 aa, Homo sapiens
  Payload ID: 19698
  Gene Name: zinc finger and BTB domain containing 8 opposite strand
  ENSP ID: ENSP00000417677
MKGGSRVSNPAVMAQEEEDVRDYNLTEEQKAIKAKYPPVNRKYEYLDHTADVQLHAWGDTLEEAFEQCAMAMFGYMTDTGTVEPLQTVEVETQGDDLQSLLFHFLDEWLYKFSADEFFIPREVKVLSIDQRNFKLRSIGWGEEFSLSKHPQGTEVKAITYSAMQVYNEENPEVFVIIDI

SEQ ID NO: 98671 - protein, 78 aa, Homo sapiens
  Payload ID: 19698
  Gene Name: zinc finger and BTB domain containing 8 opposite strand
  ENSP ID: ENSP00000474993
AVMAQEEEDVRDYNLTEEQKAIKAKYPPVNRKYEYLDHTADVHGLYYTEHEYTSLGYTHGEILWRKHLSNVQWPCLVT

SEQ ID NO: 98672 - protein, 56 aa, Homo sapiens
  Payload ID: 19698
  Gene Name: zinc finger and BTB domain containing 8 opposite strand
  ENSP ID: ENSP00000477945
MKGGSRVSNPAVMAQEEEDVRDYNLTEEQKAIKAKYPPVNRKYELDCITQSMNILL

SEQ ID NO: 98673 - protein, 56 aa, Homo sapiens
  Payload ID: 19698
  Gene Name: zinc finger and BTB domain containing 8 opposite strand
  ENSP ID: ENSP00000478932
RVSNPAVMAQEEEDVRDYNLTEEQKAIKAKYPPVNRKYECEFGSYSRCPWIVLHRA

SEQ ID NO: 98674 - protein, 72 aa, Homo sapiens
  Payload ID: 19698
  Gene Name: zinc finger and BTB domain containing 8 opposite strand
  ENSP ID: ENSP00000479853
  MOD_RES (1)..(1): Any amino acid
XGDTLEEAFEQCAMAMFGYMTDTGTVEPLQTVEVETQGDDLQSLLFHFLDEWLYKFSADEFFIPRKLCAIVF

SEQ ID NO: 98675 - protein, 110 aa, Homo sapiens
  Payload ID: 19698
  Gene Name: zinc finger and BTB domain containing 8 opposite strand
  ENSP ID: ENSP00000481039
MAMFGYMTDTGTVEPLQTVEVETQGDDLQSLLFHFLDEWLYKFSADEFFIPREVKVLSIDQRNFKLRSIGWGEEFSLSKHPQGTEVKAITYSAMQVYNEENPEVFVIIDI

SEQ ID NO: 98676 - protein, 169 aa, Homo sapiens
  Payload ID: 19698
  Gene Name: zinc finger and BTB domain containing 8 opposite strand
  ENSP ID: ENSP00000483675
  MOD_RES (1)..(1): Any amino acid
XSRVSNPAVMAQEEEDVRDYNLTEEQKAIKAKYPPVNRKYECELHAWGDTLEEAFEQCAMAMFGYMTDTGTVEPLQTVEVETQGDDLQSLLFHFLDEWLYKFSADEFFIPREVKVLSIDQRNFKLRSIGWGEEFSLSKHPQGTEVKAITYSAMQVYNEENPEVFVIIDI

SEQ ID NO: 98677 - protein, 88 aa, Homo sapiens
  Payload ID: 19698
  Gene Name: zinc finger and BTB domain containing 8 opposite strand
  ENSP ID: ENSP00000484207
  MOD_RES (1)..(1): Any amino acid
XVSNPAVMAQEEEDVRDYNLTEEQKAIKAKYPPVNRKYEYLDHTADVQWGEEFSLSKHPQGTEVKAITYSAMQVYNEENPEVFVIIDI

SEQ ID NO: 98678 - protein, 340 aa, Homo sapiens
  Payload ID: 19699
  Gene Name: zinc finger and BTB domain containing 8A
  ENSP ID: ENSP00000317561
MEISSHQSHLLQQLNEQRRQDVFCDCSILVEGKVFKAHRNVLFASSGYFKMLLSQNSKETSQPTTATFQAFSPDTFTVILDFVYSGKLSLTGQNVIEVMSAASFLQMTDVISVCKTFIKSSLDISEKEKDRYFSLSDKDANSNGVERSSFYSGGWQEGSSSPRSHLSPEQGTGIISGKSWNKYNYHPASQKNTQQPLAKHEPRKESIKKTKHLRLSQPSEVTHYKSSKREVRTSDSSSHVSQSEEQAQIDAEMDSTPVGYQYGQGSDVTSKSFPDDLPRMRFKCPYCTHVVKRKADLKRHLRCHTGERPYPCQACGKRFSRLDHLSSHFRTMEIRIPDGT

SEQ ID NO: 98679 - protein, 441 aa, Homo sapiens
  Payload ID: 19699
  Gene Name: zinc finger and BTB domain containing 8A
  Uniprot ID: Q96BR9
  ENSP ID: ENSP00000362609
MEISSHQSHLLQQLNEQRRQDVFCDCSILVEGKVFKAHRNVLFASSGYFKMLLSQNSKETSQPTTATFQAFSPDTFTVILDFVYSGKLSLTGQNVIEVMSAASFLQMTDVISVCKTFIKSSLDISEKEKDRYFSLSDKDANSNGVERSSFYSGGWQEGSSSPRSHLSPEQGTGIISGKSWNKYNYHPASQKNTQQPLAKHEPRKESIKKTKHLRLSQPSEVTHYKSSKREVRTSDSSSHVSQSEEQAQIDAEMDSTPVGYQYGQGSDVTSKSFPDDLPRMRFKCPYCTHVVKRKADLKRHLRCHTGERPYPCQACGKRFSRLDHLSSHFRTIHQACKLICRKCKRHVTDLTGQVVQEGTRRYRLCNECLAEFGIDSLPIDLEAEQHLMSPSDGDKDSRWHLSEDENRSYVEIVEDGSADLVIQQVDDSEEEEEKEIKPNIR

SEQ ID NO: 98680 - protein, 495 aa, Homo sapiens
  Payload ID: 19700
  Gene Name: zinc finger and BTB domain containing 8B
  Uniprot ID: Q8NAP8
  ENSP ID: ENSP00000476499
MEMQSYYAKLLGELNEQRKRDFFCDCSIIVEGRIFKAHRNILFANSGYFRALLIHYIQDSGRHSTASLDIVTSDAFSIILDFLYSGKLDLCGENVIEVMSAASYLQMNDVVNFCKTYIRSSLDICRKMEKEAAVAAAVAAAAAAAAAAAAAAAHQVDSESPSSGREGTSCGTKSLVSSPAEGEKSVECLRESPCGDCGDCHPLELVVRDSLGGGSADSNLSTPPKRIEPKVEFDADEVEVDVGEQLQQYAAPLNLAHVEEALPSGQAVDLAYSNYHVKQFLEALLRNSAAPSKDDADHHFSRSLEGRPEGAGVAMSSMMDVQADWYGEDSGDVLVVPIKLHKCPFCPYTAKQKGILKRHIRSHTGERPYPCETCGKRFTRQEHLRSHALSVHRSNRPIICKGCRRTFTSHLSQGLRRFGLCDSCTCVTDTPDDDDDLMPINLSLVEASSESQEKSDTDNDWPIYVESGEENDPAGDDSDDKPQIQPNLSDRETLT

SEQ ID NO: 98681 - protein, 473 aa, Homo sapiens
  Payload ID: 19701
  Gene Name: zinc finger and BTB domain containing 9
  Uniprot ID: Q96C00
  ENSP ID: ENSP00000378503
METPTPLPPVPASPTCNPAPRTIQIEFPQHSSSLLESLNRHRLEGKFCDVSLLVQGRELRAHKAVLAAASPYFHDKLLLGDAPRLTLPSVIEADAFEGLLQLIYSGRLRLPLDALPAHLLVASGLQMWQVVDQCSEILRELETSGGGISARGGNSYHALLSTTSSTGGWCIRSSPFQTPVQSSASTESPASTESPVGGEGSELGEVLQIQVEEEEEEEEDDDDEDQGSATLSQTPQPQRVSGVFPRPHGPHPLPMTATPRKLPEGESAPLELPAPPALPPKIFYIKQEPFEPKEEISGSGTQPGGAKEETKVFSGGDTEGNGELGFLLPSGPGPTSGGGGPSWKPVDLHGNEILSGGGGPGGAGQAVHGPVKLGGTPPADGKRFGCLCGKRFAVKPKRDRHIMLTFSLRPFGCGICNKRFKLKHHLTEHMKTHAGALHACPHCGRRFRVHACFLRHRDLCKGQGWATAHWTYK

SEQ ID NO: 98682 - protein, 473 aa, Homo sapiens; identical to SEQ ID NO: 98681
  Payload ID: 19701
  Gene Name: zinc finger and BTB domain containing 9
  Uniprot ID: Q96C00
  ENSP ID: ENSP00000413557

SEQ ID NO: 98683 - protein, 116 aa, Homo sapiens
  Payload ID: 19701
  Gene Name: zinc finger and BTB domain containing 9
  ENSP ID: ENSP00000478118
  MOD_RES (1)..(1): Any amino acid
XIYSGRLRLPLDALPAHLLVASGLQMWQEAGAFALRLSRPQYSPLLLLKALLPLRALWEGREVNWEKCCKFRWKKKRRRRKMMMMRTRGQPHSLRLLSPREYQGFFPVLMDPTHCP

SEQ ID NO: 98684 - protein, 138 aa, Homo sapiens
  Payload ID: 19701
  Gene Name: zinc finger and BTB domain containing 9
  ENSP ID: ENSP00000484265
METPTPLPPVPASPTCNPAPRTIQIEFPQHSSSLLESLNRHRLEGKFCDVSLLVQGRELRAHKAVLAAASPYFHDKLLLGDAPRLTLPSVIEADAFEGLLQLIYSGRLRLPLDALPAHLLVASGLQMWQVVDQCSEIL

SEQ ID NO: 98685 - protein, 79 aa, Homo sapiens
  Payload ID: 19701
  Gene Name: zinc finger and BTB domain containing 9
  ENSP ID: ENSP00000484571
METPTPLPPVPASPTCNPAPRTIQIEFPQHSSSLLESLNRHRLEGKFCDVSLLVQGRELRAHKAVLAAASPYFHDKLLL

SEQ ID NO: 98686 - protein, 408 aa, Homo sapiens
  Payload ID: 19702
  Gene Name: zinc finger and SCAN domain containing 1
  Uniprot ID: Q8NBB4
  ENSP ID: ENSP00000282326
MLPRPKAPASPRRPQTPTPSEQDADPGPASPRDTEAQRLRFRQFQYHVASGPHLALGQLWTLCRQWLRPEARSKEQMLELLVLEQFLGALPSKMRTWVQSQGPRSCREAASLVEDLTQMCQQEVLVSLDSVEPQDWSFGEEEDGKSPRSQKEPSQASELILDAVAAAPALPEESEWLETTQLQQSLHTRAEAEAPRAPGLLGSRARLPLKPSIWDEPEDLLAGPSSDLRAEGTVISSPKGPSAQRISPRRRNRNTDQSGRHQPSLKHTKGGTQEAVAGISVVPRGPRGGRPFQCADCGMVFTWVTHFIEHQKTHREEGPFPCPECGKVFLHNSVLTEHGKIHLLEPPRKKAPRSKGPRESVPPRDGAQGPVAPRSPKRPFQCSVCGKAFPWMVHLIDHQKLHTAHGHM

SEQ ID NO: 98687 - protein, 178 aa, Homo sapiens
  Payload ID: 19702
  Gene Name: zinc finger and SCAN domain containing 1
  ENSP ID: ENSP00000375581
MLPRPKAPASPRRPQTPTPSEQDADPGPASPRDTEAQRLRFRQFQYHVASGPHLALGQLWTLCRQWLRPEARSKEQMLELLVLEQFLGALPSKMRTWVQSQGPRSCREAASLVEDLTQMCQQEGERRRLPAPGRARGPDVSEDRTALLPAHIAPTPARPLPTSKPLLPRGCVFNYFYI

SEQ ID NO: 98688 - protein, 178 aa, Homo sapiens; identical to SEQ ID NO: 98687
  Payload ID: 19702
  Gene Name: zinc finger and SCAN domain containing 1
  ENSP ID: ENSP00000470438

SEQ ID NO: 98689 - protein, 725 aa, Homo sapiens
  Payload ID: 19703
  Gene Name: zinc finger and SCAN domain containing 10
  Uniprot ID: Q96SZ4
  ENSP ID: ENSP00000252463
MGPRASLSRLRELCGHWLRPALHTKKQILELLVLEQFLSVLPPHLLGRLQGQPLRDGEEVVLLLEGIHREPSHAGPLDFSCNAGKSCPRADVTLEEKGCASQVPSHSPKKELPAEEPSVLGPSDEPPRPQPRAAQPAEPGQWRLPPSSKQPLSPGPQKTFQALQESSPQGPSPWPEESSRDQELAAVLECLTFEDVPENKAWPAHPLGFGSRTPDKEEFKQEEPKGAAWPTPILAESQADSPGVPGEPCAQSLGRGAAASGPGEDGSLLGSSEILEVKVAEGVPEPNPELQFICADCGVSFPQLSRLKAHQLRSHPAGRSFLCLCCGKSFGRSSILKLHMRTHTDERPHACHLCGHRFRQSSHLSKHLLTHSSEPAFLCAECGRGFQRRASLVQHLLAHAQDQKPPCAPESKAEAPPLTDVLCSHCGQSFQRRSSLKRHLRIHARDKDRRSSEGSGSRRRDSDRRPFVCSDCGKAFRRSEHLVAHRRVHTGERPFSCQACGRSFTQSSQLVSHQRVHTGEKPYACPQCGKRFVRRASLARHLLTHGGPRPHHCTQCGKSFGQTQDLARHQRSHTGEKPCRCSECGEGFSQSAHLARHQRIHTGEKPHACDTCGHRFRNSSNLARHRRSHTGERPYSCQTCGRSFRRNAHLRRHLATHAEPGQEQAEPPQECVECGKSFSRSCNLLRHLLVHTGARPYSCTQCGRSFSRNSHLLRHLRTHARETLY

SEQ ID NO: 98690 - protein, 643 aa, Homo sapiens
  Payload ID: 19703
  Gene Name: zinc finger and SCAN domain containing 10
  Uniprot ID: Q96SZ4
  ENSP ID: ENSP00000440047
MLPVSGGHGATGVPEPAPGALRPLAAAGSAHQETDPGAAGAGAVPECAASAPPGPPAGAAAQGWGGGGAAARGHPPGAQPRGAAGPQGPSPWPEESSRDQELAAVLECLTFEDVPENKAWPAHPLGFGSRTPDKEEFKQEEPKGAAWPTPILAESQADSPGVPGEPCAQSLGRGAAASGPGEDGSLLGSSEILEVKVAEGVPEPNPELQFICADCGVSFPQLSRLKAHQLRSHPAGRSFLCLCCGKSFGRSSILKLHMRTHTDERPHACHLCGHRFRQSSHLSKHLLTHSSEPAFLCAECGRGFQRRASLVQHLLAHAQDQKPPCAPESKAEAPPLTDVLCSHCGQSFQRRSSLKRHLRIHARDKDRRSSEGSGSRRRDSDRRPFVCSDCGKAFRRSEHLVAHRRVHTGERPFSCQACGRSFTQSSQLVSHQRVHTGEKPYACPQCGKRFVRRASLARHLLTHGGPRPHHCTQCGKSFGQTQDLARHQRSHTGEKPCRCSECGEGFSQSAHLARHQRIHTGEKPHACDTCGHRFRNSSNLARHRRSHTGERPYSCQTCGRSFRRNAHLRRHLATHAEPGQEQAEPPQECVECGKSFSRSCNLLRHLLVHTGARPYSCTQCGRSFSRNSHLLRHLRTHARETLY

SEQ ID NO: 98691 - protein, 161 aa, Homo sapiens
  Payload ID: 19703
  Gene Name: zinc finger and SCAN domain containing 10
  ENSP ID: ENSP00000458260
MLGESVPAAVEQEQLGEVKLEEEEAVSPEDPRRPESRLRPEVAHQLFRCFQYQEDMGPRASLSRLRELCGHWLRPALHTKKQILELLVLEQFLSVLPPHLLGRLQGQPLRDGEEVVLLLEGIHREPSHAGPLDFSCNAGKSCPRADVTLEEKGCASQVPSH

SEQ ID NO: 98692 - protein, 780 aa, Homo sapiens
  Payload ID: 19703
  Gene Name: zinc finger and SCAN domain containing 10
  ENSP ID: ENSP00000458879
MLGESVPAAVEQEQLGEVKLEEEEAVSPEDPRRPESRLRPEVAHQLFRCFQYQEDMGPRASLSRLRELCGHWLRPALHTKKQILELLVLEQFLSVLPPHLLGRLQGQPLRDGEEVVLLLEGIHREPSHAGPLDFSCNAGKSCPRADVTLEEKGCASQVPSHSPKKELPAEEPSVLGPSDEPPRPQPRAAQPAEPGQWRLPPSSKQPLSPGPQKTFQALQESSPQGPSPWPEESSRDQELAAVLECLTFEDVPENKAWPAHPLGFGSRTPDKEEFKQEEPKGAAWPTPILAESQADSPGVPGEPCAQSLGRGAAASGPGEDGSLLGSSEILEVKVAEGVPEPNPELQFICADCGVSFPQLSRLKAHQLRSHPAGRSFLCLCCGKSFGRSSILKLHMRTHTDERPHACHLCGHRFRQSSHLSKHLLTHSSEPAFLCAECGRGFQRRASLVQHLLAHAQDQKPPCAPESKAEAPPLTDVLCSHCGQSFQRRSSLKRHLRIHARDKDRRSSEGSGSRRRDSDRRPFVCSDCGKAFRRSEHLVAHRRVHTGERPFSCQACGRSFTQSSQLVSHQRVHTGEKPYACPQCGKRFVRRASLARHLLTHGGPRPHHCTQCGKSFGQTQDLARHQRSHTGEKPCRCSECGEGFSQSAHLARHQRIHTGEKPHACDTCGHRFRNSSNLARHRRSHTGERPYSCQTCGRSFRRNAHLRRHLATHAEPGQEQAEPPQECVECGKSFSRSCNLLRHLLVHTGARPYSCTQCGRSFSRNSHLLRHLRTHARETLY

SEQ ID NO: 98693 - protein, 386 aa, Homo sapiens
  Payload ID: 19703
  Gene Name: zinc finger and SCAN domain containing 10
  Uniprot ID: Q96SZ4
  ENSP ID: ENSP00000459520
MRTHTDERPHACHLCGHRFRQSSHLSKHLLTHSSEPAFLCAECGRGFQRRASLVQHLLAHAQDQKPPCAPESKAEAPPLTDVLCSHCGQSFQRRSSLKRHLRIHARDKDRRSSEGSGSRRRDSDRRPFVCSDCGKAFRRSEHLVAHRRVHTGERPFSCQACGRSFTQSSQLVSHQRVHTGEKPYACPQCGKRFVRRASLARHLLTHGGPRPHHCTQCGKSFGQTQDLARHQRSHTGEKPCRCSECGEGFSQSAHLARHQRIHTGEKPHACDTCGHRFRNSSNLARHRRSHTGERPYSCQTCGRSFRRNAHLRRHLATHAEPGQEQAEPPQECVECGKSFSRSCNLLRHLLVHTGARPYSCTQCGRSFSRNSHLLRHLRTHARETLY

SEQ ID NO: 98694 - protein, 6 aa, Homo sapiens
  Payload ID: 19703
  Gene Name: zinc finger and SCAN domain containing 10
  ENSP ID: ENSP00000460473
MRTHTD

SEQ ID NO: 98695 - protein, 111 aa, Homo sapiens
  Payload ID: 19703
  Gene Name: zinc finger and SCAN domain containing 10
  ENSP ID: ENSP00000461871
MLGESVPAAVEQEQLGEVKLEEEEAVSPEDPRRPESRLRPEVAHQLFRCFQYQEDMGPRASLSRLRELCGHWLRPALHTKKQILELLVPRAPHHGQRRVPEIRSWRLCWSA

SEQ ID NO: 98696 - protein, 604 aa, Homo sapiens
  Payload ID: 19704
  Gene Name: zinc finger and SCAN domain containing 12
  Uniprot ID: O43309
  ENSP ID: ENSP00000354305
MASTWAIQAHMDQDEPLEVKIEEEKYTTRQDWDLRKNNTHSREVFRQYFRQFCYQETSGPREALSRLRELCHQWLRPETHTKEQILELLVLEQFLTILPEELQAWVQEQHPESGEEVVTVLEDLERELDEPGEQVSVHTGEQEMFLQETVRLRKEGEPSMSLQSMKAQPKYESPELESQQEQVLDVETGNEYGNLKQEVSEEMEPHGKTSSKFENDMSKSARCGETREPEEITEEPSACSREDKQPTCDENGVSLTENSDHTEHQRICPGEESYGCDDCGKAFSQHSHLIEHQRIHTGDRPYKCEECGKAFRGRTVLIRHKIIHTGEKPYKCNECGKAFGRWSALNQHQRLHTGEKHYHCNDCGKAFSQKAGLFHHIKIHTRDKPYQCTQCNKSFSRRSILTQHQGVHTGAKPYECNECGKAFVYNSSLVSHQEIHHKEKCYQCKECGKSFSQSGLIQHQRIHTGEKPYKCDVCEKAFIQRTSLTEHQRIHTGERPYKCDKCGKAFTQRSVLTEHQRIHTGERPYKCDECGNAFRGITSLIQHQRIHTGEKPYQCDECGKAFRQRKKTSYKEILLKNHSEPQAGVNLLLSSLIPEWQSCFRRDL

SEQ ID NO: 98697 - protein, 604 aa, Homo sapiens; identical to SEQ ID NO: 98696
  Payload ID: 19704
  Gene Name: zinc finger and SCAN domain containing 12
  Uniprot ID: O43309
  ENSP ID: ENSP00000380039

SEQ ID NO: 98698 - protein, 348 aa, Homo sapiens
  Payload ID: 19705
  Gene Name: zinc finger and SCAN domain containing 16
  Uniprot ID: Q9H4T2
  ENSP ID: ENSP00000366527
MTTALEPEDQKGLLIIKAEDHYWGQDSSSQKCSPHRRELYRQHFRKLCYQDAPGPREALTQLWELCRQWLRPECHTKEQILDLLVLEQFLSILPKDLQAWVRAHHPETGEEAVTVLEDLERELDEPGKQVPGNSERRDILMDKLAPLGRPYESLTVQLHPKKTQLEQEAGKPQRNGDKTRTKNEELFQKEDMPKDKEFLGEINDRLNKDTPQHPKSKDIIENEGRSEWQQRERRRYKCDECGKSFSHSSDLSKHRRTHTGEKPYKCDECGKAFIQRSHLIGHHRVHTGVKPYKCKECGKDFSGRTGLIQHQRIHTGEKPYECDECGRPFRVSSALIRHQRIHTANKLY

SEQ ID NO: 98699 - protein, 510 aa, Homo sapiens
  Payload ID: 19706
  Gene Name: zinc finger and SCAN domain containing 18
  Uniprot ID: Q8TBC5
  ENSP ID: ENSP00000240727
MLPLEKAFASPRSSPAPPDLPTPGSAAGVQQEEPETIPERTPADLEFSRLRFREFVYQEAAGPHQTLARLHELCRQWLMPEARSKEQMLELLVLEQFLGILPDKVRPWVVAQYPESCKKAASLVEGLADVLEEPGMLLGSPAGSSSILSDGVYERHMDPLLLPGELASPSQALGAGEIPAPSETPWLSPDPLFLEQRRVREAKTEEDGPANTEQKLKSFPEDPQHLGEWGHLDPAEENLKSYRKLLLWGYQLSQPDAASRLDTEELRLVERDPQGSSLPEGGRRQESAGCACEEAAPAGVLPELPTEAPPGDALADPPSGTTEEEEEQPGKAPDPQDPQDAESDSATGSQRQSVIQQPAPDRGTAKLGTKRPHPEDGDGQSLEGVSSSGDSAGLEAGQGPGADEPGLSRGKPYACGECGEAFAWLSHLMEHHSSHGGRKRYACQGCWKTFHFSLALAEHQKTHEKEKSYALGGARGPQPSTREAQAGARAGGPPESVEGEAPPAPPEAQR

SEQ ID NO: 98700 - protein, 374 aa, Homo sapiens
  Payload ID: 19706
  Gene Name: zinc finger and SCAN domain containing 18
  Uniprot ID: Q8TBC5
  ENSP ID: ENSP00000392653
MLLGSPAGSSSILSDGVYERHMDPLLLPGELASPSQALGAGEIPAPSETPWLSPDPLFLEQRRVREAKTEEDGPANTEQKLKSFPEDPQHLGEWGHLDPAEENLKSYRKLLLWGYQLSQPDAASRLDTEELRLVERDPQGSSLPGGRRQESAGCACEEAAPAGVLPELPTEAPPGDALADPPSGTTEEEEEQPGKAPDPQDPQDAESDSATGSQRQSVIQQPAPDRGTAKLGTKRPHPEDGDGQSLEGVSSSGDSAGLEAGQGPGADEPGLSRGKPYACGECGEAFAWLSHLMEHHSSHGGRKRYACQGCWKTFHFSLALAEHQKTHEKEKSYALGGARGPQPSTREAQAGARAGGPPESVEGEAPPAPPEAQR

SEQ ID NO: 98701 - protein, 407 aa, Homo sapiens
  Payload ID: 19706
  Gene Name: zinc finger and SCAN domain containing 18
  ENSP ID: ENSP00000412253
DKVRPWVVAQYPESCKKAASLVEGLADVLEEPGMLLGSPAGSSSILSDGVYERHMDPLLLPGELASPSQALGAGEIPAPSETPWLSPDPLFLEQRRVREAKTEEDGPANTEQKLKSFPEDPQHLGEWGHLDPAEENLKSYRKLLLWGYQLSQPDAASRLDTEELRLVERDPQGSSLPGGRRQESAGCACEEAAPAGVLPELPTEAPPGDALADPPSGTTEEEEEQPGKAPDPQDPQDAESDSATGSQRQSVIQQPAPDRGTAKLGTKRPHPEDGDGQSLEGVSSSGDSAGLEAGQGPGADEPGLSRGKPYACGECGEAFAWLSHLMEHHSSHGGRKRYACQGCWKTFHFSLALAEHQKTHEKEKSYALGGARGPQPSTREAQAGARAGGPPESVEGEAPPAPPEAQR

SEQ ID NO: 98702 - protein, 510 aa, Homo sapiens; identical to SEQ ID NO: 98699
  Payload ID: 19706
  Gene Name: zinc finger and SCAN domain containing 18
  Uniprot ID: Q8TBC5
  ENSP ID: ENSP00000468934

SEQ ID NO: 98703 - protein, 11 aa, Homo sapiens
  Payload ID: 19706
  Gene Name: zinc finger and SCAN domain containing 18
  ENSP ID: ENSP00000469201
MLPLEKAFASP

SEQ ID NO: 98704 - protein, 566 aa, Homo sapiens
  Payload ID: 19706
  Gene Name: zinc finger and SCAN domain containing 18
  Uniprot ID: Q8TBC5
  ENSP ID: ENSP00000470123
MRRVGGRADEDATAAGSLWVLAPPEPTGHLVIPGTSPLEPPCPWLDSHIFQCRFGKMLPLEKAFASPRSSPAPPDLPTPGSAAGVQQEEPETIPERTPADLEFSRLRFREFVYQEAAGPHQTLARLHELCRQWLMPEARSKEQMLELLVLEQFLGILPDKVRPWVVAQYPESCKKAASLVEGLADVLEEPGMLLGSPAGSSSILSDGVYERHMDPLLLPGELASPSQALGAGEIPAPSETPWLSPDPLFLEQRRVREAKTEEDGPANTEQKLKSFPEDPQHLGEWGHLDPAEENLKSYRKLLLWGYQLSQPDAASRLDTEELRLVERDPQGSSLPEGGRRQESAGCACEEAAPAGVLPELPTEAPPGDALADPPSGTTEEEEEQPGKAPDPQDPQDAESDSATGSQRQSVIQQPAPDRGTAKLGTKRPHPEDGDGQSLEGVSSSGDSAGLEAGQGPGADEPGLSRGKPYACGECGEAFAWLSHLMEHHSSHGGRKRYACQGCWKTFHFSLALAEHQKTHEKEKSYALGGARGPQPSTREAQAGARAGGPPESVEGEAPPAPPEAQR

SEQ ID NO: 98705 - protein, 52 aa, Homo sapiens
  Payload ID: 19706
  Gene Name: zinc finger and SCAN domain containing 18
  ENSP ID: ENSP00000470329
  MOD_RES (1)..(1): Any amino acid
XEQRRVREAKTEEDGPANTEQGISFPSLTLPPGWTLRNSGWWKEIHKEAASQ

SEQ ID NO: 98706 - protein, 39 aa, Homo sapiens
  Payload ID: 19706
  Gene Name: zinc finger and SCAN domain containing 18
  ENSP ID: ENSP00000471570
MRRVGGRADEDATAAGTWETKVKWKHQLGMVLGRNYPIW

SEQ ID NO: 98707 - protein, 184 aa, Homo sapiens
  Payload ID: 19706
  Gene Name: zinc finger and SCAN domain containing 18
  ENSP ID: ENSP00000472129
MLPLEKAFASPRSSPAPPDLPTPGSAAGVQQEEPETIPERTPADLEFSRLRFREFVYQEAAGPHQTLARLHELCRQWLMPEARSKEQMLELLVLEQFLGILPDKVRPWVVAQYPESCKKAASLVEGLADVLEEPGMLLGSPAGSSSILSDGVYERHMDPLLLPGELASPSQALGAGEIPAPSET

SEQ ID NO: 98708 - protein, 185 aa, Homo sapiens
  Payload ID: 19706
  Gene Name: zinc finger and SCAN domain containing 18
  ENSP ID: ENSP00000473019
MLPLEKAFASPRSSPAPPDLPTPGSAAGVQQEEPETIPERTPADLEFSRLRFREFVYQEAAGPHQTLARLHELCRQWLMPEARSKEQMLELLVLEQFLGILPDKVRPWVVAQYPESCKKAASLVEGLADVLEEPGMLLGSPAGSSSILSDGVYERHMDPLLLPGELASPSQALGAGEIPAPSETR

SEQ ID NO: 98709 - protein, 113 aa, Homo sapiens
  Payload ID: 19706
  Gene Name: zinc finger and SCAN domain containing 18
  ENSP ID: ENSP00000473134
MRRVGGRADEDATAAGSEFRPLAASRVCFLRSRPPVAEPRPSEGLWVLAPPEPTGHLVIPGTSPLEPPCPWLDSHIFQCRFGKMLPLEKAFASPRSSPAPPDLPTPGSAAGVQ

SEQ ID NO: 98710 - protein, 613 aa, Homo sapiens
  Payload ID: 19707
  Gene Name: zinc finger and SCAN domain containing 2
  ENSP ID: ENSP00000325123
MMAADIPRVTTPLSSLVQVPQEEDRQEEEVTTMILEDDSWVQEAVLQEDGPESEPFPQSAGKGGPQEEVTRGPQGALGRLRELCRRWLRPEVHTKEQMLTMLPKEIQAWLQEHRPESSEEAAALVEDLTQTLQDNFEIQSENGENCNQDMFENESRKIFSEMPEGESAQHSDGESDFERDAGIQRLQGHSPGEDHGEVVSQDREVGQLIGLQGTYLGEKPYECPQCGKTFSRKSHLITHERTHTGEKYYKCDECGKSFSDGSNFSRHQTTHTGEKPYKCRDCGKSFSRSANLITHQRIHTGEKPFQCAECGKSFSRSPNLIAHQRTHTGEKPYSCPECGKSFGNRSSLNTHQGIHTGEKPYECKECGESFSYNSNLIRHQRIHTGEKPYKCTDCGQRFSQSSALITHRRTHTGEKPYQCSECGKSFSRSSNLATHRRTHMVEKPYKCGVCGKSFSQSSSLIAHQGMHTGEKPYECLTCGESFSWSSNLLKHQRIHTGEKPYKCSECGKCFSQRSQLVVHQRTHTGEKPYKCLMCGKSFSRGSILVMHQRAHLGDKPYRCPECGKGFSWNSVLIIHQRIHTGEKPYKCPECGKGFSNSSNFITHQRTHMKEKLY

SEQ ID NO: 98711 - protein, 150 aa, Homo sapiens
  Payload ID: 19707
  Gene Name: zinc finger and SCAN domain containing 2
  Uniprot ID: Q7Z7L9
  ENSP ID: ENSP00000333895
MMAADIPRVTTPLSSLVQVPQEEDRQEEEVTTMILEDDSWVQEAVLQEDGPESEPFPQSAGKGGPQEEVTRGPQGALGRLRELCRRWLRPEVHTKEQMLTMLPKEIQAWLQEHRPESSEEAAALVEDLTQTLQDSAVAVVASLPVEVTSL

SEQ ID NO: 98712 - protein, 464 aa, Homo sapiens
  Payload ID: 19707
  Gene Name: zinc finger and SCAN domain containing 2
  ENSP ID: ENSP00000351257
MFENESRKIFSEMPEGESAQHSDGESDFERDAGIQRLQGHSPGEDHGEVVSQDREVGQLIGLQGTYLGEKPYECPQCGKTFSRKSHLITHERTHTGEKYYKCDECGKSFSDGSNFSRHQTTHTGEKPYKCRDCGKSFSRSANLITHQRIHTGEKPFQCAECGKSFSRSPNLIAHQRTHTGEKPYSCPECGKSFGNRSSLNTHQGIHTGEKPYECKECGESFSYNSNLIRHQRIHTGEKPYKCTDCGQRFSQSSALITHRRTHTGEKPYQCSECGKSFSRSSNLATHRRTHMVEKPYKCGVCGKSFSQSSSLIAHQGMHTGEKPYECLTCGESFSWSSNLLKHQRIHTGEKPYKCSECGKCFSQRSQLVVHQRTHTGEKPYKCLMCGKSFSRGSILVMHQRAHLGDKPYRCPECGKGFSWNSVLIIHQRIHTGEKPYKCPECGKGFSNSSNFITHQRTHMKEKLY

SEQ ID NO: 98713 - protein, 146 aa, Homo sapiens
  Payload ID: 19707
  Gene Name: zinc finger and SCAN domain containing 2
  Uniprot ID: Q7Z7L9
  ENSP ID: ENSP00000368663
MMAADIPRVTTPLSSLVQVPQEEDRQEEEVTTMILEDDSWVQEAVLQEDGPESEPFPQSAGKGGPQEEVTRGPQGALGRLRELCRRWLRPEVHTKEQMLTMLPKEIQAWLQEHRPESSEEAAALVEDLTQTLQDSETASCVHGCPV

SEQ ID NO: 98714 - protein, 614 aa, Homo sapiens
  Payload ID: 19707
  Gene Name: zinc finger and SCAN domain containing 2
  Uniprot ID: Q7Z7L9
  ENSP ID: ENSP00000410198
MMAADIPRVTTPLSSLVQVPQEEDRQEEEVTTMILEDDSWVQEAVLQEDGPESEPFPQSAGKGGPQEEVTRGPQGALGRLRELCRRWLRPEVHTKEQMLTMLPKEIQAWLQEHRPESSEEAAALVEDLTQTLQDSDFEIQSENGENCNQDMFENESRKIFSEMPEGESAQHSDGESDFERDAGIQRLQGHSPGEDHGEVVSQDREVGQLIGLQGTYLGEKPYECPQCGKTFSRKSHLITHERTHTGEKYYKCDECGKSFSDGSNFSRHQTTHTGEKPYKCRDCGKSFSRSANLITHQRIHTGEKPFQCAECGKSFSRSPNLIAHQRTHTGEKPYSCPECGKSFGNRSSLNTHQGIHTGEKPYECKECGESFSYNSNLIRHQRIHTGEKPYKCTDCGQRFSQSSALITHRRTHTGEKPYQCSECGKSFSRSSNLATHRRTHMVEKPYKCGVCGKSFSQSSSLIAHQGMHTGEKPYECLTCGESFSWSSNLLKHQRIHTGEKPYKCSECGKCFSQRSQLVVHQRTHTGEKPYKCLMCGKSFSRGSILVMHQRAHLGDKPYRCPECGKGFSWNSVLIIHQRIHTGEKPYKCPECGKGFSNSSNFITHQRTHMKEKLY

SEQ ID NO: 98715 - protein, 27 aa, Homo sapiens
  Payload ID: 19707
  Gene Name: zinc finger and SCAN domain containing 2
  ENSP ID: ENSP00000438628
MMAADIPRVTTPLSSLVQVPQEEDRQE

SEQ ID NO: 98716 - protein, 238 aa, Homo sapiens
  Payload ID: 19707
  Gene Name: zinc finger and SCAN domain containing 2
  ENSP ID: ENSP00000439132
MMAADIPRVTTPLSSLVQVPQEEDRQEEEVTTMILEDDSWVQEAVLQEDGPESEPFPQSAGKGGPQEEVTRGPQGALGRLRELCRRWLRPEVHTKEQMLTMLPKEIQAWLQEHRPESSEEAAALVEDLTQTLQDSDFEIQSENGENCNQDMFENESRKIFSEMPEGESAQHSDGESDFERDAGIQRLQGHSPGQDGGASPVLSHPREGKDPFYFQKVSGAQKLEEVQPGASVPVSFPL

SEQ ID NO: 98717 - protein, 32 aa, Homo sapiens
  Payload ID: 19707
  Gene Name: zinc finger and SCAN domain containing 2
  ENSP ID: ENSP00000439584
MMAADIPRVTTPLSSLVQVPQEEDRQEEEVTT

SEQ ID NO: 98718 - protein, 200 aa, Homo sapiens
  Payload ID: 19707
  Gene Name: zinc finger and SCAN domain containing 2
  ENSP ID: ENSP00000440004
MMAADIPRVTTPLSSLVQVPQEEDRQEEEVTTMILEDDSWVQEAVLQEDGPESEPFPQSAGKGGPQEEVTRGPQGALGRLRELCRRWLRPEVHTKEQMLTMLPKEIQAWLQEHRPESSEEAAALVEDLTQTLQDSDFEIQSENGENCNQDMFENESRKIFSEMPEGESAQHSDGESDFERDAGIQRLQGHSPESVRSTET

SEQ ID NO: 98719 - protein, 210 aa, Homo sapiens
  Payload ID: 19707
  Gene Name: zinc finger and SCAN domain containing 2
  ENSP ID: ENSP00000441342
MMAADIPRVTTPLSSLVQVPQEEDRQEEEVTTMILEDDSWVQEAVLQEDGPESEPFPQSAGKGGPQEEVTRGPQGALGRLRELCRRWLRPEVHTKEQMLTMLPKEIQAWLQEHRPESSEEAAALVEDLTQTLQDSDFEIQSENGENCNQDMFENESRKIFSEMPEGESAQHSDGESDFERDAGIQRLQGHSPVETGFHRVSQDGFDLLSS

SEQ ID NO: 98720 - protein, 614 aa, Homo sapiens; identical to SEQ ID NO: 98714
  Payload ID: 19707
  Gene Name: zinc finger and SCAN domain containing 2
  Uniprot ID: Q7Z7L9
  ENSP ID: ENSP00000441855

SEQ ID NO: 98721 - protein, 53 aa, Homo sapiens
  Payload ID: 19707
  Gene Name: zinc finger and SCAN domain containing 2
  ENSP ID: ENSP00000442693
MMAADIPRVTTPLSSLVQVPQEEDRQEEEVTTMILEDDSWVQEAVLQEDGPES

SEQ ID NO: 98722 - protein, 614 aa, Homo sapiens; identical to SEQ ID NO: 98714
  Payload ID: 19707
  Gene Name: zinc finger and SCAN domain containing 2
  Uniprot ID: Q7Z7L9
  ENSP ID: ENSP00000445451

SEQ ID NO: 98723 - protein, 107 aa, Homo sapiens
  Payload ID: 19707
  Gene Name: zinc finger and SCAN domain containing 2
  ENSP ID: ENSP00000446041
MMAADIPRVTTPLSSLVQVPQEEDRQEEEVTTMILEDDSWVQEAVLQEDGPESEPFPQSAGKGGPQEEVTRGPQGALGRLRELCRRWLRPEILRYRVKMGRTVIKTC

SEQ ID NO: 98724 - protein, 1043 aa, Homo sapiens
  Payload ID: 19708
  Gene Name: zinc finger and SCAN domain containing 20
  Uniprot ID: P17040
  ENSP ID: ENSP00000355053
MAMALELQAQASPQPEPEELLIVKLEEDSWGSESKLWEKDRGSVSGPEASRQRFRQFQYRDAAGPHEAFSQLWALCCRWLRPEIRLKEQILELLVLEQFLTILPREVQTWVQARHPESGEEAVALVEDWHRETRTAGQSGLELHTEETRPLKTGEEAQSFQLQPVDPWPEGQSQKKGVKNTCPDLPNHLNAEVAPQPLKESAVLTPRVPTLPKMGSVGDWEVTAESQEALGPGKHAEKELCKDPPGDDCGNSVCLGVPVSKPSNTSEKEQGPEFWGLSLINSGKRSTADYSLDNEPAQALTWRDSRAWEEQYQWDVEDMKVSGVHWGYEETKTFLAILSESPFSEKLRTCHQNRQVYRAIAEQLRARGFLRTLEQCRYRVKNLLRNYRKAKSSHPPGTCPFYEELEALVRARTAIRATDGPGEAVALPRLGYSDAEMDEQEEGGWDPEEMAEDCNGAGLVNVESTQGPRIAGAPALFQSRIAGVHWGYEETKAFLAILSESPFSEKLRTCHQNSQVYRAIAERLCALGFLRTLEQCRYRFKNLLRSYRKAKSSHPPGTCPFYEELDSLMRARAAVRAMGTVREAAGLPRCGQSSAETDAQEAWGEVANEDAVKPSTLCPKAPDMGFEMRHEDEDQISEQDIFEGLPGALSKCPTEAVCQPLDWGEDSENENEDEGQWGNPSQEQWQESSSEEDLEKLIDHQGLYLAEKPYKCDTCMKSFSRSSHFIAHQRIHTGEKPYKCLECGKNFSDRSNLNTHQRIHTGEKPYKCLECGKSFSDHSNLITHQRIHTGEKPYKCGECWKSFNQSSNLLKHQRIHLGGNPDQCSEPGGNFAQSPSFSAHWRNSTEETAPEQPQSISKDLNSPGPHSTNSGEKLYECSECGRSFSKSSALISHQRIHTGEKPYECAECGKSFSKSSTLANHQRTHTGEKPYKCVDCGKCFSERSKLITHQRVHTGEKPYKCLECGKFFRDRSNLITHQRIHTGEKPYKCRECGKCFNQSSSLIIHQRIHTGEKPYKCTECGKDFNNSSHFSAHRRTHAGGKAS

SEQ ID NO: 98725 - protein, 433 aa, Homo sapiens
  Payload ID: 19708
  Gene Name: zinc finger and SCAN domain containing 20
  Uniprot ID: P17040
  ENSP ID: ENSP00000362512
MAMALELQAQASPQPEPEELLIVKLEEDSWGSESKLWEKDRGSVSGPEASRQRFRQFQYRDAAGPHEAFSQLWALCCRWLRPEIRLKEQILELLVLEQFLTILPREVQTWVQARHPESGEEAVALVEDWHRETRTAGQSGLELHTEETRPLKTGEEAQSFQLQPVDPWPEGQSQKKGVKNTCPDLPNHLNAEVAPQPLKESGVPVSKPSNTSEKEQGPEFWGLSLINSGKRSTADYSLDNEPAQALTWRDSRAWEEQYQWDVEDMKVSGVHWGYEETKTFLAILSESPFSEKLRTCHQNRQVYRAIAEQLRARGFLRTLEQCRYRVKNLLRNYRKAKSSHPPGTCPFYEELEALVRARTAIRATDGPGEAVALPRLGYSDAEMDEQEEGGWDPEEMAEDCNGAGLVNVESTQGPRIAGAPALFQSRIGKNMGV

SEQ ID NO: 98726 - protein, 473 aa, Homo sapiens
  Payload ID: 19709
  Gene Name: zinc finger and SCAN domain containing 21
  Uniprot ID: Q9Y5A6
  ENSP ID: ENSP00000292450
MMTKVLGMAPVLGPRPPQEQVGPLMVKVEEKEEKGKYLPSLEMFRQRFRQFGYHDTPGPREALSQLRVLCCEWLRPEIHTKEQILELLVLEQFLTILPQELQAWVQEHCPESAEEAVTLLEDLERELDEPGHQVSTPPNEQKPVWEKISSSGTAKESPSSMQPQPLETSHKYESWGPLYIQESGEEQEFAQDPRKVRDCRLSTQHEESADEQKGSEAEGLKGDIISVIIANKPEASLERQCVNLENEKGTKPPLQEAGSKKGRESVPTKPTPGERRYICAECGKAFSNSSNLTKHRRTHTGEKPYVCTKCGKAFSHSSNLTLHYRTHLVDRPYDCKCGKAFGQSSDLLKHQRMHTEEAPYQCKDCGKAFSGKGSLIRHYRIHTGEKPYQCNECGKSFSQHAGLSSHQRLHTGEKPYKCKECGKAFNHSSNFNKHHRIHTGEKPYWCHHCGKTFCSKSNLSKHQRVHTGEGEAP

SEQ ID NO: 98727 - protein, 450 aa, Homo sapiens
  Payload ID: 19709
  Gene Name: zinc finger and SCAN domain containing 21
  ENSP ID: ENSP00000390960
MMTKVLGMAPVLGPRPPQEQVGPLMVKVEEKEEKGKYLPSLEMFRQRFRQFGYHDTPGPREALSQLRVLCCEWLRPEIHTKEQILELLVLEQFLTILPQELQAWVQEHCPESAEEAVTLLEDLERELDEPGHQVSTPPNEQKPVWEKISSSGTAKESPSSMQPQPLETSHKYESWGPLYIQESGEEQEFAQDPRKVRDCRLSTQHEESADEQKGSEAEGLKGDIISVIIANKPEASLERQCVNLENEKGTKPPLQEAGSKKGEHTLGRNLTCAPSVGKLSATAQTSPSTTEHTWWTGPMTVSVEKLLGRAQTFLNIRECTQKRRHISAKIVARLSAGKAASFVTIGSTLGRSLISVTNVGRASVSMRASAPTRDSTPERSHISVRSVGKPSTTAPTSINTTESTPGKSPTGVITVERPSVASPIFPNISESTLEREKHRNFQALLLLSLF

SEQ ID NO: 98728 - protein, 181 aa, Homo sapiens
  Payload ID: 19709
  Gene Name: zinc finger and SCAN domain containing 21
  ENSP ID: ENSP00000404207
MMTKVLGMAPVLGPRPPQEQVGPLMVKVEEKEEKGKYLPSLEMFRQRFRQFGYHDTPGPREALSQLRVLCCEWLRPEIHTKEQILELLVLEQFLTILPQELQAWVQEHCPESAEEAVTLLEDLERELDEPGHQVSTPPNEQKPVWEKISSSGTAKESPSSMQPQPLETSHKYESWGPLYIQ

SEQ ID NO: 98729 - protein, 436 aa, Homo sapiens
  Payload ID: 19709
  Gene Name: zinc finger and SCAN domain containing 21
  ENSP ID: ENSP00000441212
MMTKVLGMAPVLGPRPPQEQVGPLMVKVEEKEEKGKYLPSLEMFRQRFRQFGYHDTPGPREALSQLRVLCCEWLRPEIHTKEQILELLVLDEPGHQVSTPPNEQKPVWEKISSSGTAKESPSSMQPQPLETSHKYESWGPLYIQESGEEQEFAQDPRKVRDCRLSTQHEESADEQKGSEAEGLKGDIISVIIANKPEASLERQCVNLENEKGTKPPLQEAGSKKGRESVPTKPTPGERRYICAECGKAFSNSSNLTKHRRTHTGEKPYVCTKCGKAFSHSSNLTLHYRTHLVDRPYDCKCGKAFGQSSDLLKHQRMHTEEAPYQCKDCGKAFSGKGSLIRHYRIHTGEKPYQCNECGKSFSQHAGLSSHQRLHTGEKPYKCKECGKAFNHSSNFNKHHRIHTGEKPYWCHHCGKTFCSKSNLSKHQRVHTGEGEAP

SEQ ID NO: 98730 - protein, 491 aa, Homo sapiens
  Payload ID: 19710
  Gene Name: zinc finger and SCAN domain containing 22
  Uniprot ID: P10073
  ENSP ID: ENSP00000332433
MAIPKHSLSPVPWEEDSFLQVKVEEEEEASLSQGGESSHDHIAHSEAARLRFRHFRYEEASGPHEALAHLRALCCQWLQPEAHSKEQILELLVLEQFLGALPPEIQAWVGAQSPKSGEEAAVLVEDLTQVLDKRGWDPGAEPTEASCKQSDLGESEPSNVTETLMGGVSLGPAFVKACEPEGSSERSGLSGEIWTKSVTQQIHFKKTSGPYKDVPTDQRGRESGASRNSSSAWPNLTSQEKPPSEDKFDLVDAYGTEPPYTYSGKRSSKCRECRKMFQSASALEAHQKTHSRKTPYACSECGKAFSRSTHLAQHQVVHTGAKPHECKECGKAFSRVTHLTQHQRIHTGEKPYKCGECGKTFSRSTHLTQHQRVHTGERPYECDACGKAFSQSTHLTQHQRIHTGEKPYKCDACGRAFSDCSALIRHLRIHSGEKPYQCKVCPKAFAQSSSLIEHQRIHTGEKPYKCSDCGKAFSRSSALMVHLRIHITVLQ

SEQ ID NO: 98731 - protein, 389 aa, Homo sapiens
  Payload ID: 19711
  Gene Name: zinc finger and SCAN domain containing 23
  Uniprot ID: Q3MJ62
  ENSP ID: ENSP00000289788
MAITLTLQTAEMQEGLLAVKVKEEEEEHSCGPESGLSRNNPHTREIFRRRFRQFCYQESPGPREALQRLQELCHQWLRPEMHTKEQILELLVLEQFLTILPEELQAWVRQHRPVSGEEAVTVLEDLERELDDPGEQVLSHAHEQEEFVKEKATPGAAQESSNDQFQTLEEQLGYNLREVCPVQEIDGKAGTWNVELAPKREISQEVKSLIQVLGKQNGNITQIPEYGDTCDREGRLEKQRVSSSVERPYICSECGKSFTQNSILIEHQRTHTGEKPYECDECGRAFSQRSGLFQHQRLHTGEKRYQCSVCGKAFSQNAGLFHHLRIHTGEKPYQCNQCNKSFSRRSVLIKHQRIHTGERPYECEECGKNFIYHCNLIQHRKVHPVAESS

SEQ ID NO: 98732 - protein, 146 aa, Homo sapiens
  Payload ID: 19711
  Gene Name: zinc finger and SCAN domain containing 23
  ENSP ID: ENSP00000435430
MAITLTLQTAEMQEGLLAVKVKEEEEEHSCGPESGLSRNNPHTREIFRRRFRQFCYQESPGPREALQRLQELCHQWLRPEMHTKEQILELLVLEQFLTILPEELQAWVRQHRPVSGEEAVTVLEDLERELDDPGEQMARLGLGMWS

SEQ ID NO: 98733 - protein, 465 aa, Homo sapiens
  Payload ID: 19712
  Gene Name: zinc finger and SCAN domain containing 25
  ENSP ID: ENSP00000262941
MAEAPQQQLGIPVVKLEKELPWGRGREDPSPETFRLRFRQFRYQEAAGPQEALRELQELCRRWLRPELHTKEQILELLVLEQFLTILPREFYAWIREHGPESGKALAAMVEDLTERALEAKAVPCHRQGEQEETALCRGAWEPGIQLGPVEVKPEWGMPPGEGVQGPDPGTEEQLSQDPGDETRAFQEQGGGSKEKEAKPPQEDLKGALVALTSERFGEASLQGPGLGRVCEQEPGGPAGSAPGLPPPQHGAIPLPDEVKTHSSFWKPFQCPECGKGFSRSSNLVRHQRTHEEKSYGCVECGKGFTLREYLMKHQRTHLGKRPYVCSECWKTFSQRHHLEVHQRSHTGEKPYKCGDCWKSFSRRQHLQVHRRTHTGEKPYTCECGKSFSRNANLAVHRRAHTGEKPYGCQVCGKRFSKGERLVRHQRIHTGEKPYHCPACGRSFNQRSILNRHQKTQHRQEPLVQ

SEQ ID NO: 98734 - protein, 544 aa, Homo sapiens
  Payload ID: 19712
  Gene Name: zinc finger and SCAN domain containing 25
  Uniprot ID: Q6NSZ9
  ENSP ID: ENSP00000334800
MLKEHPEMAEAPQQQLGIPVVKLEKELPWGRGREDPSPETFRLRFRQFRYQEAAGPQEALRELQELCRRWLRPELHTKEQILELLVLEQFLTILPREFYAWIREHGPESGKALAAMVEDLTERALEAKAVPCHRQGEQEETALCRGAWEPGIQLGPVEVKPEWGMPPGEGVQGPDPGTEEQLSQDPGDETRAFQEQALPVLQAGPGLPAVNPRDQEMAAGFFTAGSQGLGPFKDMALAFPEEEWRHVTPAQIDCFGEYVEPQDCRVSPGGGSKEKEAKPPQEDLKGALVALTSERFGEASLQGPGLGRVCEQEPGGPAGSAPGLPPPQHGAIPLPDEVKTHSSFWKPFQCPECGKGFSRSSNLVRHQRTHEEKSYGCVECGKGFTLREYLMKHQRTHLGKRPYVCSECWKTFSQRHHLEVHQRSHTGEKPYKCGDCWKSFSRRQHLQVHRRTHTGEKPYTCECGKSFSRNANLAVHRRAHTGEKPYGCQVCGKRFSKGERLVRHQRIHTGEKPYHCPACGRSFNQRSILNRHQKTQHRQEPLVQ

SEQ ID NO: 98735 - protein, 162 aa, Homo sapiens
  Payload ID: 19712
  Gene Name: zinc finger and SCAN domain containing 25
  Uniprot ID: Q6NSZ9
  ENSP ID: ENSP00000377706
MLKEHPEMAEAPQQQLGIPVVKLEKELPWGRGREDPSPETFRLRFRQFRYQEAAGPQEALRELQELCRRWLRPELHTKEQILELLVLEQFLTILPREFYAWIREHGPESGKALAAMVEDLTERALEAKAVGSMPQAGRAGGNSTLQRRLGARHPAGASGGQA

SEQ ID NO: 98736 - protein, 544 aa, Homo sapiens; identical to SEQ ID NO: 98734
  Payload ID: 19712
  Gene Name: zinc finger and SCAN domain containing 25
  Uniprot ID: Q6NSZ9
  ENSP ID: ENSP00000377708

SEQ ID NO: 98737 - protein, 70 aa, Homo sapiens
  Payload ID: 19712
  Gene Name: zinc finger and SCAN domain containing 25
  ENSP ID: ENSP00000413144
MLKEHPEMAEAPQQQLGIPVVKLEKELPWGRGREDPSPETFRLRFRQFRYQEAAGPQEALRELQELCRRW

SEQ ID NO: 98738 - protein, 270 aa, Homo sapiens
  Payload ID: 19713
  Gene Name: zinc finger and SCAN domain containing 26
  ENSP ID: ENSP00000478769
MEAHNEGSNLERHQAKPKEKIEYKCSEREQRFIQHLDLIEHASTHTGKKLCESDVCQSSSLTGHKKVLSREKGHQCHECGKAFQRSSHLVRHQKIHLGEKPYQCNECGKVFSQNAGLLEHLRIHTGEKPYLCIHCGKNFRRSSHLNRHQRIHSQEEPCECKECGKTFSQALLLTHHQRIHSHSKSHQCNECGKAFSLTSDLIRHHRIHTGEKPFKCNICQKAFRLNSHLAQHVRIHNEEKPYQCSECGEAFRQRSGLFQHQRYHHKDKLA

SEQ ID NO: 98739 - protein, 344 aa, Homo sapiens
  Payload ID: 19713
  Gene Name: zinc finger and SCAN domain containing 26
  ENSP ID: ENSP00000479314
MATALDPDQPKKQKILVEEMAPLKGVQEQQVRHECEVTKPEKEKGEETRIENGKLIVVTDSCGRVESSGKISEPMEAHNEGSNLERHQAKPKEKIEYKCSEREQRFIQHLDLIEHASTHTGKKLCESDVCQSSSLTGHKKVLSREKGHQCHECGKAFQRSSHLVRHQKIHLGEKPYQCNECGKVFSQNAGLLEHLRIHTGEKPYLCIHCGKNFRRSSHLNRHQRIHSQEEPCECKECGKTFSQALLLTHHQRIHSHSKSHQCNECGKAFSLTSDLIRHHRIHTGEKPFKCNICQKAFRLNSHLAQHVRIHNEEKPYQCSECGEAFRQRSGLFQHQRYHHKDKLA

SEQ ID NO: 98740 - protein, 150 aa, Homo sapiens
  Payload ID: 19713
  Gene Name: zinc finger and SCAN domain containing 26
  ENSP ID: ENSP00000481024
MATALVSAHSLAPLNLKKEGLRVVREDHYSTWEQGFKLQGNSKGLGQEPLCKQFRQLRYEETTGPREALSRLRELCQQWLQPETHTKEQILELLVLEQFLIILPKELQARVQEHHPESREDVVVVLEDLQLDLGETGQQDPDQPKKQKIL

SEQ ID NO: 98741 - protein, 479 aa, Homo sapiens
  Payload ID: 19713
  Gene Name: zinc finger and SCAN domain containing 26
  ENSP ID: ENSP00000481707
MATALVSAHSLAPLNLKKEGLRVVREDHYSTWEQGFKLQGNSKGLGQEPLCKQFRQLRYEETTGPREALSRLRELCQQWLQPETHTKEQILELLVLEQFLIILPKELQARVQEHHPESREDVVVVLEDLQLDLGETGQQVDPDQPKKQKILVEEMAPLKGVQEQQVRHECEVTKPEKEKGEETRIENGKLIVVTDSCGRVESSGKISEPMEAHNEGSNLERHQAKPKEKIEYKCSEREQRFIQHLDLIEHASTHTGKKLCESDVCQSSSLTGHKKVLSREKGHQCHECGKAFQRSSHLVRHQKIHLGEKPYQCNECGKVFSQNAGLLEHLRIHTGEKPYLCIHCGKNFRRSSHLNRHQRIHSQEEPCECKECGKTFSQALLLTHHQRIHSHSKSHQCNECGKAFSLTSDLIRHHRIHTGEKPFKCNICQKAFRLNSHLAQHVRIHNEEKPYQCSECGEAFRQRSGLFQHQRYHHKDKLA

SEQ ID NO: 98742 - protein, 479 aa, Homo sapiens; identical to SEQ ID NO: 98741
  Payload ID: 19713
  Gene Name: zinc finger and SCAN domain containing 26
  ENSP ID: ENSP00000484018

SEQ ID NO: 98743 - protein, 344 aa, Homo sapiens; identical to SEQ ID NO: 98739
  Payload ID: 19713
  Gene Name: zinc finger and SCAN domain containing 26
  ENSP ID: ENSP00000484931

SEQ ID NO: 98744 - protein, 478 aa, Homo sapiens
  Payload ID: 19713
  Gene Name: zinc finger and SCAN domain containing 26
  Uniprot ID: Q16670
  ENSP ID: ENSP00000485228
MATALVSAHSLAPLNLKKEGLRVVREDHYSTWEQGFKLQGNSKGLGQEPLCKQFRQLRYEETTGPREALSRLRELCQQWLQPETHTKEQILELLVLEQFLIILPKELQARVQEHHPESREDVVVVLEDLQLDLGETGQQDPDQPKKQKILVEEMAPLKGVQEQQVRHECEVTKPEKEKGEETRIENGKLIVVTDSCGRVESSGKISEPMEAHNEGSNLERHQAKPKEKIEYKCSEREQRFIQHLDLIEHASTHTGKKLCESDVCQSSSLTGHKKVLSREKGHQCHECGKAFQRSSHLVRHQKIHLGEKPYQCNECGKVFSQNAGLLEHLRIHTGEKPYLCIHCGKNFRRSSHLNRHQRIHSQEEPCECKECGKTFSQALLLTHHQRIHSHSKSHQCNECGKAFSLTSDLIRHHRIHTGEKPFKCNICQKAFRLNSHLAQHVRIHNEEKPYQCSECGEAFRQRSGLFQHQRYHHKDKLA

SEQ ID NO: 98745 - protein, 316 aa, Homo sapiens
  Payload ID: 19714
  Gene Name: zinc finger and SCAN domain containing 29
  ENSP ID: ENSP00000380170
MSRKWRGGSDSRGRFRKRAWKTIFGHSLCEGAGSALGEDDTPEIITRVIKCSAGVSGTPAQGCTQEREGKKPRPGTTGADEPKGEAQTFSKERLEQGEPWIPDLLGSKEKELPSGSHIGDRRVHADLLPSKKDRRSWVEQDHWSFEDEKVAGVHWGYEETRTLLAILSQTEFYEALRNCHRNSQVYGAVAERLREYGFLRTLEQCRTKFKGLQKSYRKVKSGHPPETCPFFEEMEALMSAQVIALPSNGLEAAASHSGLVGSDAETEEPGQRGWQHEEGAEEAVAQESDSDDMDLEATPQDPNSAAPVVFRSPGGA

SEQ ID NO: 98746 - protein, 852 aa, Homo sapiens
  Payload ID: 19714
  Gene Name: zinc finger and SCAN domain containing 29
  Uniprot ID: Q8IWY8
  ENSP ID: ENSP00000380174
MMAKSALRENGTNSETFRQRFRRFHYQEVAGPREAFSQLWELCCRWLRPEVRTKEQIVELLVLEQFLTVLPGEIQNWVQEQCPENGEEAVTLVEDLEREPGRPRSSVTVSVKGQEVRLEKMTPPKSSQELLSVRQESVEPQPRGVPKKERARSPDLGPQEQMNPKEKLKPFQRSGLPFPKSGVVSRLEQGEPWIPDLLGSKEKELPSGSHIGDRRVHADLLPSKKDRRSWVEQDHWSFEDEKVAGVHWGYEETRTLLAILSQTEFYEALRNCHRNSQVYGAVAERLREYGFLRTLEQCRTKFKGLQKSYRKVKSGHPPETCPFFEEMEALMSAQVIALPSNGLEAAASHSGLVGSDAETEEPGQRGWQHEEGAEEAVAQESDSDDMDLEATPQDPNSAAPVVFRSPGGVHWGYEETKTYLAILSETQFYEALRNCHRNSQLYGAVAERLWEYGFLRTPEQCRTKFKSLQTSYRKVKNGQAPETCPFFEEMDALVSVRVAAPPNDGQEETASCPVQGTSEAEAQKQAEEADEATEEDSDDDEEDTEIPPGAVITRAPVLFQSPRGFEAGFENEDNSKRDISEEVQLHRTLLARSERKIPRYLHQGKGNESDCRSGRQWAKTSGEKRGKLTLPEKSLSEVLSQQRPCLGERPYKYLKYSKSFGPNSLLMHQVSHQVENPYKCADCGKSFSRSARLIRHRRIHTGEKPYKCLDCGKSFRDSSNFITHRRIHTGEKPYQCGECGKCFNQSSSLIIHQRTHTGEKPYQCEECGKSFNNSSHFSAHRRIHTGERPHVCPDCGKSFSKSSDLRAHHRTHTGEKPYGCHDCGKCFSKSSALNKHGEIHAREKLLTQSAPK

SEQ ID NO: 98747 - protein, 330 aa, Homo sapiens
  Payload ID: 19714
  Gene Name: zinc finger and SCAN domain containing 29
  ENSP ID: ENSP00000454548
EQCPENGEEAVTLVEDLEREPGRPRSSVTVSVKGQEVRLEKMTPPKSSQELLSVRQESVEPQPRGVPKKERARSPDLGPQEQMNPKEKLKPFQRSGLPFPKSGVVSRLEQGEPWIPDLLGSKEKELPSGSHIGDRRVHADLLPSKKDRRSWVEQDHWSFEDEKVAGVHWGYEETRTLLAILSQTEFYEALRNCHRNSQVYGAVAERLREYGFLRTLEQCRTKFKGLQKSYRKVKSGHPPETCPFFEEMEALMSAQVIALPSNGLEAAASHSGLVGSDAETEEPGQRGWQHEEGAEEAVAQESDSDDMDLEATPQDPNSAAPVVFRSPGGA

SEQ ID NO: 98748 - protein, 556 aa, Homo sapiens
  Payload ID: 19714
  Gene Name: zinc finger and SCAN domain containing 29
  ENSP ID: ENSP00000456089
MAKSALRENGTNSETFRQRFRRFHYQEVAGPREAFSQLWELCCRWLRPEVRTKEQIVELLVLEQFLTVLPGEIQNWVQEQCPENGEEAVTLVEDLEREPGRPRSSVTVSVKGQEVRLEKMTPPKSSQELLSVRQESVEPQPRGVPKKERARSPDLGPQEQMNPKEKLKPFQRSGLPFPKSGVVSRLEQGEPWIPDLLGSKEKELPSGSHIGDRRVHADLLPSKKDRRSWVEQDHWSFEDEKVAGVHWGYEETRTLLAILSQTEFYEALRNCHRNSQVYGAVAERLREYGFLRTLEQCRTKFKGLQKSYRKVKSGHPPETCPFFEEMEALMSAQVIALPSNGLEAAASHSGLVGSDAETEEPGQRGWQHEEGAEEAVAQESDSDDMDLEATPQDPNSAAPVVFRSPGGVHWGYEETKTYLAILSETQFYEALRNCHRNSQLYGAVAERLWEYGFLRTPEQCRTKFKSLQTSYRKVKNGQAPETCPFFEEMDALVLKLDLRMKIIQNGIFLRKYNCIGHYLQDLKGKFPGIFIRVKAMRVTVDQEDSGQRPQGRKEEN

SEQ ID NO: 98749 - protein, 462 aa, Homo sapiens
  Payload ID: 19714
  Gene Name: zinc finger and SCAN domain containing 29
  ENSP ID: ENSP00000456883
MAKSALRENGTNSETFRQRFRRFHYQEVAGPREAFSQLWELCCRWLRPEVRTKEQIVELLVLEQFLTVLPGEIQNWVQEQCPENGEEAVTLVEDLEREPGRPRSSVTVSVKGQEVRLEKMTPPKSSQELLSVRQESVEPQPRGVPKKERARSPDLGPQEQMNPKEKLKPFQRSGFEAGFENEDNSKRDISEEVQLHRTLLARSERKIPRYLHQGKGNESDCRSGRQWAKTSGEKRGKLTLPEKSLSEVLSQQRPCLGERPYKYLKYSKSFGPNSLLMHQVSHQVENPYKCADCGKSFSRSARLIRHRRIHTGEKPYKCLDCGKSFRDSSNFITHRRIHTGEKPYQCGECGKCFNQSSSLIIHQRTHTGEKPYQCEECGKSFNNSSHFSAHRRIHTGERPHVCPDCGKSFSKSSDLRAHHRTHTGEKPYGCHDCGKCFSKSSALNKHGEIHAREKLLTQSAPK

SEQ ID NO: 98750 - protein, 199 aa, Homo sapiens
  Payload ID: 19714
  Gene Name: zinc finger and SCAN domain containing 29
  ENSP ID: ENSP00000457835
MMAKSALRENGTNSETFRQRFRRFHYQEVAGPREAFSQLWELCCRWLRPEVRTKEQIVELLVLEQFLTVLPGEIQNWVQEQCPENGEEAVTLVEDLEREPGRPRSSVTVSVKGQEVRLEKMTPPKSSQELLSVRQESVEPQPRGVPKKERARSPDLGPQEQMNPKEKLKPFQRSGWSKESHGSQICWALRRKNFQVAAT

SEQ ID NO: 98751 - protein, 21 aa, Homo sapiens
  Payload ID: 19714
  Gene Name: zinc finger and SCAN domain containing 29
  ENSP ID: ENSP00000458119
MMAKSALRENGTNSETFRQRF

SEQ ID NO: 98752 - protein, 494 aa, Homo sapiens
  Payload ID: 19715
  Gene Name: zinc finger and SCAN domain containing 30
  Uniprot ID: Q86W11
  ENSP ID: ENSP00000329738
MSGEATVLAYHAPEEQEGLLVVKVEEENYVLDQDFGLQENPWSQEVFRQKFRQFSYSDSTGPREALSRLRELCCQWLRPEVHSKEQILELLMLEQFLAILPEELQAWLREHRPENGEEAVTMLEELEKELEEPRQQDTTHGQEMFWQEMTSTGALKSLSLNSPVQPLENQCKTETQESQAFQERDGRMVAGKVLMAKQEIVECVASAAMISPGKLPGETHSQRIAEEALGGLDNSKKQKGNAAGNKISQLPSQDRHFSLATFNRRIPTEHSVLESHESEGSFSMNSNDITQQSVDTREKLYECFDCGKAFCQSSKLIRHQRIHTGERPYACKECGKAFSLSSDLVRHQRIHSGEKPYECCECGKAFRGSSELIRHRRIHTGEKPYECGECGKAFSRSSALIQHKKIHTGDKSYECIACGKAFGRSSILIEHQRIHTGEKPYECNECGKSFNQSSALTQHQRIHTGEKPYECSECRKTFRHRSGLMQHQRTHTRV

SEQ ID NO: 98753 - protein, 494 aa, Homo sapiens; identical to SEQ ID NO: 98752
  Payload ID: 19715
  Gene Name: zinc finger and SCAN domain containing 30
  Uniprot ID: Q86W11
  ENSP ID: ENSP00000392371

SEQ ID NO: 98754 - protein, 221 aa, Homo sapiens
  Payload ID: 19715
  Gene Name: zinc finger and SCAN domain containing 30
  ENSP ID: ENSP00000465046
MSGEATVLAYHAPEEQEGLLVVKVEEENYVLDQDFGLQENPWSQEVFRQKFRQFSYSDSTGPREALSRLRELCCQWLRPEVHSKEQILELLMLEQFLAILPEELQAWLREHRPENGEEAVTMLEELEKELEEPRQQDTTHGQEMFWQEMTSTGALKSLSLNSPVQPLENQCKTETQESQAFQERDGVSLYHPGWSAVVQPQLTAAALNPWVKVILLPQPPE

SEQ ID NO: 98755 - protein, 47 aa, Homo sapiens
  Payload ID: 19715
  Gene Name: zinc finger and SCAN domain containing 30
  ENSP ID: ENSP00000467308
MSGEATVLAYHAPEEQEGLLVVKVEEENYVLDQDFGLQENPWSQEVF

SEQ ID NO: 98756 - protein, 69 aa, Homo sapiens
  Payload ID: 19715
  Gene Name: zinc finger and SCAN domain containing 30
  ENSP ID: ENSP00000468180
MSGEATVLAYHAPEEQEGLLVVKVEEENYVLDQDFGLQENPWSQEVFRQKFRQFSYSDSTGPREALSRL

SEQ ID NO: 98757 - protein, 145 aa, Homo sapiens
  Payload ID: 19715
  Gene Name: zinc finger and SCAN domain containing 30
  ENSP ID: ENSP00000470443
MSGEATVLAYHAPEEQEGLLVVKVEEENYVLDQDFGLQENPWSQEVFRQKFRQFSYSDSTGPREALSRLRELCCQWLRPEVHSKEQILELLMLEQFLAILPEELQAWLREHRPENGEEAVTMLEELEKELEEPRQQEFSACVSSE

SEQ ID NO: 98758 - protein, 91 aa, Homo sapiens
  Payload ID: 19715
  Gene Name: zinc finger and SCAN domain containing 30
  ENSP ID: ENSP00000470677
ELQAWLREHRPENGEEAVTMLEELEKELEEPRQQDTTHGQEMFWQEMTSTGALKSLSLNSPVQPLENQCKTETQESQAFQERGEKPQSMWG

SEQ ID NO: 98759 - protein, 51 aa, Homo sapiens
  Payload ID: 19715
  Gene Name: zinc finger and SCAN domain containing 30
  ENSP ID: ENSP00000472179
MSGEATVLAYHAPEEQEGLLVVKVEEENYVLDQDFGLQENPWSQEKCSGRK

SEQ ID NO: 98760 - protein, 307 aa, Homo sapiens
  Payload ID: 19715
  Gene Name: zinc finger and SCAN domain containing 30
  ENSP ID: ENSP00000480152
MVAGKVLMAKQEIVECVASAAMISPGKLPGETHSQRIAEEALGGLDNSKKQKGNAAGNKISQLPSQDRHFSLATFNRRIPTEHSVLESHESEGSFSMNSNDITQQSVDTREKLYECFDCGKAFCQSSKLIRHQRIHTGERPYACKECGKAFSLSSDLVRHQRIHSGEKPYECCECGKAFRGSSELIRHRRIHTGEKPYECGECGKAFSRSSALIQHKKIHTGDKSYECIACGKAFGRSSILIEHQRIHTGEKPYECNECGKSFNQSSALTQHQRIHTGEKPYECSECRKTFRHRSGLMQHQRTHTRV

SEQ ID NO: 98761 - protein, 406 aa, Homo sapiens
  Payload ID: 19716
  Gene Name: zinc finger and SCAN domain containing 31
  Uniprot ID: Q96LW9
  ENSP ID: ENSP00000345339
MASTEEQYDLKIVKVEEDPIWDQETHLRGNNFSGQEASRQLFRQFCYQETPGPREALSRLRELCHQWLRPEIHTKEQILELLVLEQFLTILPEELQAWVREHHPESGEEAVAVVEDLEQELSEPGNQAPDHEHGHSEVLLEDVEHLKVKQEPTDIQLQPMVTQLRYESFCLHQFQEQDGESIPENQELASKQEILKEMEHLGDSKLQRDVSLDSKYRETCKRDSKAEKQQAHSTGERRHRCNECGKSFTKSSVLIEHQRIHTGEKPYECEECGKAFSRRSSLNEHRRSHTGEKPYQCKECGKAFSASNGLTRHRRIHTGEKPYECKVCGKAFLLSSCLVQHQRIHTGEKRYQCRECGKAFIQNAGLFQHLRVHTGEKPYQCSQCSKLFSKRTLLKKHQKIHTGERP

SEQ ID NO: 98762 - protein, 406 aa, Homo sapiens; identical to SEQ ID NO: 98761
  Payload ID: 19716
  Gene Name: zinc finger and SCAN domain containing 31
  Uniprot ID: Q96LW9
  ENSP ID: ENSP00000380050

SEQ ID NO: 98763 - protein, 217 aa, Homo sapiens
  Payload ID: 19716
  Gene Name: zinc finger and SCAN domain containing 31
  ENSP ID: ENSP00000389479
MASTEEQYDLKIVKVEEDPIWDQETHLRGNNFSGQEASRQLFRQFCYQETPGPREALSRLRELCHQWLRPEIHTKEQILELLVLEQFLTILPEELQAWVREHHPESGEEAVAVVEDLEQELSEPGNQAPDHEHGHSEVLLEDVEHLKVKQEPTDIQLQPMVTQLRYESFCLHQFQEQDGESIPENQELASKQEILKEMEHLGDSKLQRDVSLDSKYR

SEQ ID NO: 98764 - protein, 406 aa, Homo sapiens; identical to SEQ ID NO: 98761
  Payload ID: 19716
  Gene Name: zinc finger and SCAN domain containing 31
  Uniprot ID: Q96LW9
  ENSP ID: ENSP00000390076

SEQ ID NO: 98765 - protein, 205 aa, Homo sapiens
  Payload ID: 19716
  Gene Name: zinc finger and SCAN domain containing 31
  ENSP ID: ENSP00000391235
MVTQLRYESFCLHQFQEQDGESIPENQELASKQEILKEMEHLGDSKLQRDVSLDSKYRETCKRDSKAEKQQAHSTGERRHRCNECGKSFTKSSVLIEHQRIHTGEKPYECEECGKAFSRRSSLNEHRRSHTGEKPYQCKECGKAFSASNGLTRHRRIHTGEKPYECKVCGKAFLLSSCLVQHQRIHTGEKRYQCRECGKAFIQNA

SEQ ID NO: 98766 - protein, 17 aa, Homo sapiens
  Payload ID: 19716
  Gene Name: zinc finger and SCAN domain containing 31
  ENSP ID: ENSP00000392552
MASTEEQYDLKIVKVEE

SEQ ID NO: 98767 - protein, 88 aa, Homo sapiens
  Payload ID: 19716
  Gene Name: zinc finger and SCAN domain containing 31
  ENSP ID: ENSP00000398680
MGWNLTLGMTVAPDHEHGHSEVLLEDVEHLKVKQEPTDIQLQPMVTQLRYESFCLHQFQEQDGESIPENQELASKQEILKEMEHLGDS

SEQ ID NO: 98768 - protein, 247 aa, Homo sapiens
  Payload ID: 19716
  Gene Name: zinc finger and SCAN domain containing 31
  Uniprot ID: Q96LW9
  ENSP ID: ENSP00000402937
MVTQLRYESFCLHQFQEQDGESIPENQELASKQEILKEMEHLGDSKLQRDVSLDSKYRETCKRDSKAEKQQAHSTGERRHRCNECGKSFTKSSVLIEHQRIHTGEKPYECEECGKAFSRRSSLNEHRRSHTGEKPYQCKECGKAFSASNGLTRHRRIHTGEKPYECKVCGKAFLLSSCLVQHQRIHTGEKRYQCRECGKAFIQNAGLFQHLRVHTGEKPYQCSQCSKLFSKRTLLKKHQKIHTGERP

SEQ ID NO: 98769 - protein, 106 aa, Homo sapiens
  Payload ID: 19716
  Gene Name: zinc finger and SCAN domain containing 31
  ENSP ID: ENSP00000406376
MASTEEQYDLKIVKVEEDPIWDQETHLRGNNFSGQEASRQLFRQFCYQETPGPREALSRLRELCHQWLRPEIHTKEQILELLVLEQFLTILPEELQAWVREHHPES

SEQ ID NO: 98770 - protein, 104 aa, Homo sapiens
  Payload ID: 19716
  Gene Name: zinc finger and SCAN domain containing 31
  ENSP ID: ENSP00000407529
MVTQLRYESFCLHQFQEQDGESIPENQELASKQEILKEMEHLGDSKLQRDVSLDSKYRETCKRDSKAEKQQAHSTGERRHRCNECGKSFTKSSVLIEHQRIHTG

SEQ ID NO: 98771 - protein, 103 aa, Homo sapiens
  Payload ID: 19716
  Gene Name: zinc finger and SCAN domain containing 31
  ENSP ID: ENSP00000411033
MASTEEQYDLKIVKVEEDPIWDQETHLRGNNFSGQEASRQLFRQFCYQETPGPREALSRLRELCHQWLRPEIHTKEQILELLVLEQFLTILPEELQAWVREHH

SEQ ID NO: 98772 - protein, 155 aa, Homo sapiens
  Payload ID: 19716
  Gene Name: zinc finger and SCAN domain containing 31
  ENSP ID: ENSP00000412519
MASTEEQYDLKIVKVEEDPIWDQETHLRGNNFSGQEASRQLFRQFCYQETPGPREALSRLRELCHQWLRPEIHTKEQILELLVLEQFLTILPEELQAWVREHHPESGEEAVAVVEDLEQELSEPGNQAPDHEHGHSEVLLEDVEHLKVKQEPTDI

SEQ ID NO: 98773 - protein, 406 aa, Homo sapiens; identical to SEQ ID NO: 98761
  Payload ID: 19716
  Gene Name: zinc finger and SCAN domain containing 31
  Uniprot ID: Q96LW9
  ENSP ID: ENSP00000413705

SEQ ID NO: 98774 - protein, 24 aa, Homo sapiens
  Payload ID: 19716
  Gene Name: zinc finger and SCAN domain containing 31
  ENSP ID: ENSP00000415040
MASTEEQYDLKIVKVEEDPIWDQE

SEQ ID NO: 98775 - protein, 147 aa, Homo sapiens
  Payload ID: 19716
  Gene Name: zinc finger and SCAN domain containing 31
  ENSP ID: ENSP00000416108
MASTEEQYDLKIVKVEEDPIWDQETHLRGNNFSGQEASRQLFRQFCYQETPGPREALSRLRELCHQWLRPEIHTKEQILELLVLEQFLTILPEELQAWVREHHPESGEEAVAVVEDLEQELSEPGNQAPDHEHGHSEVLLEDVEHLK

SEQ ID NO: 98776 - protein, 78 aa, Homo sapiens
  Payload ID: 19716
  Gene Name: zinc finger and SCAN domain containing 31
  ENSP ID: ENSP00000416225
MASTEEQYDLKIVKVEEDPIWDQETHLRGNNFSGQEASRQLFRQFCYQETPGPREALSRLRELCHQWLRPEIHTKEQI

SEQ ID NO: 98777 - protein, 247 aa, Homo sapiens; identical to SEQ ID NO: 98768
  Payload ID: 19716
  Gene Name: zinc finger and SCAN domain containing 31
  Uniprot ID: Q96LW9
  ENSP ID: ENSP00000480254

SEQ ID NO: 98778 - protein, 485 aa, Homo sapiens
  Payload ID: 19717
  Gene Name: zinc finger and SCAN domain containing 32
  Uniprot ID: Q9NX65
  ENSP ID: ENSP00000302502
MRDNRAVSLCQQEWMCPGPAQRALYRGATQRKDSHVSLATGVPWGYEETKTLLAILSSSQFYGKLQTCQQNSQIYRAMAEGLWEQGFLRTPEQCRTKFKSLQLSYRKVRRGRVPEPCIFYEEMNALSGSWASAPPMASDAVPGQEGSDIEAGELNHQNGEPTEVEDGTVDGADRDEKDFRNPGQEVRKLDLPVLFPNRLGFEFKNEIKKENLKWDDSEEVEINKALQRKSRGVYWHSELQKGLESEPTSRRQCRNSPGESEEKTPSQEKMSHQSFCARDKACTHILCGKNCSQSVHSPHKPALKLEKVSQCPECGKTFSRSSYLVRHQRIHTGEKPHKCSECGKGFSERSNLTAHLRTHTGERPYQCGQCGKSFNQSSSLIVHQRTHTGEKPYQCIVCGKRFNNSSQFSAHRRIHTGESPYKCAVCGKIFNNSSHFSAHRKTHTGEKPYRCSHCERGFTKNSALTRHQTVHMKAVLSSQEGRDAL

SEQ ID NO: 98779 - protein, 697 aa, Homo sapiens
  Payload ID: 19717
  Gene Name: zinc finger and SCAN domain containing 32
  Uniprot ID: Q9NX65
  ENSP ID: ENSP00000380057
MMAAVKSTEAHPSSNKDPTQGQKSALQGNSPDSEASRQRFRQFCYQEVTGPHEAFSKLWELCCQWLRPKTHSKEEILELLVLEQFLTILPEEIQTWVREQHPENGEEAVALVEDVQRAPGQQVLDSEKDLKVLMKEMAPLGATRESLRSQWKQEVQPEEPTFKGSQSSHQRPGEQSEAWLAPQAPRNLPQNTGLHDQETGAVVWTAGSQGPAMRDNRAVSLCQQEWMCPGPAQRALYRGATQRKDSHVSLATGVPWGYEETKTLLAILSSSQFYGKLQTCQQNSQIYRAMAEGLWEQGFLRTPEQCRTKFKSLQLSYRKVRRGRVPEPCIFYEEMNALSGSWASAPPMASDAVPGQEGSDIEAGELNHQNGEPTEVEDGTVDGADRDEKDFRNPGQEVRKLDLPVLFPNRLGFEFKNEIKKENLKWDDSEEVEINKALQRKSRGVYWHSELQKGLESEPTSRRQCRNSPGESEEKTPSQEKMSHQSFCARDKACTHILCGKNCSQSVHSPHKPALKLEKVSQCPECGKTFSRSSYLVRHQRIHTGEKPHKCSECGKGFSERSNLTAHLRTHTGERPYQCGQCGKSFNQSSSLIVHQRTHTGEKPYQCIVCGKRFNNSSQFSAHRRIHTGESPYKCAVCGKIFNNSSHFSAHRKTHTGEKPYRCSHCERGFTKNSALTRHQTVHMKAVLSSQEGRDAL

SEQ ID NO: 98780 - protein, 697 aa, Homo sapiens; identical to SEQ ID NO: 98779
  Payload ID: 19717
  Gene Name: zinc finger and SCAN domain containing 32
  Uniprot ID: Q9NX65
  ENSP ID: ENSP00000380061

SEQ ID NO: 98781 - protein, 408 aa, Homo sapiens
  Payload ID: 19717
  Gene Name: zinc finger and SCAN domain containing 32
  Uniprot ID: Q9NX65
  ENSP ID: ENSP00000391787
MAEGLWEQGFLRTPEQCRTKFKSLQLSYRKVRRGRVPEPCIFYEEMNALSGSWASAPPMASDAVPGQEGSDIEAGELNHQNGEPTEVEDGTVDGADRDEKDFRNPGQEVRKLDLPVLFPNRLGFEFKNEIKKENLKWDDSEEVEINKALQRKSRGVYWHSELQKGLESEPTSRRQCRNSPGESEEKTPSQEKMSHQSFCARDKACTHILCGKNCSQSVHSPHKPALKLEKVSQCPECGKTFSRSSYLVRHQRIHTGEKPHKCSECGKGFSERSNLTAHLRTHTGERPYQCGQCGKSFNQSSSLIVHQRTHTGEKPYQCIVCGKRFNNSSQFSAHRRIHTGESPYKCAVCGKIFNNSSHFSAHRKTHTGEKPYRCSHCERGFTKNSALTRHQTVHMKAVLSSQEGRDAL

SEQ ID NO: 98782 - protein, 215 aa, Homo sapiens
  Payload ID: 19717
  Gene Name: zinc finger and SCAN domain containing 32
  ENSP ID: ENSP00000407312
MRDNRAVSLCQQEWMCPGPAQRALYRGATQRKDSHVSLATGVPWGYEETKTLLAILSSSQFYGKLQTCQQNSQIYRAMAEGLWEQGFLRTPEQCRTKFKSLQLSYRKVRRGRVPEPCIFYEEMNALSGSWASAPPMASDAVPGQEGSDIEAGELNHQNGEPTEVEDGTVDGADRDEKDFRNPGQEVRKLDLPVLFPNRLGKTPLALMVKGWQSPL

SEQ ID NO: 98783 - protein, 186 aa, Homo sapiens
  Payload ID: 19717
  Gene Name: zinc finger and SCAN domain containing 32
  ENSP ID: ENSP00000458899
MRDNRAVSLCQQEWMCPGPAQRALYRGATQRKDSHVSLATGVPWGYEETKTLLAILSSSQFYGKLQTCQQNSQIYRAMAEGLWEQGFLRTPEQCRTKFKSLQLSYRKVRRGRVPEPCIFYEEMNALSGSWASAPPMASDAVPGQEGSDIEAGELNHQNGEPTEVEDGTVDGADRDEKDFRNPGQEV

SEQ ID NO: 98784 - protein, 186 aa, Homo sapiens
  Payload ID: 19717
  Gene Name: zinc finger and SCAN domain containing 32
  ENSP ID: ENSP00000459069
MMAAVKSTEAHPSSNKDPTQGQKSALQGNSPDSEASRQRFRQFCYQEVTGPHEAFSKLWELCCQWLRPKTHSKEEILELLVLEQFLTILPEEIQTWVREQHPENGEEAVALVEDVQRAPGQQQQVCPGAMKRPRRSWLFLVVLNFMENSRPVSRTARSTGPWRKDSGSRVFCGPQNSVAPSSKAYS

SEQ ID NO: 98785 - protein, 427 aa, Homo sapiens
  Payload ID: 19717
  Gene Name: zinc finger and SCAN domain containing 32
  ENSP ID: ENSP00000459772
MMAAVKSTEAHPSSNKDPTQGQKSALQGNSPDSEASRQRFRQFCYQEVTGPHEAFSKLWELCCQWLRPKTHSKEEILELLVLEQFLTILPEEIQTWVREQHPENGEEAVALVEDVQRAPGQQVLDSEKDLKVLMKEMAPLGATRESLRSQWKQEVQPEEPTFKGSQSSHQRPGEQSEAWLAPQAPRNLPQNTGLHDQETGAVVWTAGSQGPAMRDNRAVSLCQQEWMCPGPAQRALYRGATQRKDSHVSLATGVPWGYEETKTLLAILSSSQFYGKLQTCQQNSQIYRAMAEGLWEQGFLRTPEQCRTKFKSLQLSYRKVRRGRVPEPCIFYEEMNALSGSWASAPPMASDAVPGQEGSDIEAGELNHQNGEPTEVEDGTVDGADRDEKDFRNPGQEVRKLDLPVLFPNRLGKTPLALMVKGWQSPL

SEQ ID NO: 98786 - protein, 138 aa, Homo sapiens
  Payload ID: 19717
  Gene Name: zinc finger and SCAN domain containing 32
  ENSP ID: ENSP00000459960
MAEGLWEQGFLRTPEQCRTKFKSLQLSYRKVRRGRVPEPCIFYEEMNALSGSWASAPPMASDAVPGQEGSDIEAGELNHQNGEPTEVEDGTVDGADRDEKDFRNPGQEVRKLDLPVLFPNRLGKTPLALMVKGWQSPL

SEQ ID NO: 98787 - protein, 425 aa, Homo sapiens
  Payload ID: 19717
  Gene Name: zinc finger and SCAN domain containing 32
  ENSP ID: ENSP00000460487
MMAAVKSTEAHPSSNKDPTQGQKSALQGNSPDSEASRQRFRQFCYQEVTGPHEAFSKLWELCCQWLRPKTHSKEEILELLVLEQFLTILPEEIQTWVREQHPENGEEAVALVEDVQRAPGQQVLDSEKDLKVLMKEMAPLGATRESLRSQWKQEVQPEEPTFKGSQSSHQRPGEQSEAWLAPQAPRNLPQNTGLHDQETGAVVWTAGSQGPAMRDNRAVSLCQQEWMCPGPAQRALYRGATQRKDSHVSLATGVPWGYEETKTLLAILSSSQFYGKLQTCQQNSQIYRAMAEGLWEQGFLRTPEQCRTKFKSLQLSYRKVRRGRVPEPCIFYEEMNALSGSWASAPPMASDAVPGQEGSDIEAGELNHQNGEPTEVEDGTVDGADRDEKDFRNPGQEVRKLDLPVLFPNRLGFEFKNEIKKENLK

SEQ ID NO: 98788 - protein, 217 aa, Homo sapiens
  Payload ID: 19717
  Gene Name: zinc finger and SCAN domain containing 32
  ENSP ID: ENSP00000460833
MMAAVKSTEAHPSSNKDPTQGQKSALQGNSPDSEASRQRFRQFCYQEVTGPHEAFSKLWELCCQWLRPKTHSKEEILELLVLEQFLTILPEEIQTWVREQHPENGEEAVALVEDVQRAPGQQVLDSEKDLKVLMKEMAPLGATRESLRSQWKQEVQPEEPTFKGSQSSHQRPGEQSEATGVPWGYEETKTLLAILSSSQFYGKLQTCQQNSQIYRAM

SEQ ID NO: 98789 - protein, 229 aa, Homo sapiens
  Payload ID: 19717
  Gene Name: zinc finger and SCAN domain containing 32
  ENSP ID: ENSP00000461600
MMAAVKSTEAHPSSNKDPTQGQKSALQGNSPDSEASRQRFRQFCYQEVTGPHEAFSKLWELCCQWLRPKTHSKEEILELLVLEQFLTILPEEIQTWVREQHPENGEEAVALVEDVQRAPGQQPGLLLRLPGTCLKTQVSTTRRQVLWSGQLGPRDQPCVTTELYPSVSKNGCAQALHKGPSTGVPPRGRTVTSRWQQVCPGAMKRPRRSWLFLVVLNFMENSRPVSRTA

SEQ ID NO: 98790 - protein, 408 aa, Homo sapiens; identical to SEQ ID NO: 98781
  Payload ID: 19717
  Gene Name: zinc finger and SCAN domain containing 32
  Uniprot ID: Q9NX65
  ENSP ID: ENSP00000483210

SEQ ID NO: 98791 - protein, 433 aa, Homo sapiens
  Payload ID: 19718
  Gene Name: zinc finger and SCAN domain containing 4
  Uniprot ID: Q8NAM6
  ENSP ID: ENSP00000321963
MALDLRTIFQCEPSENNLGSENSAFQQSQGPAVQREEGISEFSRMVLNSFQDSNNSYARQELQRLYRIFHSWLQPEKHSKDEIISLLVLEQFMIGGHCNDKASVKEKWKSSGKNLERFIEDLTDDSINPPALVHVHMQGQEALFSEDMPLRDVIVHLTKQVNAQTTREANMGTPSQTSQDTSLETGQGYEDEQDGWNSSSKTTRVNENITNQGNQIVSLIIIQEENGPRPEEGGVSSDNPYNSKRAELVTARSQEGSINGITFQGVPMVMGAGCISQPEQSSPESALTHQSNEGNSTCEVHQKGSHGVQKSYKCEECPKVFKYLCHLLAHQRRHRNERPFVCPECQKGFFQISDLRVHQIIHTGKKPFTCSMCKKSFSHKTNLRSHERIHTGEKPYTCPFCKTSYRQSSTYHRHMRTHEKITLPSVPSTPEAS

SEQ ID NO: 98792 - protein, 433 aa, Homo sapiens; identical to SEQ ID NO: 98791
  Payload ID: 19718
  Gene Name: zinc finger and SCAN domain containing 4
  Uniprot ID: Q8NAM6
  ENSP ID: ENSP00000480210

SEQ ID NO: 98793 - protein, 496 aa, Homo sapiens
  Payload ID: 19719
  Gene Name: zinc finger and SCAN domain containing 5A
  Uniprot ID: Q9BUG6
  ENSP ID: ENSP00000375593
MAANCTSSWSLGESCNRPGLELPRSMASSETQLGNHDVDPEISHVNFRMFSCPKESDPIQALRKLTELCHLWLRPDLHTKEQILDMLVMEQFMISMPQELQVLVMMNGVQSCKDLEDLLRNNRRPKKWSVVTFHGKEYIVQDSDIEMAEAPSSVRDDLKDVSSQRASSVNQMRPGEGQAHRELQILPRVPALSRRQGEDFLLHKSIDVTGDPKSLRPKQTLEKDLKENREENPGLTSPEPQLPKSPTDLVRAKEGKDPPKIASVENVDADTPSACVVEREASTHSGNRGDALNLSSPKRSKPDASSISQEEPQGEATPVGNRESPGQAGMNSIHSPGPASPVSHPDGQEAKALPPFACDVCEKRFTCNSKLVIHKRSHTGERLFQCNLCGKRFMQLISLQFHQRTHTGERPYTCDVCQKQFTQKSYLKCHKRSHTGEKPFECKDCKKVFTYRGSLKEHQRIHSGEKPYKCSKCPRAFSRLKLLRRHQKTHPEATSQ

SEQ ID NO: 98794 - protein, 190 aa, Homo sapiens
  Payload ID: 19719
  Gene Name: zinc finger and SCAN domain containing 5A
  ENSP ID: ENSP00000464936
MAEAPSSVRDDLKDVSSQRASSVNQMRPGEGQAHRELQILPRVPALSRRQGEDFLLHKSIDVTGDPKSLRPKQTLEKDLKENREENPGLTSPEPQLPKSPTDLVRAKEGKDPPKIASVENVDADTPSACVVEREASTHSGNRGDALNLSSPKRSKPDASSISQEEPQGEATPVGNRESPGQAGMNSIHSP

SEQ ID NO: 98795 - protein, 350 aa, Homo sapiens
  Payload ID: 19719
  Gene Name: zinc finger and SCAN domain containing 5A
  ENSP ID: ENSP00000466445
MAEAPSSVRDDLKDVSSQRASSVNQMRPGEGQAHRELQILPRVPALSRRQGEDFLLHKSIDVTGDPKSLRPKQTLEKDLKENREENPGLTSPEPQLPKSPTDLVRAKEGKDPPKIASVENVDADTPSACVVEREASTHSGNRGDALNLSSPKRSKPDASSISQEEPQGEATPVGNRESPGQAGMNSIHSPGPASPVSHPDGQEAKALPPFACDVCEKRFTCNSKLVIHKRSHTGERLFQCNLCGKRFMQLISLQFHQRTHTGERPYTCDVCQKQFTQKSYLKCHKRSHTGEKPFECKDCKKVFTYRGSLKEHQRIHSGEKPYKCSKCPRAFSRLKLLRRHQKTHPEATSQ

SEQ ID NO: 98796 - protein, 38 aa, Homo sapiens
  Payload ID: 19719
  Gene Name: zinc finger and SCAN domain containing 5A
  ENSP ID: ENSP00000466830
MAANCTSSWSLGESCNRPGLELPRSMASSETQLGNHDV

SEQ ID NO: 98797 - protein, 495 aa, Homo sapiens
  Payload ID: 19719
  Gene Name: zinc finger and SCAN domain containing 5A
  ENSP ID: ENSP00000467238
MAANCTSSWSLGESCNRPGLELPRSMASSETQLGNHDVDPEISHVNFRMFSCPKESDPIQALRKLTELCHLWLRPDLHTKEQILDMLVMEQFMISMPQELQVLVMMNGVQSCKDLEDLLRNNRRPKKWSVVTFHGKEYIVQDSDIEMAEAPSSVRDDLKDVSSQRASSVNQMRPGEGQAHRELQILPRVPALSRRQGEDFLLHKSIDVTGDPKSLRPKQTLEKDLKENREENPGLTSPEPQLPKSPNLVRAKEGKDPPKIASVENVDADTPSACVVEREASTHSGNRGDALNLSSPKRSKPDASSISQEEPQGEATPVGNRESPGQAGMNSIHSPGPASPVSHPDGQEAKALPPFACDVCEKRFTCNSKLVIHKRSHTGERLFQCNLCGKRFMQLISLQFHQRTHTGERPYTCDVCQKQFTQKSYLKCHKRSHTGEKPFECKDCKKVFTYRGSLKEHQRIHSGEKPYKCSKCPRAFSRLKLLRRHQKTHPEATSQ

SEQ ID NO: 98798 - protein, 496 aa, Homo sapiens; identical to SEQ ID NO: 98793
  Payload ID: 19719
  Gene Name: zinc finger and SCAN domain containing 5A
  Uniprot ID: Q9BUG6
  ENSP ID: ENSP00000467631

SEQ ID NO: 98799 - protein, 84 aa, Homo sapiens
  Payload ID: 19719
  Gene Name: zinc finger and SCAN domain containing 5A
  ENSP ID: ENSP00000468008
MAANCTSSWSLGESCNRPGLELPRSMASSETQLGNHDVDPEISHVNFRMFSCPKESDPIQALRKLTELCHLWLRPDLHTKEQIL

SEQ ID NO: 98800 - protein, 42 aa, Homo sapiens
  Payload ID: 19719
  Gene Name: zinc finger and SCAN domain containing 5A
  ENSP ID: ENSP00000468675
MAANCTSSWSLGESCNRPGLELPRSMASSETQLGNHDVDPEI

SEQ ID NO: 98801 - protein, 105 aa, Homo sapiens
  Payload ID: 19719
  Gene Name: zinc finger and SCAN domain containing 5A
  ENSP ID: ENSP00000468797
MAANCTSSWSLGESCNRPGLELPRSMASSETQLGNHDVDPEISHVNFRMFSCPKESDPIQALRKLTELCHLWLRPDLHTKEQILDMLVMEQFMISMPQELQVLVM

SEQ ID NO: 98802 - protein, 495 aa, Homo sapiens
  Payload ID: 19720
  Gene Name: zinc finger and SCAN domain containing 5B
  Uniprot ID: A6NJL1
  ENSP ID: ENSP00000351883
MAANWTLSWGQGGPCNSPGSDTPRSVASPETQLGNHDRNPETWHMNFRMFSCPEESDPIQALRKLTELCHLWLRPDLHTKEQILDMLVMEQFMISMPQELQVLVKVNGVQSCKDLEDLLRNNRRPKKWSIVNLLGKEYLMLNSDVEMAEAPASVRDDPRDVSSQWASSVNQMHPGTGQARREQQILPRVAALSRRQGEDFLLHKSIDVTGDPNSPRPKQTLEKDLKENREENPGLSSPEPQLPKSPNLVRAKEGKEPQKRASVENVDADTPSACVVEREALTHSGNRGDALNLSSPKRSKPDASSISQEEPQGEATPVGNRESPGQAEINPVHSPGPAGPVSHPDGQEAKALPPFACDVCNKSFKYFSQLSIHRRSHTGDRPFQCDLCRKRFLQPSDLRVHQRVHTGERPYMCDVCQKRFAHESTLQGHKRIHTGERPFKCKYCSKVFSHKGNLNVHQRTHSGEKPYKCPTCQKAFRQLGTFKRHLKTHRETTSQ

SEQ ID NO: 98803 - protein, 169 aa, Homo sapiens
  Payload ID: 19720
  Gene Name: zinc finger and SCAN domain containing 5B
  ENSP ID: ENSP00000465118
MAANWTLSWGQGGPCNSPGSDTPRSVASPETQLGNHDRNPETWHMNFRMFSCPEESDPIQALRKLTELCHLWLRPDLHTKEQILDMLVMEQFMISMPQELQVLVKVNGVQSCKDLEDLLRNNRRPKKWSIVNLLGKEYLMLNSDVEMAEAPASVRDDPRDVSSQWASSV

SEQ ID NO: 98804 - protein, 495 aa, Homo sapiens; identical to SEQ ID NO: 98802
  Payload ID: 19720
  Gene Name: zinc finger and SCAN domain containing 5B
  Uniprot ID: A6NJL1
  ENSP ID: ENSP00000466072

SEQ ID NO: 98805 - protein, 137 aa, Homo sapiens
  Payload ID: 19720
  Gene Name: zinc finger and SCAN domain containing 5B
  ENSP ID: ENSP00000468660
MAANWTLSWGQGGPCNSPGSDTPRSVASPETQLGNHDRNPETWHMNFRMFSCPEESDPIQALRKLTELCHLWLRPDLHTKEQILDMLVMEQFMISMPQELQVLVKVNGVQSCKDLEDLLRNNRRPKKWSIVNLLGKE

SEQ ID NO: 98806 - protein, 496 aa, Homo sapiens
  Payload ID: 19721
  Gene Name: zinc finger and SCAN domain containing 5C, pseudogene
  Uniprot ID: A6NGD5
  ENSP ID: ENSP00000365443
MAANCTSSWSLGESCNSPGSEPPQSMPSPATQLGNHDSDPETCHVNFRMFSCPKESDPIQALRKLTELCHLWLRPDLHTKEQILDMLVMEQFMISMPQELQVLVMMNGVQSCKDLEDLLRNNRRPKKWSVVSFLGKEYLMQESDVEMAEAPASVRDDPRHVSSQRTSSVNQMCPEEGQASQELQTLPRVPALFRRQEEDFLLPETTVMKGDPKALRPKPTLEKDLEEDREENPGLTSPEPQLPNSPTGVVGAKEGKEPQKRASVENVDADTPSACVVEREASTHSGSRGDALNLRGLKRSKPDATSISQEEPQGEATPVGNRESPGQAEINPVHSPGPAGPVSHPSGQEVKELLPFACEVCGKRFKYRGKLAVHTRSHTGERLFQCNLCGKRFMQRIGLQFHQRTHTGERPYTCDICQKQFTQKSYLKCHKRSHTGEKPFECKDCKKVFTYKANLKEHQRIHSGEKPHKCSKCPRAFGRPATLRRHQKTHREATSQ

SEQ ID NO: 98807 - protein, 496 aa, Homo sapiens; identical to SEQ ID NO: 98806
  Payload ID: 19721
  Gene Name: zinc finger and SCAN domain containing 5C, pseudogene
  Uniprot ID: A6NGD5
  ENSP ID: ENSP00000435234

SEQ ID NO: 98808 - protein, 394 aa, Homo sapiens
  Payload ID: 19722
  Gene Name: zinc finger and SCAN domain containing 9
  Uniprot ID: O15535
  ENSP ID: ENSP00000252207
MNTNSKEVLSLGVQVPEAWEELLTMKVEAKSHLQWQESRLKRSNPLAREIFRRHFRQLCYQETPGPREALTRLQELCYQWLRPHVSTKEQILDLLVLEQFLSILPKELQGWVREHCPESGEEAVILLEDLERELDEPQHEMVAHRHRQEVLCKEMVPLAEQTPLTLQSQPKEPQLTCDSAQKCHSIGETDEVTKTEDRELVLRKDCPKIVEPHGKMFNEQTWEVSQQDPSHGEVGEHKDRIERQWGNLLGEGQHKCDECGKSFTQSSGLIRHQRIHTGERPYECNECGKAFSRSSGLFNHRGIHNIQKRYHCKECGKVFSQSAGLIQHQRIHKGEKPYQCSQCSKSYSRRSFLIEHQRSHTGERPHQCIECGKSFNRHCNLIRHQKIHTVAELV

SEQ ID NO: 98809 - protein, 445 aa, Homo sapiens
  Payload ID: 19722
  Gene Name: zinc finger and SCAN domain containing 9
  Uniprot ID: O15535
  ENSP ID: ENSP00000404074
MNTNSKEVLSLGVQVPEAWEELLTMKVEAKSHLQWQESRLKRSNPLAREIFRRHFRQLCYQETPGPREALTRLQELCYQWLRPHVSTKEQILDLLVLEQFLSILPKELQGWVREHCPESGEEAVILLEDLERELDEPQHEMVAHRHRQEVLCKEMVPLAEQTPLTLQSQPKEPQLTCDSAQKCHSIGETDLIRSLRRRAVLIPLGAHLFSTDTFLFSKPVVIPQLKGGGETWPNNRGVLRDEVTKTEDRELVLRKDCPKIVEPHGKMFNEQTWEVSQQDPSHGEVGEHKDRIERQWGNLLGEGQHKCDECGKSFTQSSGLIRHQRIHTGERPYECNECGKAFSRSSGLFNHRGIHNIQKRYHCKECGKVFSQSAGLIQHQRIHKGEKPYQCSQCSKSYSRRSFLIEHQRSHTGERPHQCIECGKSFNRHCNLIRHQKIHTVAELV

SEQ ID NO: 98810 - protein, 41 aa, Homo sapiens
  Payload ID: 19722
  Gene Name: zinc finger and SCAN domain containing 9
  ENSP ID: ENSP00000433307
MNTNSKEVLSLGVQVPEAWEELLTMKVEAKSHLQWQESRLK

SEQ ID NO: 98811 - protein, 394 aa, Homo sapiens; identical to SEQ ID NO: 98808
  Payload ID: 19722
  Gene Name: zinc finger and SCAN domain containing 9
  Uniprot ID: O15535
  ENSP ID: ENSP00000433402

SEQ ID NO: 98812 - protein, 261 aa, Homo sapiens
  Payload ID: 19722
  Gene Name: zinc finger and SCAN domain containing 9
  ENSP ID: ENSP00000433468
MNTNSKEVLSLGVQVPEAWEELLTMKVEAKSHLQWQESRLKRSNPLAREIFRRHFRQLCYQETPGPREALTRLQELCYQWLRPHVSTKEQILDLLVLEQFLSILPKELQGWVREHCPESGEEAVILLEDLERELDEPQHEMVAHRHRQEVLCKEMVPLAEQTPLTLQSQPKEPQLTCDSAQKCHSIGETGEGQHLFDVERIPPGQAKTNNKPRAGKTGDPKTPYQIAVMVSSSESLVCSSLTLLPACRLLPEYHPGSFLDF

SEQ ID NO: 98813 - protein, 369 aa, Homo sapiens
  Payload ID: 19722
  Gene Name: zinc finger and SCAN domain containing 9
  ENSP ID: ENSP00000436166
MNTNSKEVLSLGVQVPEAWEELLTMKVEAKSHLQWQESRLKRSNPLAREIFRRHFRQLCYQETPGPREALTRLQELCYQWLRPHVSTKEQILDLLVLEQFLSILPKELQGWVREHCPESGEEAVILLEDLERELDEPQHEMVAHRHRQEVLCKEMVPLAEQTPLTLQSQPKEPQLTCDSAQKCHSIGETDTFLFSKPVVIPQLKGGGETWPNNRGVLRDEVTKTEDRELVLRKDCPKIVEPHGKMFNEQTWEVSQQDPSHGEVGEHKDRIERQWGNLLGEGQHKCDECGKSFTQSSGLIRHQRIHTGERPYECNECGKAFSRSSGLFNHRGIHNIQKRYHCKECGKVFSQSAGLIQHQRIHKGEKPYQC

SEQ ID NO: 98814 - protein, 160 aa, Homo sapiens
  Payload ID: 19722
  Gene Name: zinc finger and SCAN domain containing 9
  ENSP ID: ENSP00000475719
MNTNSKEVLSLGVQVPEAWEELLTMKVEAKSHLQWQESRLKRSNPLAREIFRRHFRQLCYQETPGPREALTRLQELCYQWLRPHVSTKEQILDLLVLEQFLSILPKELQGWVREHCPESGEEAVILLEDLERELDEPQHESNLVFLSPDGGPQTQTRSPL

SEQ ID NO: 98815 - protein, 197 aa, Homo sapiens
  Payload ID: 19722
  Gene Name: zinc finger and SCAN domain containing 9
  ENSP ID: ENSP00000476254
MNTNSKEVLSLGVQVPEAWEELLTMKVEAKSHLQWQESRLKRSNPLAREIFRRHFRQLCYQETPGPREALTRLQELCYQWLRPHVSTKEQILDLLVLEQFLSILPKELQGWVREHCPESGEEAVILLEDLERELDEPQHEMVAHRHRQEVLCKEMVPLAEQTPLTLQSQPKEPQLTCDSAQKCHSIGETDEVTKTED

SEQ ID NO: 98816 - protein, 434 aa, Homo sapiens
  Payload ID: 19723
  Gene Name: zinc finger CCCH-type containing 10
  Uniprot ID: Q96K80
  ENSP ID: ENSP00000257940
MPDRDSYANGTGSSGGGPGGGGSEEASGAGVGSGGASSDAICRDFLRNVCKRGKRCRYRHPDMSEVSNLGVSKNEFIFCHDFQNKECSRPNCRFIHGSKEDEDGYKKTGELPPRLRQKVAAGLGLSPADLPNGKEEVPICRDFLKGDCQRGAKCKFRHLQRDFEFDARGGGGTGGGSTGSVLPGRRHDLYDIYDLPDRGFEDHEPGPKRRRGGCCPPDGPHFESYEYSLAPPRGVECRLLEEENAMLRKRVEELKKQVSNLLATNEVLLEQNAQFRNQAKVITLSSTAPATEQTLAPTVGTVATFNHGIAQTHTTLSSQALQPRPVSQQELVAPAGAPAAPPTNAAPPAAPPPPPPHLTPEITPLSAALAQTIAQGMAPPPVSMAPVAVSVAPVAPVAVSMAQPLAGITMSHTTTPMVTYPIASQSMRITAMPH

SEQ ID NO: 98817 - protein, 45 aa, Homo sapiens
  Payload ID: 19723
  Gene Name: zinc finger CCCH-type containing 10
  ENSP ID: ENSP00000448309
MPDRDSYANGTGSSGGGPGGGGSEEASGAGVGSGGASSDAICRDF

SEQ ID NO: 98818 - protein, 88 aa, Homo sapiens
  Payload ID: 19723
  Gene Name: zinc finger CCCH-type containing 10
  ENSP ID: ENSP00000448881
MPDRDSYANGTGSSGGGPGGGGSEEASGAGVGSGGASSDAICRDFLRNVCKRGKRCRYRHPDMSEVSNLGVSKNEFIFCHDFQNKECS

SEQ ID NO: 98819 - protein, 79 aa, Homo sapiens
  Payload ID: 19723
  Gene Name: zinc finger CCCH-type containing 10
  ENSP ID: ENSP00000450122
MPDRDSYANGTGSSGGGPGGGGSEEASGAGVGSGGASSDAICRDFLRNVCKRGKRCRYRHPDMSEVSNLGVSKNEFIFC

SEQ ID NO: 98820 - protein, 810 aa, Homo sapiens
  Payload ID: 19724
  Gene Name: zinc finger CCCH-type containing 11A
  Uniprot ID: O75152
  ENSP ID: ENSP00000333253
MPNQGEDCYFFFYSTCTKGDSCPFRHCEAAIGNETVCTLWQEGRCFRQVCRFRHMEIDKKRSEIPCYWENQPTGCQKLNCAFHHNRGRYVDGLFLPPSKTVLPTVPESPEEEVKASQLSVQQNKLSVQSNPSPQLRSVMKVESSENVPSPTHPPVVINAADDDEDDDDQFSEEGDETKTPTLQPTPEVHNGLRVTSVRKPAVNIKQGECLNFGIKTLEEIKSKKMKEKSKKQGEGSSGVSSLLLHPEPVPGPEKENVRTVVRTVTLSTKQGEEPLVRLSLTERLGKRKFSAGGDSDPPLKRSLAQRLGKKVEAPETNIDKTPKKAQVSKSLKERLGMSADPDNEDATDKVNKVGEIHVKTLEEILLERASQKRGELQTKLKTEGPSKTDDSTSGARSSSTIRIKTFSEVLAEKKHRQQEAERQKSKKDTTCIKLKIDSEIKKTVVLPPIVASRGQSEEPAGKTKSMQEVHIKTLEEIKLEKALRVQQSSESSTSSPSQHEATPGARRLLRITKRTGMKEEKNLQEGNEVDSQSSIRTEAKEASGETTGVDITKIQVKRCETMREKHMQKQQEREKSVLTPLRGDVASCNTQVAEKPVLTAVPGITRHLTKRLPTKSSQKVEVETSGIGDSLLNVKCAAQTLEKRGKAKPKVNVKPSVVKVVSSPKLAPKRKAVEMHAAVIAAVKPLSSSSVLQEPPAKKAAVAVVPLVSEDKSVTVPEAENPRDSLVLPPTQSSSDSSPPEVSGPSSSQMSMKTRRLSSASTGKPPLSVEDDFEKLIWEISGGKLEAEIDLDPGKDEDDLLLELSEMIDS

SEQ ID NO: 98821 - protein, 810 aa, Homo sapiens; identical to SEQ ID NO: 98820
  Payload ID: 19724
  Gene Name: zinc finger CCCH-type containing 11A
  Uniprot ID: O75152
  ENSP ID: ENSP00000356179

SEQ ID NO: 98822 - protein, 810 aa, Homo sapiens; identical to SEQ ID NO: 98820
  Payload ID: 19724
  Gene Name: zinc finger CCCH-type containing 11A
  Uniprot ID: O75152
  ENSP ID: ENSP00000356181

SEQ ID NO: 98823 - protein, 810 aa, Homo sapiens; identical to SEQ ID NO: 98820
  Payload ID: 19724
  Gene Name: zinc finger CCCH-type containing 11A
  Uniprot ID: O75152
  ENSP ID: ENSP00000356183

SEQ ID NO: 98824 - protein, 50 aa, Homo sapiens
  Payload ID: 19724
  Gene Name: zinc finger CCCH-type containing 11A
  ENSP ID: ENSP00000406531
MPNQGEDCYFFFYSTCTKGDSCPFRHCEAAIGNETVCTLWQEGRCFRQVC

SEQ ID NO: 98825 - protein, 515 aa, Homo sapiens
  Payload ID: 19724
  Gene Name: zinc finger CCCH-type containing 11A
  ENSP ID: ENSP00000415072
MPNQGEDCYFFFYSTCTKGDSCPFRHCEAAIGNETVCTLWQEGRCFRQVCRFRHMEIDKKRSEIPCYWENQPTGCQKLNCAFHHNRGRYVDGLFLPPSKTVLPTVPESPEEEVKASQLSVQQNKLSVQSNPSPQLRSVMKVESSENVPSPTHPPVVINAADDDEDDDDQFSEEGDETKTPTLQPTPEVHNGLRVTSVRKPAVNIKQGECLNFGIKTLEEIKSKKMKEKSKKQGEGSSGVSSLLLHPEPVPGPEKENVRTVVRTVTLSTKQGEEPLVRLSLTERLGKRKFSAGGDSDPPLKRSLAQRLGKKVEAPETNIDKTPKKAQVSKSLKERLGMSADPDNEDATDKVNKVGEIHVKTLEEILLERASQKRGELQTKLKTEGPSKTDDSTSGARSSSTIRIKTFSEVLAEKKHRQQEAERQKSKKDTTCIKLKIDSEIKKTVVLPPIVASRGQSEEPAGKTKSMQEVHIKTLEEIKLEKALRVQQSSESSTSSPSQHEATPGARRLLRITKRT

SEQ ID NO: 98826 - protein, 652 aa, Homo sapiens
  Payload ID: 19724
  Gene Name: zinc finger CCCH-type containing 11A
  ENSP ID: ENSP00000432602
MPNQGEDCYFFFYSTCTKGDSCPFRHCEAAIGNETVCTLWQEGRCFRQVCRFRHMEIDKKRSEIPCYWENQPTGCQKLNCAFHHNRGRYVDGLFLPPSKTVLPTVPESPEEEVKASQLSVQQNKLSVQSNPSPQLRSVMKVESSENVPSPTHPPVVINAADDDEDDDDQFSEEGDETKTPTLQPTPEVHNGLRVTSVRKPAVNIKQGECLNFGIKTLEEIKSKKMKEKSKKQGEGSSGVSSLLLHPEPVPGPEKENVRTVVRTVTLSTKQGEEPLVRLSLTERLGKRKFSAGGDSDPPLKRSLAQRLGKKVEAPETNIDKTPKKAQVSKSLKERLGMSADPDNEDATDKVNKVGEIHVKTLEEILLERASQKRGELQTKLKTEGPSKTDDSTSGARSSSTIRIKTFSEVLAEKKHRQQEAERQKSKKDTTCIKLKIDSEIKKTVVLPPIVASRGQSEEPAGKTKSMQEVHIKTLEEIKLEKALRVQQSSESSTSSPSQHEATPGARRLLRITKRTGMKEEKNLQEGNEVDSQSSIRTEAKEASGETTGVDITKIQVKRCETMREKHMQKQQEREKSVLTPLRGDVASCNTQVAEKPVLTAVPGITRHLTKRLPTKSSQKVEVETSGIGDSLLNVKCAAQTLEKRGKDIFCPL

SEQ ID NO: 98827 - protein, 810 aa, Homo sapiens; identical to SEQ ID NO: 98820
  Payload ID: 19724
  Gene Name: zinc finger CCCH-type containing 11A
  Uniprot ID: O75152
  ENSP ID: ENSP00000438527

SEQ ID NO: 98828 - protein, 599 aa, Homo sapiens
  Payload ID: 19725
  Gene Name: zinc finger CCCH-type containing 12A
  Uniprot ID: Q5D1E8
  ENSP ID: ENSP00000362179
MSGPCGEKPVLEASPTMSLWEFEDSHSRQGTPRPGQELAAEEASALELQMKVDFFRKLGYSSTEIHSVLQKLGVQADTNTVLGELVKHGTATERERQTSPDPCPQLPLVPRGGGTPKAPNLEPPLPEEEKEGSDLRPVVIDGSNVAMSHGNKEVFSCRGILLAVNWFLERGHTDITVFVPSWRKEQPRPDVPITDQHILRELEKKKILVFTPSRRVGGKRVVCYDDRFIVKLAYESDGIVVSNDTYRDLQGERQEWKRFIEERLLMYSFVNDKFMPPDDPLGRHGPSLDNFLRKKPLTLEHRKQPCPYGRKCTYGIKCRFFHPERPSCPQRSVADELRANALLSPPRAPSKDKNGRRPSPSSQSSSLLTESEQCSLDGKKLGAQASPGSRQEGLTQTYAPSGRSLAPSGGSGSSFGPTDWLPQTLDSLPYVSQDCLDSGIGSLESQMSELWGVRGGGPGEPGPPRAPYTGYSPYGSELPATAAFSAFGRAMGAGHFSVPADYPPAPPAFPPREYWSEPYPLPPPTSVLQEPPVQSPGAGRSPWGRAGSLAKEQASVYTKLCGVFPPHLVEAVMGRFPQLLDPQQLAAEILSYKSQHPSE

SEQ ID NO: 98829 - protein, 131 aa, Homo sapiens
  Payload ID: 19725
  Gene Name: zinc finger CCCH-type containing 12A
  ENSP ID: ENSP00000473447
DDRFIVKLAYESDGIVVSNDTYRDLQGERQEWKRFIEERLLMYSFVNDKLAIGPFSAIRSPCMAPTSREFFAPSAGLCPLMTHWAGTGPAWTTSCVRSHSLWSTGSSRVPMVWNPACPPRPSSLLPFLSPV

SEQ ID NO: 98830 - protein, 836 aa, Homo sapiens
  Payload ID: 19726
  Gene Name: zinc finger CCCH-type containing 12B
  Uniprot ID: Q5HYM0
  ENSP ID: ENSP00000340839
MTATAEVETPKMEKSASKEEKQQPKQDSTEQGNADSEEWMSSESDPEQISLKSSDNSKSCQPRDGQLKKKEMHSKPHRQLCRSPCLDRPSFSQSSILQDGKLDLEKEYQAKMEFALKLGYAEEQIQSVLNKLGPESLINDVLAELVRLGNKGDSEGQINLSLLVPRGPSSREIASPELSLEDEIDNSDNLRPVVIDGSNVAMSHGNKEEFSCRGIQLAVDWFLDKGHKDITVFVPAWRKEQSRPDAPITDQDILRKLEKEKILVFTPSRRVQGRRVVCYDDRFIVKLAFDSDGIIVSNDNYRDLQVEKPEWKKFIEERLLMYSFVNDKFMPPDDPLGRHGPSLENFLRKRPIVPEHKKQPCPYGKKCTYGHKCKYYHPERANQPQRSVADELRISAKLSTVKTMSEGTLAKCGTGMSSAKGEITSEVKRVAPKRQSDPSIRSVAMEPEEWLSIARKPEASSVPSLVTALSVPTIPPPKSHAVGALNTRSASSPVPGSSHFPHQKASLEHMASMQYPPILVTNSHGTPISYAEQYPKFESMGDHGYYSMLGDFSKLNINSMHNREYYMAEVDRGVYARNPNLCSDSRVSHTRNDNYSSYNNVYLAVADTHPEGNLKLHRSASQNRLQPFPHGYHEALTRVQSYGPEDSKQGPHKQSVPHLALHAQHPSTGTRSSCPADYPMPPNIHPGATPQPGRALVMTRMDSISDSRLYESNPVRQRRPPLCREQHASWDPLPCTTDSYGYHSYPLSNSLMQPCYEPVMVRSVPEKMEQLWRNPWVGMCNDSREHMIPEHQYQTYKNLCNIFPSNIVLAVMEKNPHTADAQQLAALIVAKLRAAR

SEQ ID NO: 98831 - protein, 883 aa, Homo sapiens
  Payload ID: 19727
  Gene Name: zinc finger CCCH-type containing 12C
  Uniprot ID: Q9C0D7
  ENSP ID: ENSP00000278590
MPGGGSQEYGVLCIQEYRKNSKVESSTRNNFMGLKDHLGHDLGHLYVESTDPQLSPAVPWSTVENPSMDTVNVGKDEKEASEENASSGDSEENTNSDHESEQLGSISVEPGLITKTHRQLCRSPCLEPHILKRNEILQDFKPEESQTTSKEAKKPPDVVREYQTKLEFALKLGYSEEQVQLVLNKLGTDALINDILGELVKLGNKSEADQTVSTINTITRETSSLESQRSESPMQEIVTDDGENLRPIVIDGSNVAMSHGNKEVFSCRGIKLAVDWFLERGHKDITVFVPAWRKEQSRPDALITDQEILRKLEKEKILVFTPSRRVQGRRVVCYDDRFIVKLAFESDGIIVSNDNYRDLANEKPEWKKFIDERLLMYSFVNDKFMPPDDPLGRHGPSLDNFLRKKPIVPEHKKQPCPYGKKCTYGHKCKYYHPERGSQPQRSVADELRAMSRNTAAKTANEGGLVKSNSVPCSTKADSTSDVKRGAPKRQSDPSIRTQVYQDLEEKLPTKNKLETRSVPSLVSIPATSTAKPQSTTSLSNGLPSGVHFPPQDQRPQGQYPSMMMATKNHGTPMPYEQYPKCDSPVDIGYYSMLNAYSNLSLSGPRSPERRFSLDTDYRISSVASDCSSEGSMSCGSSDSYVGYNDRSYVSSPDPQLEENLKCQHMHPHSRLNPQPFLQNFHDPLTRGQSYSHEEPKFHHKPPLPHLALHLPHSAVGARSSCPGDYPSPPSSAHSKAPHLGRSLVATRIDSISDSRLYDSSPSRQRKPYSRQEGLGSWERPGYGIDAYGYRQTYSLPDNSTQPCYEQFTFQSLPEQQEPAWRIPYCGMPQDPPRYQDNREKIYINLCNIFPPDLVRIVMKRNPHMTDAQQLAAAILVEKSQLGY

SEQ ID NO: 98832 - protein, 852 aa, Homo sapiens
  Payload ID: 19727
  Gene Name: zinc finger CCCH-type containing 12C
  ENSP ID: ENSP00000413094
MGLKDHLGHDLGHLYVESTDPQLSPAVPWSTVENPSMDTVNVGKDEKEASEENASSGDSEENTNSDHESEQLGSISVEPGLITKTHRQLCRSPCLEPHILKRNEILQDFKPEESQTTSKEAKKPPDVVREYQTKLEFALKLGYSEEQVQLVLNKLGTDALINDILGELVKLGNKSEADQTVSTINTITRETSSLESQRSESPMQEIVTDDGENLRPIVIDGSNVAMSHGNKEVFSCRGIKLAVDWFLERGHKDITVFVPAWRKEQSRPDALITDQEILRKLEKEKILVFTPSRRVQGRRVVCYDDRFIVKLAFESDGIIVSNDNYRDLANEKPEWKKFIDERLLMYSFVNDKFMPPDDPLGRHGPSLDNFLRKKPIVPEHKKQPCPYGKKCTYGHKCKYYHPERGSQPQRSVADELRAMSRNTAAKTANEGGLVKSNSVPCSTKADSTSDVKRGAPKRQSDPSIRTQVYQDLEEKLPTKNKLETRSVPSLVSIPATSTAKPQSTTSLSNGLPSGVHFPPQDQRPQGQYPSMMMATKNHGTPMPYEQYPKCDSPVDIGYYSMLNAYSNLSLSGPRSPERRFSLDTDYRISSVASDCSSEGSMSCGSSDSYVGYNDRSYVSSPDPQLEENLKCQHMHPHSRLNPQPFLQNFHDPLTRGQSYSHEEPKFHHKPPLPHLALHLPHSAVGARSSCPGDYPSPPSSAHSKAPHLGRSLVATRIDSISDSRLYDSSPSRQRKPYSRQEGLGSWERPGYGIDAYGYRQTYSLPDNSTQPCYEQFTFQSLPEQQEPAWRIPYCGMPQDPPRYQDNREKIYINLCNIFPPDLVRIVMKRNPHMTDAQQLAAAILVEKSQLGY

SEQ ID NO: 98833 - protein, 884 aa, Homo sapiens
  Payload ID: 19727
  Gene Name: zinc finger CCCH-type containing 12C
  Uniprot ID: Q9C0D7
  ENSP ID: ENSP00000431821
MSLYFPANEYGVLCIQEYRKNSKVESSTRNNFMGLKDHLGHDLGHLYVESTDPQLSPAVPWSTVENPSMDTVNVGKDEKEASEENASSGDSEENTNSDHESEQLGSISVEPGLITKTHRQLCRSPCLEPHILKRNEILQDFKPEESQTTSKEAKKPPDVVREYQTKLEFALKLGYSEEQVQLVLNKLGTDALINDILGELVKLGNKSEADQTVSTINTITRETSSLESQRSESPMQEIVTDDGENLRPIVIDGSNVAMSHGNKEVFSCRGIKLAVDWFLERGHKDITVFVPAWRKEQSRPDALITDQEILRKLEKEKILVFTPSRRVQGRRVVCYDDRFIVKLAFESDGIIVSNDNYRDLANEKPEWKKFIDERLLMYSFVNDKFMPPDDPLGRHGPSLDNFLRKKPIVPEHKKQPCPYGKKCTYGHKCKYYHPERGSQPQRSVADELRAMSRNTAAKTANEGGLVKSNSVPCSTKADSTSDVKRGAPKRQSDPSIRTQVYQDLEEKLPTKNKLETRSVPSLVSIPATSTAKPQSTTSLSNGLPSGVHFPPQDQRPQGQYPSMMMATKNHGTPMPYEQYPKCDSPVDIGYYSMLNAYSNLSLSGPRSPERRFSLDTDYRISSVASDCSSEGSMSCGSSDSYVGYNDRSYVSSPDPQLEENLKCQHMHPHSRLNPQPFLQNFHDPLTRGQSYSHEEPKFHHKPPLPHLALHLPHSAVGARSSCPGDYPSPPSSAHSKAPHLGRSLVATRIDSISDSRLYDSSPSRQRKPYSRQEGLGSWERPGYGIDAYGYRQTYSLPDNSTQPCYEQFTFQSLPEQQEPAWRIPYCGMPQDPPRYQDNREKIYINLCNIFPPDLVRIVMKRNPHMTDAQQLAAAILVEKSQLGY

SEQ ID NO: 98834 - protein, 527 aa, Homo sapiens
  Payload ID: 19728
  Gene Name: zinc finger CCCH-type containing 12D
  Uniprot ID: A2A288
  ENSP ID: ENSP00000386616
MEHPSKMEFFQKLGYDREDVLRVLGKLGEGALVNDVLQELIRTGSRPGALEHPAAPRLVPRGSCGVPDSAQRGPGTALEEDFRTLASSLRPIVIDGSNVAMSHGNKETFSCRGIKLAVDWFRDRGHTYIKVFVPSWRKDPPRADTPIREQHVLAELERQAVLVYTPSRKVHGKRLVCYDDRYIVKVAYEQDGVIVSNDNYRDLQSENPEWKWFIEQRLLMFSFVNDRFMPPDDPLGRHGPSLSNFLSRKPKPPEPSWQHCPYGKKCTYGIKCKFYHPERPHHAQLAVADELRAKTGARPGAGAEEQRPPRAPGGSAGARAAPREPFAHSLPPARGSPDLAALRGSFSRLAFSDDLGPLGPPLPVPACSLTPRLGGPDWVSAGGRVPGPLSLPSPESQFSPGDLPPPPGLQLQPRGEHRPRDLHGDLLSPRRPPDDPWARPPRSDRFPGRSVWAEPAWGDGATGGLSVYATEDDEGDARARARIALYSVFPRDQVDRVMAAFPELSDLARLILLVQRCQSAGAPLGKP

SEQ ID NO: 98835 - protein, 167 aa, Homo sapiens
  Payload ID: 19728
  Gene Name: zinc finger CCCH-type containing 12D
  ENSP ID: ENSP00000387062
MEHPSKMEFFQKLGYDREDVLRVLGKLGEGALVNDVLQELIRTGSRPGALEHPAAPRLVPRGSCGVPDSAQRGPGTALEEDFRTLASSLRPIVIDGSNVAMSHGNKETFSCRGIKLAVDWFRDRGHTYIKVFVPSWRKDPPRADTPIRGIGMGNEWRSILLGAAARE

SEQ ID NO: 98836 - protein, 106 aa, Homo sapiens
  Payload ID: 19728
  Gene Name: zinc finger CCCH-type containing 12D
  ENSP ID: ENSP00000395209
  MOD_RES (1)..(1): Any amino acid
XAVLVYTPSRKVHGKRLVCYDDRYIVKVAYEQDGVIVSNDNYRDLQSENPEWKWFIEQRLLMFSFVNDRFMPPDDPLGRHGPSLSNFLSRKPKPPEPSWQHCPYGG

SEQ ID NO: 98837 - protein, 1668 aa, Homo sapiens
  Payload ID: 19729
  Gene Name: zinc finger CCCH-type containing 13
  Uniprot ID: Q5T200
  ENSP ID: ENSP00000242848
MSKIRRKVTVENTKTISDSTSRRPSVFERLGPSTGSTAETQCRNWLKTGNCLYGNTCRFVHGPSPRGKGYSSNYRRSPERPTGDLRERMKNKRQDVDTEPQKRNTEESSSPVRKESSRGRHREKEDIKITKERTPESEEENVEWETNRDDSDNGDINYDYVHELSLEMKRQKIQRELMKLEQENMEKREEIIIKKEVSPEVVRSKLSPSPSLRKSSKSPKRKSSPKSSSASKKDRKTSAVSSPLLDQQRNSKTNQSKKKGPRTPSPPPPIPEDIALGKKYKEKYKVKDRIEEKTRDGKDRGRDFERQREKRDKPRSTSPAGQHHSPISSRHHSSSSQSGSSIQRHSPSPRRKRTPSPSYQRTLTPPLRRSASPYPSHSLSSPQRKQSPPRHRSPMREKGRHDHERTSQSHDRRHERREDTRGKRDREKDSREEREYEQDQSSSRDHRDDREPRDGRDRRDARDTRDRRELRDSRDMRDSREMRDYSRDTKESRDPRDSRSTRDAHDYRDREGRDTHRKEDTYPEESRSYGRNHLREESSRTEIRNESRNESRSEIRNDRMGRSRGRVPELPEKGSRGSRGSQIDSHSSNSNYHDSWETRSSYPERDRYPERDNRDQARDSSFERRHGERDRRDNRERDQRPSSPIRHQGRNDELERDERREERRVDRVDDRRDERARERDRERERDRERERERERERDREREKERELERERAREREREREKERDRERDRDRDHDRERERERERDREKEREREREERERERERERERERERERERERARERDKERERQRDWEDKDKGRDDRREKREEIREDRNPRDGHDERKSKKRYRNEGSPSPRQSPKRRREHSPDSDAYNSGDDKNEKHRLLSQVVRPQESRSLSPSHLTEDRQGRWKEEDRKPERKESSRRYEEQELKEKVSSVDKQREQTEILESSRMRAQDIIGHHQSEDRETSDRAHDENKKKAKIQKKPIKKKKEDDVGIERGNIETTSEDGQVFSPKKGQKKKSIEKKRKKSKGDSDISDEEAAQQSKKKRGPRTPPITTKEELVEMCNGKNGILEDSQKKEDTAFSDWSDEDVPDRTEVTEAEHTATATTPGSTPSPLSSLLPPPPPVATATATTVPATLAATTAAAATSFSTSAITISTSATPTNTTNNTFANEDSHRKCHRTRVEKVETPHVTIEDAQHRKPMDQKRSSSLGSNRSNRSHTSGRLRSPSNDSAHRSGDDQSGRKRVLHSGSRDREKTKSLEITGERKSRIDQLKRGEPSRSTSSDRQDSRSHSSRRSSPESDRQVHSRSGSFDSRDRLQERDRYEHDRERERERRDTRQREWDRDADKDWPRNRDRDRLRERERERERDKRRDLDRERERLISDSVERDRDRDRDRTFESSQIESVKRCEAKLEGEHERDLESTSRDSLALDKERMDKDLGSVQGFEETNKSERTESLEGDDESKLDDAHSLGSGAGEGYEPISDDELDEILAGDAEKREDQQDEEKMPDPLDVIDVDWSGLMPKHPKEPREPGAALLKFTPGAVMLRVGISKKLAGSELFAKVKETCQRLLEKPKDADNLFEHELGALNMAALLRKEERASLLSNLGPCCKALCFRRDSAIRKQLVKNEKGTIKQAYTSAPMVDNELLRLSLRLFKRKTTCHAPGHEKTEDNKLSQSSIQQELCVS

SEQ ID NO: 98838 - protein, 1564 aa, Homo sapiens
  Payload ID: 19729
  Gene Name: zinc finger CCCH-type containing 13
  Uniprot ID: Q5T200
  ENSP ID: ENSP00000282007
MSKIRRKVTVENTKTISDSTSRRPSVFERLGPSTGSTAETQCRNWLKTGNCLYGNTCRFVHGPSPRGKGYSSNYRRSPERPTGDLRERMKNKRQDVDTEPQKRNTEESSSPVRKESSRGRHREKEDIKITKERTPESEEENVEWETNRDDSDNGDINYDYVHELSLEMKRQKIQRELMKLEQENMEKREEIIIKKEVSPEVVRSKLSPSPSLRKSSKSPKRKSSPKSSSASKKDRKTSAVSSPLLDQQRNSKTNQSKKKGPRTPSPPPPIPEDIALGKKYKEKYKVKDRIEEKTRDGKDRGRDFERQREKRDKPRSTSPAGQHHSPISSRHHSSSSQSGSSIQRHSPSPRRKRTPSPSYQRTLTPPLRRSASPYPSHSLSSPQRKQSPPRHRSPMREKGRHDHERTSQSHDRRHERREDTRGKRDREKDSREEREYEQDQSSSRDHRDDREPRDGRDRRDARDTRDRRELRDSRDMRDSREMRDYSRDTKESRDPRDSRSTRDAHDYRDREGRDTHRKEDTYPEESRSYGRNHLREESSRTEIRNESRNESRSEIRNDRMGRSRGRVPELPEKGSRGSRGSQIDSHSSNSNYHDSWETRSSYPERDRYPERDNRDQARDSSFERRHGERDRRDNRERDQRPSSPIRHQGRNDELERDERREERRVDRVDDRRDERARERDRERERDRERERERERERDREREKERELERERAREREREREKERDRERDRDRDHDRERERERERDREKEREREREERERERERERERERERERERERARERDKERERQRDWEDKDKGRDDRREKREEIREDRNPRDGHDERKSKKRYRNEGSPSPRQSPKRRREHSPDSDAYNSGDDKNEKHRLLSQVVRPQESRSLSPSHLTEDRQGRWKEEDRKPERKESSRRYEEQELKEKVSSVDKQREQTEILESSRMRAQDIIGHHQSEDRETSDRAHDENKKKAKIQKKPIKKKKEDDVGIERGNIETTSEDGQVFSPKKGQKKKSIEKKRKKSKGDSDISDEEAAQQSKKKRGPRTPPITTKEELVEMCNGKNGILEDSQKKEDTAFSDWSDEDVPDRTEVTEAEHTATATTPGSTPSPLSSLLPPPPPVATATATTVPATLAATTAAAATSFSTSAITISTSATPTNTTNNTFANEDSHRKCHRTRVEKVETPHVTIEDAQHRKPMDQKRSSSLGSNRSNRSHTSGRLRSPSNDSAHRSGDDQSGRKRVLHSGSRDREKTKSLEITGERKSRIDQLKRGEPSRSTSSDRQDSRSHSSRRSSPESDRQVHSRSGSFDSRDRLQERDRYEHDRERERERRDTRQREWDRDADKDWPRNRDRDRLRERERERERDKRRDLDRERERLISDSVERDRDRDRDRTFESSQIESVKRCEAKLEGEHERDLESTSRDSLALDKERMDKDLGSVQGFEETNKSERTESLEAGDDESKLDDAHSLGSGAGEGYEPISDDELDEILAGDAEKREDQQDEEKMPDPLDVIDVDWSGLMPKHPKEPREPGAALLKFTPGAVMLRVGISKKLAGSELFAKVKETCQRLLEKPKGSFILL

SEQ ID NO: 98839 - protein, 115 aa, Homo sapiens
  Payload ID: 19729
  Gene Name: zinc finger CCCH-type containing 13
  ENSP ID: ENSP00000416238
MSKIRRKVTVENTKTISDSTSRRPSVFERLGPSTGSTAETQCRNWLKTGNCLYGNTCRFVHGPSPRGKGYSSNYRRSPERPTGDLRERMKNKRQDVDTEPQKRNTEESSSPVRVG

SEQ ID NO: 98840 - protein, 116 aa, Homo sapiens
  Payload ID: 19729
  Gene Name: zinc finger CCCH-type containing 13
  ENSP ID: ENSP00000480658
  MOD_RES (1)..(1): Any amino acid
XEEENVEWETNRDDSDNGDINYDYVHELSLEMKRQKIQRELMKLEQENMEKREEIIIKKEVSPEVVRSKLSPSPSLRKSSKSPKRKSSPKSSSASKKDRKTSAVSSPLLDQQRSVG

SEQ ID NO: 98841 - protein, 736 aa, Homo sapiens
  Payload ID: 19730
  Gene Name: zinc finger CCCH-type containing 14
  Uniprot ID: Q6PJT7
  ENSP ID: ENSP00000251038
MEIGTEISRKIRSAIKGKLQELGAYVDEELPDYIMVMVANKKSQDQMTEDLSLFLGNNTIRFTVWLHGVLDKLRSVTTEPSSLKSSDTNIFDSNVPSNKSNFSRGDERRHEAAVPPLAIPSARPEKRDSRVSTSSQESKTTNVRQTYDDGAATRLMSTVKPLREPAPSEDVIDIKPEPDDLIDEDLNFVQENPLSQKKPTVTLTYGSSRPSIEIYRPPASRNADSGVHLNRLQFQQQQNSIHAAKQLDMQSSWVYETGRLCEPEVLNSLEETYSPFFRNNSEKMSMEDENFRKRKLPVVSSVVKVKKFNHDGEEEEEDDDYGSRTGSISSSVSVPAKPERRPSLPPSKQANKNLILKAISEAQESVTKTTNYSTVPQKQTLPVAPRTRTSQEELLAEVVQGQSRTPRISPPIKEEETKGDSVEKNQGTQQRQLLSRLQIDPVMAETLQMSQDYYDMESMVHADTRSFILKKPKLSEEVVVAPNQESGMKTADSLRVLSGHLMQTRDLVQPDKPASPKFIVTLDGVPSPPGYMSDQEEDMCFEGMKPVNQTAASNKGLRGLLHPQQLHLLSRQLEDPNGSFSNAEMSELSVAQKPEKLLERCKYWPACKNGDECAYHHPISPCKAFPNCKFAEKCLFVHPNCKYDAKCTKPDCPFTHVSRRIPVLSPKPAVAPPAPPSSSQLCRYFPACKKMECPFYHPKHCRFNTQCTRPDCTFYHPTINVPPRHALKWIRPQTSE

SEQ ID NO: 98842 - protein, 579 aa, Homo sapiens
  Payload ID: 19730
  Gene Name: zinc finger CCCH-type containing 14
  Uniprot ID: Q6PJT7
  ENSP ID: ENSP00000307025
MEIGTEISRKIRSAIKGKLQELGAYVDEELPDYIMVMVANKKSQDQMTEDLSLFLGNNTIRFTVWLHGVLDKLRSVTTEPSSLKSSDTNIFDSNVPSNKSNFSRGDERRHEAAVPPLAIPSARPEKRDSRVSTSSQESKTTNVRQTYDDGAATRLMSTVKPLREPAPSEDVIDIKPEPDDLIDEDLNFVQENPLSQKKPTVTLTYGSSRPSIEIYRPPASRNADSGVHLNRLQFQQQQNSIHAAKQLDMQSSWVYETGRLCEPEVLNSLEETYSPFFRNNSEKMSMEDENFRKRKLPVVSSVVKVKKFNHDGEEEEEDDDYGSRTGSISSSVSVPAKPERRPSLPPSKQANKNLILKAISEAQESVTKTTNYSTVPQKQTLPVAPRTRTSQEELLAEVVQGQSRTPRISPPIKEEETKGDSVEKNQAEMSELSVAQKPEKLLERCKYWPACKNGDECAYHHPISPCKAFPNCKFAEKCLFVHPNCKYDAKCTKPDCPFTHVSRRIPVLSPKPVAPPAPPSSSQLCRYFPACKKMECPFYHPKHCRFNTQCTRPDCTFYHPTINVPPRHALKWIRPQTSE

SEQ ID NO: 98843 - protein, 306 aa, Homo sapiens
  Payload ID: 19730
  Gene Name: zinc finger CCCH-type containing 14
  Uniprot ID: Q6PJT7
  ENSP ID: ENSP00000327176
MRMSSKFPSPPLPIFLPPEPVDLGSITSSSCSLNELDNISHLLRKISADINEIKGMKAAILTVEANLFDLNVRVSKNEAKISSLEVKMNEYSTTYECNRQFEDQEEDTESQSRTTDVKIIGFLRNVEKGTQQRQLLSRLQIDPVMAETLQMSQAEMSELSVAQKPEKLLERCKYWPACKNGDECAYHHPISPCKAFPNCKFAEKCLFVHPNCKYDAKCTKPDCPFTHVSRRIPVLSPKPVAPPAPPSSSQLCRYFPACKKMECPFYHPKHCRFNTQCTRPDCTFYHPTINVPPRHALKWIRPQTSE

SEQ ID NO: 98844 - protein, 571 aa, Homo sapiens
  Payload ID: 19730
  Gene Name: zinc finger CCCH-type containing 14
  Uniprot ID: Q6PJT7
  ENSP ID: ENSP00000338002
MVMVANKKSQDQMTEDLSLFLGNNTIRFTVWLHGVLDKLRSVTTEPSSLKSSDTNIFDSNVPSNKSNFSRGDERRHEAAVPPLAIPSARPEKRDSRVSTSSQESKTTNVRQTYDDGAATRLMSTVKPLREPAPSEDVIDIKPEPDDLIDEDLNFVQENPLSQKKPTVTLTYGSSRPSIEIYRPPASRNADSGVHLNRLQFQQQQNSIHAAKQLDMQSSWVYETGRLCEPEVLNSLEETYSPFFRNNSEKMSMEDENFRKRKLPVVSSVVKVKKFNHDGEEEEEDDDYGSRTGSISSSVSVPAKPERRPSLPPSKQANKNLILKAISEAQESVTKTTNYSTVPQKQTLPVAPRTRTSQEELLAEVVQGQSRTPRISPPIKEEETKGDSVEKNQGTQQRQLLSRLQIDPVMAETLQMSQAEMSELSVAQKPEKLLERCKYWPACKNGDECAYHHPISPCKAFPNCKFAEKCLFVHPNCKYDAKCTKPDCPFTHVSRRIPVLSPKPAVAPPAPPSSSQLCRYFPACKKMECPFYHPKHCRFNTQCTRPDCTFYHPTINVPPRHALKWIRPQTSE

SEQ ID NO: 98845 - protein, 711 aa, Homo sapiens
  Payload ID: 19730
  Gene Name: zinc finger CCCH-type containing 14
  Uniprot ID: Q6PJT7
  ENSP ID: ENSP00000377150
MEIGTEISRKIRSAIKGKLQELGAYVDEELPDYIMVMVANKKSQDQMTEDLSLFLGNNTIRFTVWLHGVLDKLRSVTTEPSSLKSSDTNIFDSNVPSNKSNFSRGDERRHEAAVPPLAIPSARPEKRDSRVSTSSQESKTTNVRQTYDDGAATRLMSTVKPLREPAPSEDVIDIKPEPDDLIDEDLNFVQENPLSQKKPTVTLTYGSSRPSIEIYRPPASRNADSGVHLNRLQFQQQQNSIHAAKQLDMQSSWVYETGRLCEPEVLNSLEETYSPFFRNNSEKMSMEDENFRKRKLPVVSSVVKVKKFNHDGEEEEEDDDYGSRTGSISSSVSVPAKPERRPSLPPSKQANKNLILKAISEAQESVTKTTNYSTVPQKQTLPVAPRTRTSQEELLAEVVQGQSRTPRISPPIKEEETKGDSVEKNQDYYDMESMVHADTRSFILKKPKLSEEVVVAPNQESGMKTADSLRVLSGHLMQTRDLVQPDKPASPKFIVTLDGVPSPPGYMSDQEEDMCFEGMKPVNQTAASNKGLRGLLHPQQLHLLSRQLEDPNGSFSNAEMSELSVAQKPEKLLERCKYWPACKNGDECAYHHPISPCKAFPNCKFAEKCLFVHPNCKYDAKCTKPDCPFTHVSRRIPVLSPKPAVAPPAPPSSSQLCRYFPACKKMECPFYHPKHCRFNTQCTRPDCTFYHPTINVPPRHALKWIRPQTSE

SEQ ID NO: 98846 - protein, 282 aa, Homo sapiens
  Payload ID: 19730
  Gene Name: zinc finger CCCH-type containing 14
  Uniprot ID: Q6PJT7
  ENSP ID: ENSP00000384682
MRMSSKFPSPPLPIFLPPEPVDLGSITSSSCSLNELDNISHLLRKISADINEIKGMKAAILTVEANLFDLNVRVSKNEAKISSLEVKMNEYSTTYECNRQFEDQEEDTESQSRTTDVKIIGFLRNVEKAEMSELSVAQKPEKLLERCKYWPACKNGDECAYHHPISPCKAFPNCKFAEKCLFVHPNCKYDAKCTKPDCPFTHVSRRIPVLSPKPAVAPPAPPSSSQLCRYFPACKKMECPFYHPKHCRFNTQCTRPDCTFYHPTINVPPRHALKWIRPQTSE

SEQ ID NO: 98847 - protein, 94 aa, Homo sapiens
  Payload ID: 19730
  Gene Name: zinc finger CCCH-type containing 14
  ENSP ID: ENSP00000450451
MVMVANKKSQDQMTEDLSLFLGNNTIRFTVWLHGVLDKLRSVTTEPSSLKSSDTNIFDSNVPSNKSNFSRGDERRHEAAVPPLAIPSARPEKRD

SEQ ID NO: 98848 - protein, 605 aa, Homo sapiens
  Payload ID: 19730
  Gene Name: zinc finger CCCH-type containing 14
  ENSP ID: ENSP00000450474
MEIGTEISRKIRSAIKGKLQELGAYVDEELPDYIMVMVANKKSQDQMTEDLSLFLGNNTIRFTVWLHGVLDKLRSVTTEPSSLKSSDTNIFDSNVPSNKSNFSRGDERRHEAAVPPLAIPSARPEKRDSRVSTSSQESKTTNVRQTYDDGAATRLMSTVKPLREPAPSEDVIDIKPEPDDLIDEDLNFVQENPLSQKKPTVTLTYGSSRPSIEIYRPPASRNADSGVHLNRLQFQQQQNSIHAAKQLDMQSSWVYETGRLCEPEVLNSLEETYSPFFRNNSEKMSMEDENFRKRKLPVVSSVVKVKKFNHDGEEEEEDDDYGSRTGSISSSVSVPAKPERRPSLPPSKQANKNLILKAISEAQESVTKTTNYSTVPQKQTLPVAPRTRTSQEELLAEVVQGQSRTPRISPPIKEEETKGDSVEKNQGTQQRQLLSRLQIDPVMAETLQMSQAEMSELSVAQKPEKLLERCKYWPACKNGDECAYHHPISPCKAFPNCKFAEKCLFVHPNCKYDAKCTKPDCPFTHVSRRIPVLSPKPAVAPPAPPSSSQLCRYFPACKKMECPFYHPKHCRFNTQCTRPDCTFYHPTINVPPRHALKWIRPQTSE

SEQ ID NO: 98849 - protein, 151 aa, Homo sapiens
  Payload ID: 19730
  Gene Name: zinc finger CCCH-type containing 14
  ENSP ID: ENSP00000450823
LLERCKYWPACKNGDECAYHHPISPCKAFPNCKFAEKCLFVHPNCKYDAKCTKPDCPFTHVSRRIPVLSPKPDWRSVLVFILLAVAPPAPPSSSQLCRYFPACKKMECPFYHPKHCRFNTQCTRPDCTFYHPTINVPPRHALKWIRPQTSE

SEQ ID NO: 98850 - protein, 64 aa, Homo sapiens
  Payload ID: 19730
  Gene Name: zinc finger CCCH-type containing 14
  ENSP ID: ENSP00000450917
MEIGTEISRKIRSAIKGKLQELGAYVDEELPDYIMVMVANKKSQDQMTEDLSLFLGNNTIRFTV

SEQ ID NO: 98851 - protein, 81 aa, Homo sapiens
  Payload ID: 19730
  Gene Name: zinc finger CCCH-type containing 14
  ENSP ID: ENSP00000451007
DYGSRTGSISSSVSVPAKPERRPSLPPSKQANKNLILKAISEAQESVTKTTNYSTETDTSSCSQNSNFSRRIASRSGPGTK

SEQ ID NO: 98852 - protein, 651 aa, Homo sapiens
  Payload ID: 19730
  Gene Name: zinc finger CCCH-type containing 14
  ENSP ID: ENSP00000451054
  MOD_RES (1)..(1): Any amino acid
XSDTNIFDSNVPSNKSNFSRGDERRHEAAVPPLAIPSARPEKRDSRVSTSSQESKTTNVRQTYDDGAATRLMSTVKPLREPAPSEDVIDIKPEPDDLIDEDLNFVQENPLSQKKPTVTLTYGSSRPSIEIYRPPASRNADSGVHLNRLQFQQQQNSIHAAKQLDMQSSWVYETGRLCEPEVLNSLEETYSPFFRNNSEKMSMEDENFRKRKLPVVSSVVKVKKFNHDGEEEEEDDDYGSRTGSISSSVSVPAKPERRPSLPPSKQANKNLILKAISEAQESVTKTTNYSTVPQKQTLPVAPRTRTSQEELLAEVVQGQSRTPRISPPIKEEETKGDSVEKNQGTQQRQLLSRLQIDPVMAETLQMSQDYYDMESMVHADTRSFILKKPKLSEEVVVAPNQESGMKTADSLRVLSGHLMQTRDLVQPDKPASPKFIVTLDGVPSPPGYMSDQEEDMCFEGMKPVNQTAASNKGLRGLLHPQQLHLLSRQLEDPNGSFSNAEMSELSVAQKPEKLLERCKYWPACKNGDECAYHHPISPCKAFPNCKFAEKCLFVHPNCKYDAKCTKPDCPFTHVSRRIPVLSPKPVAPPAPPSSSQLCRYFPACKKMECPFYHPKHCRFNTQCTRPDCTFYHPTINVPPRHALKWIRPQTSE

SEQ ID NO: 98853 - protein, 209 aa, Homo sapiens
  Payload ID: 19730
  Gene Name: zinc finger CCCH-type containing 14
  ENSP ID: ENSP00000451389
MKRKKLKLSHLVQYEELPDYIMVMVANKKSQDQMTEDLSLFLGNNTIRFTVWLHGVLDKLRSVTTEPSSLKSSDTNIFDSNVPSNKSNFSRGDERRHEAAVPPLAIPSARPEKRDSRVSTSSQESKTTNVRQTYDDGAATRLMSTVKPLREPAPSEDVIDIKPEPDDLIDEDLNFVQENPLSQKKPTVTLTYGSSRPSIEIYRPPASRN

SEQ ID NO: 98854 - protein, 215 aa, Homo sapiens
  Payload ID: 19730
  Gene Name: zinc finger CCCH-type containing 14
  ENSP ID: ENSP00000451489
MVMVANKKSQDQMTEDLSLFLGNNTIRFTVWLHGVLDKLRSVTTEPSSLKSSDTNIFDSNVPSNKSNFSRGDERRHEAAVPPLAIPSARPEKRDSRVSTSSQESKTTNVRQTYDDGAATRLMSTVKPLREPAPSEDVIDIKPEPDDLIDEDLNFVQENPLSQKKPTVTLTYGSSRPSIEIYRPPASRNADSGVHLNRLQFQQQQNSIHAAKQLDM

SEQ ID NO: 98855 - protein, 438 aa, Homo sapiens
  Payload ID: 19730
  Gene Name: zinc finger CCCH-type containing 14
  ENSP ID: ENSP00000451530
MRMSSKFPSPPLPIFLPPEPVDLGSITSSSCSLNELDNISHLLRKISADINEIKGMKAAILTVEANLFDLNVRVSKNEAKISSLEVKMNEYSTTYECNRQFEDQEEDTESQSRTTDVKIIGFLRNVEKGTQQRQLLSRLQIDPVMAETLQMSQDYYDMESMVHADTRSFILKKPKLSEEVVVAPNQESGMKTADSLRVLSGHLMQTRDLVQPDKPASPKFIVTLDGVPSPPGYMSDQEEDMCFEGMKPVNQTAASNKGLRGLLHPQQLHLLSRQLEDPNGSFSNAEMSELSVAQKPEKLLERCKYWPACKNGDECAYHHPISPCKAFPNCKFAEKCLFVHPNCKYDAKCTKPDCPFTHVSRRIPVLSPKPAVAPPAPPSSSQLCRYFPACKKMECPFYHPKHCRFNTQCTRPDCTFYHPTINVPPRHALKWIRPQTSE

SEQ ID NO: 98856 - protein, 72 aa, Homo sapiens
  Payload ID: 19730
  Gene Name: zinc finger CCCH-type containing 14
  ENSP ID: ENSP00000451638
MVMVANKKSQDQMTEDLSLFLGNNTIRFTVWLHGVLDKLRSVTTEPSSLKSSDTNIFDSNVPSNKSNFSRGD

SEQ ID NO: 98857 - protein, 206 aa, Homo sapiens
  Payload ID: 19730
  Gene Name: zinc finger CCCH-type containing 14
  ENSP ID: ENSP00000451941
MRMSSKFPSPPLPIFLPPEPVDLGSITSSSCSLNELDNISHLLRKISADINEIKGMKAAILTVEANLFDLNVRVSKNEAKISSLEVKMNEYSTTYECNRQFEDQEEDTESQSRTTDVKIIGFLRNVEKDYYDMESMVHADTRSFILKKPKLSEEVVVAPNQESGMKTADSLRVLSGHLMQTRDLVQPDKPASPKFIVTLDGVPSPP

SEQ ID NO: 98858 - protein, 132 aa, Homo sapiens
  Payload ID: 19730
  Gene Name: zinc finger CCCH-type containing 14
  ENSP ID: ENSP00000452210
MVMVANKKSQDQMTEDLSLFLGNNTIRFTVWLHGVLDKLRSVTTEPSSLKSSDTNIFDSNVPSNKSNFSRGDERRHEAAVPPLAIPSARPEKRDSRVSTSSQESKTTNVRQTYDDGAATRLMSTVKPLREPA

SEQ ID NO: 98859 - protein, 420 aa, Homo sapiens
  Payload ID: 19730
  Gene Name: zinc finger CCCH-type containing 14
  ENSP ID: ENSP00000452370
MSTVKPLREPAPSEDVIDIKPEPDDLIDEDLNFVQENPLSQKKPTVTLTYGSSRPSIEIYRPPASRNADSGVHLNRLQFQQQQNSIHAAKQLDMQSSWVYETGRLCEPEVLNSLEETYSPFFRNNSEKMSMEDENFRKRKLPVVSSVVKVKKFNHDGEEEEEDDDYGSRTGSISSSVSVPAKPERRPSLPPSKQANKNLILKAISEAQESVTKTTNYSTVPQKQTLPVAPRTRTSQEELLAEVVQGQSRTPRISPPIKEEETKGDSVEKNQAEMSELSVAQKPEKLLERCKYWPACKNGDECAYHHPISPCKAFPNCKFAEKCLFVHPNCKYDAKCTKPDCPFTHVSRRIPVLSPKPAPPSSSQLCRYFPACKKMECPFYHPKHCRFNTQCTRPDCTFYHPTINVPPRHALKWIRPQTSE

SEQ ID NO: 98860 - protein, 730 aa, Homo sapiens
  Payload ID: 19730
  Gene Name: zinc finger CCCH-type containing 14
  Uniprot ID: Q6PJT7
  ENSP ID: ENSP00000452475
MEIGTEISRKIRSAIKGKLQELGAYVDEELPDYIMVMVANKKSQDQMTEDLSLFLGNNTIRFTVWLHGVLDKLRSVTTEPSSLKSSDTNIFDSNVPSNKSNFSRGDERRHEAAVPPLAIPSARPEKRDSRVSTSSQESKTTNVRQTYDDGAATRLMSTVKPLREPAPSEDVIDIKPEPDDLIDEDLNFVQENPLSQKKPTVTLTYGSSRPSIEIYRPPASRNADSGVHLNRLQFQQQQNSIHAAKQLDMQSSWVYETGRLCEPEVLNSLEETYSPFFRNNSEKMSMEDENFRKRKLPVVSSVVKVKKFNHDGEEEEEDDDYGSRTGSISSSVSVPAKPERRPSLPPSKQANKNLILKAISEAQESVTKTTNYSTVPQKQTLPVAPRTRTSQEELLAEVVQGQSRTPRISPPIKEEETKGDSVEKNQGTQQRQLLSRLQIDPVMAETLQMSQDYYDMESMVHADTRSFILKKPKLSEEVVVAPNQESGMKTADSLRVLSGHLMQTRDLVQPDKPASPKFIVTLDGVPSPPGYMSDQEEDMCFEGMKPVNQTAASNKGLRGLLHPQQLHLLSRQLEDPNAEMSELSVAQKPEKLLERCKYWPACKNGDECAYHHPISPCKAFPNCKFAEKCLFVHPNCKYDAKCTKPDCPFTHVSRRIPVLSPKPVAPPAPPSSSQLCRYFPACKKMECPFYHPKHCRFNTQCTRPDCTFYHPTINVPPRHALKWIRPQTSE

SEQ ID NO: 98861 - protein, 148 aa, Homo sapiens
  Payload ID: 19730
  Gene Name: zinc finger CCCH-type containing 14
  ENSP ID: ENSP00000477763
ISSSVSVPAKPERRPSLPPSKQANKNLILKAISEAQESVTKTTNYSTVPQKQTLPVAPRTRTSQEELLAEVVQGQSRTPRISPPIKEEETKGDSVEKNQGDLSFLSGCFQDLLFVFDVLQFHYDVSRRGFPFIFPVWYNVWKHPIYLK

SEQ ID NO: 98862 - protein, 426 aa, Homo sapiens
  Payload ID: 19731
  Gene Name: zinc finger CCCH-type containing 15
  Uniprot ID: Q8WU90
  ENSP ID: ENSP00000338788
MPPKKQAQAGGSKKAEQKKKEKIIEDKTFGLKNKKGAKQQKFIKAVTHQVKFGQQNPRQVAQSEAEKKLKKDDKKKELQELNELFKPVVAAQKISKGADPKSVVCAFFKQGQCTKGDKCKFSHDLTLERKCEKRSVYIDARDEELEKDTMDNWDEKKLEEVVNKKHGEAEKKKPKTQIVCKHFLEAIENNKYGWFWVCPGGGDICMYRHALPPGFVLKKDKKKEEKEDEISLEDLIERERSALGPNVTKITLESFLAWKKRKRQEKIDKLEQDMERRKADFKAGKALVISGREVFEFRPELVNDDDEEADDTRYTQGTGGDEVDDSVSVNDIDLSLYIPRDVDETGITVASLERFSTYTSDKDENKLSEASGGRAENGERSDLEEDNEREGTENGAIDAVPVDENLFTGEDLDELEEELNTLDLEE

SEQ ID NO: 98863 - protein, 74 aa, Homo sapiens
  Payload ID: 19731
  Gene Name: zinc finger CCCH-type containing 15
  ENSP ID: ENSP00000407192
MPPKKQAQAGGSKKAEQKKKEKIIEDKTFGLKNKKGAKQQKFIKAVTHQVKFGQQNPRQDLTYKCLDESSNHIR

SEQ ID NO: 98864 - protein, 105 aa, Homo sapiens
  Payload ID: 19731
  Gene Name: zinc finger CCCH-type containing 15
  ENSP ID: ENSP00000410981
MPPKKQAQAGGSKKAEQKKKEKIIEDKTFGLKNKKGAKQQKFIKAVTHQVKFGQQNPRQVAQSEAEKKLKKDDKKKELQELNELFKPVVAAQKISKGVQAFPGSY

SEQ ID NO: 98865 - protein, 71 aa, Homo sapiens
  Payload ID: 19731
  Gene Name: zinc finger CCCH-type containing 15
  ENSP ID: ENSP00000415788
VDDSVSVNDIDLSLYIPRDVDETGITVASLERFSTYTSDKDEGRHGHGKGFLGYGKPKCICSSEEEDLKTN

SEQ ID NO: 98866 - protein, 953 aa, Homo sapiens
  Payload ID: 19732
  Gene Name: zinc finger CCCH-type containing 18
  Uniprot ID: Q86VM9
  ENSP ID: ENSP00000301011
MDVAESPERDPHSPEDEEQPQGLSDDDILRDSGSDQDLDGAGVRASDLEDEESAARGPSQEEEDNHSDEEDRASEPKSQDQDSEVNELSRGPTSSPCEEEGDEGEEDRTSDLRDEASSVTRELDEHELDYDEEVPEEPAPAVQEDEAEKAGAEDDEEKGEGTPREEGKAGVQSVGEKESLEAAKEKKKEDDDGEIDDGEIDDDDLEEGEVKDPSDRKVRPRPTCRFFMKGNCTWGMNCRFIHPGVNDKGNYSLITKADPFPPNGAPPLGPHPLMPANPWGGPVVDEILPPPPPEPPTESAWERGLRHAKEVLKKATIRKEQEPDFEEKRFTVTIGEDEREFDKENEVFRDWNSRIPRDVRDTVLEPYADPYYDYEIERFWRGGQYENFRVQYTETEPYHNYRERERERERENRQRERERERERDRERERRQRERERERERERDKERQRRKEEWERERAKRDEKDRQHRDRDREKEREKEKGKPKPRSPQPPSRQAEPPKKEAATTGPQVKRADEWKDPWRRSKSPKKKLGVSVSPSRARRRRKTSASSASASNSSRSSSRSSSYSGSGSSRSRSRSSSYSSYSSRSSRHSSFSGSRSRSRSFSSSPSPSPTPSPHRPSIRTKGEPAPPPGKAGEKSVKKPAPPPAPPQATKTTAPVPEPTKPGDPREARRKERPARTPPRRRTLSGSGSGSGSSYSGSSSRSRSLSVSSVSSVSSATSSSSSAHSVDSEDMYADLASPVSSASSRSPAPAQTRKEKGKSKKEDGVKEEKRKRDSSTQPPKSAKPPAGGKSSQQPSTPQQAPPGQPQQGTFVAHKEIKLTLLNKAADKGSRKRYEPSDKDRQSPPPAKRPNTSPDRGSRDRKSGGRLGSPKPERQRGQNSKAPAAPADRKRQLSPQSKSSSKVTSVPGKASDPGAASTKSGKASTLSRREELLKQLKAVEDAIARKRAKIPGKA

SEQ ID NO: 98867 - protein, 977 aa, Homo sapiens
  Payload ID: 19732
  Gene Name: zinc finger CCCH-type containing 18
  ENSP ID: ENSP00000416951
MDVAESPERDPHSPEDEEQPQGLSDDDILRDSGSDQDLDGAGVRASDLEDEESAARGPSQEEEDNHSDEEDRASEPKSQDQDSEVNELSRGPTSSPCEEEGDEGEEDRTSDLRDEASSVTRELDEHELDYDEEVPEEPAPAVQEDEAEKAGAEDDEEKGEGTPREEGKAGVQSVGEKESLEAAKEKKKEDDDGEIDDGEIDDDDLEEGEVKDPSDRKVRPRPTCRFFMKDVVTPLSTLLPPISNSIPFRGQVKGNCTWGMNCRFIHPGVNDKGNYSLITKADPFPPNGAPPLGPHPLMPANPWGGPVVDEILPPPPPEPPTESAWERGLRHAKEVLKKATIRKEQEPDFEEKRFTVTIGEDEREFDKENEVFRDWNSRIPRDVRDTVLEPYADPYYDYEIERFWRGGQYENFRVQYTETEPYHNYRERERERERENRQRERERERERDRERERRQRERERERERERDKERQRRKEEWERERAKRDEKDRQHRDRDREKEREKEKGKPKPRSPQPPSRQAEPPKKEAATTGPQVKRADEWKDPWRRSKSPKKKLGVSVSPSRARRRRKTSASSASASNSSRSSSRSSSYSGSGSSRSRSRSSSYSSYSSRSSRHSSFSGSRSRSRSFSSSPSPSPTPSPHRPSIRTKGEPAPPPGKAGEKSVKKPAPPPAPPQATKTTAPVPEPTKPGDPREARRKERPARTPPRRRTLSGSGSGSGSSYSGSSSRSRSLSVSSVSSVSSATSSSSSAHSVDSEDMYADLASPVSSASSRSPAPAQTRKEKGKSKKEDGVKEEKRKRDSSTQPPKSAKPPAGGKSSQQPSTPQQAPPGQPQQGTFVAHKEIKLTLLNKAADKGSRKRYEPSDKDRQSPPPAKRPNTSPDRGSRDRKSGGRLGSPKPERQRGQNSKAPAAPADRKRQLSPQSKSSSKVTSVPGKASDPGAASTKSGKASTLSRREELLKQLKAVEDAIARKRAKIPGKA

SEQ ID NO: 98868 - protein, 238 aa, Homo sapiens
  Payload ID: 19732
  Gene Name: zinc finger CCCH-type containing 18
  ENSP ID: ENSP00000455083
  MOD_RES (1)..(1): Any amino acid
XGEVKDPSDRKVRPRPTCRFFMKGNCTWGMNCRFIHPGVNDKGNYSLITKADPFPPNGAPPLGPHPLMPANPWGGPVVDEILPPPPPEPPTESAWERGLRHAKEVLKKATIRKEQEPDFEEKRFTVTIGEDEREFDKENEVFRDWNSRIPRDVRDTVRQAEPPKKEAATTGPQVKRADEWKDPWRRSKSPKKKLGVSVSPSRARRRRKTSASSASASNSSRSSSRSSSYSGSGSSRSR

SEQ ID NO: 98869 - protein, 197 aa, Homo sapiens
  Payload ID: 19732
  Gene Name: zinc finger CCCH-type containing 18
  ENSP ID: ENSP00000455260
MDVAESPERDPHSPEDEEQPQGLSDDDILRDSGSDQDLDGAGVRASDLEDEESAARGPSQEEEDNHSDEEDRASEPKSQDQDSEDDDLEEGEVKDPSDRKVRPRPTCRFFMKGNCTWGMNCRFIHPGVNDKGNYSLITKADPFPPNGAPPLGPHPLMPANPWGGPVVDEILPPPPPEPPTESAWERGLRHAKEVLKK

SEQ ID NO: 98870 - protein, 196 aa, Homo sapiens
  Payload ID: 19732
  Gene Name: zinc finger CCCH-type containing 18
  ENSP ID: ENSP00000456241
KSKKEDGVKEEKRKRDSSTQPPKSAKPPAGGKSSQQPSTPQQAPPGQPQQGTFVAHKEIKLTLLNKAADKGSRKRYEPSDKDRQSPPPAKRPNTSPDRGSRDRKSGGRLGSPKPERQRGQNSKAPAAPADRKRQLSPQSKSSSKVTSVPGKASDPGAASTKSGKASTLSRREELLKQLKAVEDAIARKRAKIPGKA

SEQ ID NO: 98871 - protein, 75 aa, Homo sapiens
  Payload ID: 19732
  Gene Name: zinc finger CCCH-type containing 18
  ENSP ID: ENSP00000456334
PPPGKAGEKSVKKPAPPPAPPQATKTTAPVPEPTKPGDPREARRKERPARTPPRRRTLSGSGSGSGSSYSGSLLS

SEQ ID NO: 98872 - protein, 948 aa, Homo sapiens
  Payload ID: 19733
  Gene Name: zinc finger CCCH-type containing 3
  Uniprot ID: Q8IXZ2
  ENSP ID: ENSP00000262577
MEEKEILRRQIRLLQGLIDDYKTLHGNAPAPGTPAASGWQPPTYHSGRAFSARYPRPSRRGYSSHHGPSWRKKYSLVNRPPGPSDPPADHAVRPLHGARGGQPPVPQQHVLERQVQLSQGQNVVIKVKPPSKSGSASASGAQRGSLEEFEETPWSDQRPREGEGEPPRGQLQPSRPTRARGTCSVEDPLLVCQKEPGKPRMVKSVGSVGDSPREPRRTVSESVIAVKASFPSSALPPRTGVALGRKLGSHSVASCAPQLLGDRRVDAGHTDQPVPSGSVGGPARPASGPRQAREASLVVTCRTNKFRKNNYKWVAASSKSPRVARRALSPRVAAENVCKASAGMANKVEKPQLIADPEPKPRKPATSSKPGSAPSKYKWKASSPSASSSSSFRWQSEASSKDHASQLSPVLSRSPSGDRPAVGHSGLKPLSGETPLSAYKVKSRTKIIRRRSSTSLPGDKKSGTSPAATAKSHLSLRRRQALRGKSSPVLKKTPNKGLVQVTTHRLCRLPPSRAHLPTKEASSLHAVRTAPTSKVIKTRYRIVKKTPASPLSAPPFPLSLPSWRARRLSLSRSLVLNRLRPVASGGGKAQPGSPWWRSKGYRCIGGVLYKVSANKLSKTSGQPSDAGSRPLLRTGRLDPAGSCSRSLASRAVQRSLAIIRQARQRREKRKEYCMYYNRFGRCNRGERCPYIHDPEKVAVCTRFVRGTCKKTDGTCPFSHHVSKEKMPVCSYFLKGICSNSNCPYSHVYVSRKAEVCSDFLKGYCPLGAKCKKKHTLLCPDFARRGACPRGAQCQLLHRTQKRHSRRAATSPAPGPSDATARSRVSASHGPRKPSASQRPTRQTPSSAALTAAAVAAPPHCPGGSASPSSSKASSSSSSSSSPPASLDHEAPSLQEAALAAACSNRLCKLPSFISLQSSPSPGAQPRVRAPRAPLTKDSGKPLHIKPRL

SEQ ID NO: 98873 - protein, 79 aa, Homo sapiens
  Payload ID: 19733
  Gene Name: zinc finger CCCH-type containing 3
  ENSP ID: ENSP00000436834
RIVKKTPASPLSAPPFPLSLPSWRARRLSLSRYHCPCKGRMKFAEVTTPFQGAEPDLLCGLRRGCPRAWEWGDVCCESL

SEQ ID NO: 98874 - protein, 520 aa, Homo sapiens
  Payload ID: 19733
  Gene Name: zinc finger CCCH-type containing 3
  ENSP ID: ENSP00000488807
MEEKEILRRQIRLLQGLIDDYKTLHGNAPAPGTPAASGWQPPTYHSGRAFSARYPRPSRRGYSSHHGPSWRKKYSLVNRPPGPSDPPADHAVRPLHGARGGQPPVPQQHVLERQVQLSQGQNVVIKVKPPSKSGSASASGAQRGSLEEFEETPWSDQRPREGEGEPPRGQLQPSRPTRARGTCSVEDPLLVCQKEPGKPRMVKSVGSVGDSPREPRRTVSESVIAVKASFPSSALPPRTGVALGRKLGSHSVASCAPQLLGDRRVDAGHTDQPVPSGSVGGPARPASGPRQAREASLVVTCRTNKFRKNNYKWVAASSKSPRVARRALSPRVAAENVCKASAGMANKVEKPQLIADPEPKPRKPATSSKPGSAPSKYKWKASSPSASSSSSFRWQSEASSKDHASQLSPVLSRSPSGDRPAVGHSGLKPLSGETPLSAYKVKSRTKIIRRRSSTSLPGDKKSGTSPAATAKSHLSLRRRQALRGKSSPVLKKTPNKGLVQVTTHRLCRLPPSRAHLPTKE

SEQ ID NO: 98875 - protein, 1303 aa, Homo sapiens
  Payload ID: 19734
  Gene Name: zinc finger CCCH-type containing 4
  Uniprot ID: Q9UPT8
  ENSP ID: ENSP00000253048
MEAAPGTPPPPPSESPPPPSPPPPSTPSPPPCSPDARPATPHLLHHRLPLPDDREDGELEEGELEDDGAEETQDTSGGPERSRKEKGEKHHSDSDEEKSHRRLKRKRKKEREKEKRRSKKRRKSKHKRHASSSDDFSDFSDDSDFSPSEKGHRKYREYSPPYAPSHQQYPPSHATPLPKKAYSKMDSKSYGMYEDYENEQYGEYEGDEEEDMGKEDYDDFTKELNQYRRAKEGSSRGRGSRGRGRGYRGRGSRGGSRGRGMGRGSRGRGRGSMGGDHPEDEEDFYEEEMDYGESEEPMGDDDYDEYSKELNQYRRSKDSRGRGLSRGRGRGSRGRGKGMGRGRGRGGSRGGMNKGGMNDDEDFYDEDMGDGGGGSYRSRDHDKPHQQSDKKGKVICKYFVEGRCTWGDHCNFSHDIELPKKRELCKFYITGFCARAENCPYMHGDFPCKLYHTTGNCINGDDCMFSHDPLTEETRELLDKMLADDAEAGAEDEKEVEELKKQGINPLPKPPPGVGLLPTPPRPPGPQAPTSPNGRPMQGGPPPPPPPPPPPPGPPQMPMPVHEPLSPQQLQQQDMYNKKIPSLFEIVVRPTGQLAEKLGVRFPGPGGPPGPMGPGPNMGPPGPMGGPMHPDMHPDMHPDMHPDMHADMHADMPMGPGMNPGPPMGPGGPPMMPYGPGDSPHSGMMPPIPPAQNFYENFYQQQEGMEMEPGLLGDAEDYGHYEELPGEPGEHLFPEHPLEPDSFSEGGPPGRPKPGAGVPDFLPSAQRALYLRIQQKQQEEEERARRLAESSKQDRENEEGDTGNWYSSDEDEGGSSVTSILKTLRQQTSSRPPASVGELSSSGLGDPRLQKGHPTGSRLADPRLSRDPRLTRHVEASGGSGPGDSGPSDPRLARALPTSKPEGSLHSSPVGPSSSKGSGPPPTEEEEGERALREKAVNIPLDPLPGHPLRDPRSQLQQFSHIKKDVTLSKPSFARTVLWNPEDLIPLPIPKQDAVPPVPAALQSMPTLDPRLHRAATAGPPNARQRPGASTDSSTQGANLPDFELLSRILKTVNATGSSAAPGSSDKPSDPRVRKAPTDPRLQKPTDSTASSRAAKPGPAEAPSPTASPSGDASPPATAPYDPRVLAAGGLGQGGGGGQSSVLSGISLYDPRTPNAGGKATEPAADTGAQPKGAEGNGKSSASKAKEPPFVRKSALEQPETGKAGADGGTPTDRYNSYNRPRPKAAAAPAATTATPPPEGAPPQPGVHNLPVPTLFGTVKQTPKTGSGSPFAGNSPAREGEQDAASLKDVFKGFDPTASPFCQ

SEQ ID NO: 98876 - protein, 910 aa, Homo sapiens
  Payload ID: 19734
  Gene Name: zinc finger CCCH-type containing 4
  ENSP ID: ENSP00000469684
  MOD_RES (1)..(1): Any amino acid
XNQYRRSKDSRGRGLSRGRGRGSRGRGKGMGRGRGRGGSRGGMNKGGMNDDEDFYDEDMGDGGGGSYRSRDHDKPHQQSDKKGKVICKYFVEGRCTWGDHCNFSHDIELPKKRELCKFYITGFCARAENCPYMHGDFPCKLYHTTGNCINGDDCMFSHDPLTEETRELLDKMLADDAEAGAEDEKEVEELKKQGINPLPKPPPGVGLLPTPPRPPGPQAPTSPNGRPMQGGPPPPPPPPPPPPGPPQMPMPVHEPLSPQQLQQQDMYNKKIPSLFEIVVRPTGQLAEKLGVRFPGPGGPPGPMGPGPNMGPPGPMGGPMHPDMHPDMHPDMHPDMHADMHADMPMGPGMNPGPPMGPGGPPMMPYGPGDSPHSGMMPPIPPAQNFYENFYQQQEGMEMEPGLLGDAGDTGNWYSSDEDEGGSSVTSILKTLRQQTSSRPPASVGELSSSGLGDPRLQKGHPTGSRLADPRLSRDPRLTRHVEASGGSGPGDSGPSDPRLARALPTSKPEGSLHSSPVGPSSSKGSGPPPTEEEEGERALREKAVNIPLDPLPGHPLRDPRSQLQQFSHIKKDVTLSKPSFARTVLWNPEDLIPLPIPKQDAVPPVPAALQSMPTLDPRLHRAATAGPPNARQRPGASTDSSTQGANLPDFELLSRILKTVNATGSSAAPGSSDKPSDPRVRKAPTDPRLQKPTDSTASSRAAKPGPAEAPSPTASPSGDASPPATAPYDPRVLAAGGLGQGGGGGQSSVLSGISLYDPRTPNAGGKATEPAADTGAQPKGAEGNGKSSASKAKEPPFVRKSALEQPETGKAGADGGTPTDRYNSYNRPRPKAAAAPAATTATPPPEGAPPQPGVHNLPVPTLFGTVKQTPKTGSGSPFAGNSPAREGEQDAASLKDVFKGFDPTASPFCQ

SEQ ID NO: 98877 - protein, 1189 aa, Homo sapiens
  Payload ID: 19735
  Gene Name: zinc finger CCCH-type containing 6
  Uniprot ID: P61129
  ENSP ID: ENSP00000340298
MTDSEHAGHDREDGELEDGEIDDAGFEEIQEKEAKENEKQKSEKAYRKSRKKHKKEREKKKSKRRKREKHKHNSPSSDDSSDYSLDSDVEHTESSHKKRTGFYRDYDIPFTQRGHISGSYITSKKGQHNKKFKSKEYDEYSTYSDDNFGNYSDDNFGNYGQETEEDFANQLKQYRQAKETSNIALGSSFSKESGKKQRMKGVQQGIEQRVKSFNVGRGRGLPKKIKRKERGGRTNKGPNVFSVSDDFQEYNKPGKKWKVMTQEFINQHTVEHKGKQICKYFLEGRCIKGDQCKFDHDAELEKRKEICKFYLQGYCTKGENCIYMHNEFPCKFYHSGAKCYQGDNCKFSHDDLTKETKKLLDKVLNTDEELINEDERELEELRKRGITPLPKPPPGVGLLPTPPEHFPFSDPEDDFQTDFSDDFRKIPSLFEIVVKPTVDLAHKIGRKPPAFYTSASPPGPQFQGSSPHPQHIYSSGSSPGPGPNMSQGHSSPVMHPGSPGHHPCAGPPGLPVPQSPPLPPGPPEIVGPQNQAGVLVQPDTSLTPPSMGGAYHSPGFPGHVMKVPRENHCSPGSSYQQSPGEMQLNTNYESLQNPAEFYDNYYAQHSIHNFQPPNNSGDGMWHGEFAQQQPPVVQDSPNHGSGSDGSSTRTGHGPLPVPGLLPAVQRALFVRLTQRYQEDEEQTSTQPHRAPSKEEDDTVNWYSSSEEEEGSSVKSILKTLQKQTETLRNQQQPSTELSTPTDPRLAKEKSKGNQVVDPRLRTIPRQDIRKPSESAPLDLRLAWDPRKLRGNGSGHIGSSVGGAKFDLHHANAGTNVKHKRGDDDDEDTERELREKAFLIPLDASPGIMLQDPRSQLRQFSHIKMDITLTKPNFAKHIVWAPEDLLPVPLPKPDPVSSINLPLPPLIADQRLNRLWNTKSDLHQNTVSIDPKLAAKAKINTTNREGYLEQFGDSHGSGAKLGDPRLQKNFDPRLHRLPNTESHQVVMKDSHASKGAPHLPRSNPGSSQPSGAGTSNSGSGALPPYAPKLSSSAGLPLGTSTSVLSGISLYDPRDHGSSSTSELATASSGENSKNQKKSGGLKSSDKTEPSPGEAILPQKPSPNVGVTLEGPADPQADVPRSSGKVQVPAVHSLPVQALTGLIRPQYSDPRQARQPGQGSPTPDNDPGRETDDKSLKEVFKTFDPTASPFC

SEQ ID NO: 98878 - protein, 1189 aa, Homo sapiens; identical to SEQ ID NO: 98877
  Payload ID: 19735
  Gene Name: zinc finger CCCH-type containing 6
  Uniprot ID: P61129
  ENSP ID: ENSP00000386764

SEQ ID NO: 98879 - protein, 971 aa, Homo sapiens
  Payload ID: 19736
  Gene Name: zinc finger CCCH-type containing 7A
  Uniprot ID: Q8IWR0
  ENSP ID: ENSP00000347999
MSNVSEERRKRQQNIKEGLQFIQSPLSYPGTQEQYAVYLRALVRNLFNEGNDVYREHDWNNSISQYTEALNIADYAKSEEILIPKEIIEKLYINRIACYSNMGFHDKVLEDCNIVLSLNASNCKALYRKSKALSDLGRYKKAYDAVAKCSLAVPQDEHVIKLTQELAQKLGFKIRKAYVRAELSLKSVPGDGATKALNHSVEDIEPDLLTPRQEAVPVVSLPAPSFSHEVGSELASVPVMPLTSILPLQVEESALPSAVLANGGKMPFTMPEAFLDDGDMVLGDELDDLLDSAPETNETVMPSALVRGPLQTASVSPSMPFSASLLGTLPIGARYAPPPSFSEFYPPLTSSLEDFCSSLNSFSMSESKRDLSTSTSREGTPLNNSNSSLLLMNGPGSLFASENFLGISSQPRNDFGNFFGSAVTKPSSSVTPRHPLEGTHELRQACQICFVKSGPKLMDFTYHANIDHKCKKDILIGRIKNVEDKSWKKIRPRPTKTNYEGPYYICKDVAAEEECRYSGHCTFAYCQEEIDVWTLERKGAFSREAFFGGNGKINLTVFKLLQEHLGEFIFLCEKCFDHKPRMISKRNKDNSTACSHPVTKHEFEDNKCLVHILRETTVKYSKIRSFHGQCQLDLCRHEVRYGCLREDECFYAHSLVELKVWIMQNETGISHDAIAQESKRYWQNLEANVPGAQVLGNQIMPGFLNMKIKFVCAQCLRNGQVIEPDKNRKYCSAKARHSWTKDRRAMRVMSIERKKWMNIRPLPTKKQMPLQFDLCNHIASGKKCQYVGNCSFAHSPEEREVWTYMKENGIQDMEQFYELWLKSQKNEKSEDIASQSNKENGKQIHMPTDYAEVTVDFHCWMCGKNCNSEKQWQGHISSEKHKEKVFHTEDDQYCWQHRFPTGYFSICDRYMNGTCPEGNSCKFAHGNAELHEWEERRDALKMKLNKARKDHLIGPNDNDFGKYSFLFKDLN

SEQ ID NO: 98880 - protein, 971 aa, Homo sapiens; identical to SEQ ID NO: 98879
  Payload ID: 19736
  Gene Name: zinc finger CCCH-type containing 7A
  Uniprot ID: Q8IWR0
  ENSP ID: ENSP00000379773

SEQ ID NO: 98881 - protein, 77 aa, Homo sapiens
  Payload ID: 19736
  Gene Name: zinc finger CCCH-type containing 7A
  ENSP ID: ENSP00000459206
MSNVSEERRKRQQNIKEGLQFIQSPLSYPGTQEQYAVYLRALVRNLFNEGNDVYREHDWNNSISQYTEALNIADYAK

SEQ ID NO: 98882 - protein, 92 aa, Homo sapiens
  Payload ID: 19736
  Gene Name: zinc finger CCCH-type containing 7A
  ENSP ID: ENSP00000459458
GDELDDLLDSAPETNETVMPSALVRGPLQTASVSPSMPFSASLLGTLPIGARYAPPPSFSEFYPPLTSSLEDFCSSLNSFSMSESKRDEWTR

SEQ ID NO: 98883 - protein, 167 aa, Homo sapiens
  Payload ID: 19736
  Gene Name: zinc finger CCCH-type containing 7A
  Uniprot ID: Q8IWR0
  ENSP ID: ENSP00000459477
MKENGIQDMEQFYELWLKSQKNEKSEDIASQSNKENGKQIHMPTDYAEVTVDFHCWMCGKNCNSEKQWQGHISSEKHKEKVFHTEDDQYCWQHRFPTGYFSICDRYMNGTCPEGNSCKFAHGNAELHEWEERRDALKMKLNKARKDHLIGPNDNDFGKYSFLFKDLN

SEQ ID NO: 98884 - protein, 733 aa, Homo sapiens
  Payload ID: 19736
  Gene Name: zinc finger CCCH-type containing 7A
  ENSP ID: ENSP00000459747
MSNVSEERRKRQQNIKEGLQFIQSPLSYPGTQEQYAVYLRALVRNLFNEGNDVYREHDWNNSISQYTEALNIADYAKSEEILIPKEIIEKLYINRIACYSNMGFHDKVLEDCNIVLSLNASNCKALYRKSKALSDLGRYKKAYDAVAKCSLAVPQDEHVIKLTQELAQKLGFKIRKAYVRAELSLKSVPGDGATKALNHSVEDIEPDLLTPRQEAVPVVSLPAPSFSHEVGSELASVPVMPLTSILPLQVEESALPSAVLANGGKMPFTMPEAFLDDGDMVLGDELDDLLDSAPETNETVMMNGPGSLFASENFLGISSQPRNDFGNFFGSAVTKPSSSVTPRHPLEGTHELRQACQICFVKSGPKLMDFTYHANIDHKCKKDILIGRIKNVEDKSWKKIRPRPTKTNYEGPYYICKDVAAEEECRYSGHCTFAYCQEEIDVWTLERKGAFSREAFFGGNGKINLTVFKLLQEHLGEFIFLCEKCFDHKPRMISKRNKDNSTACSHPVTKHEFEDNKCLVHILRETTVKYSKIRSFHGQCQLDLCRHEVRYGCLREDECFYAHSLVELKVWIMQNETGISHDAIAQESKRYWQNLEANVPGAQVLGNQIMPGFLNMKIKFVCAQCLRNGQVIEPDKNRKYCSAKARHSWTKDRRAMRVMSIERKKWMNIRPLPTKKQMPLQFDLCNHIASGKKCQYVGNCSFAHSPEEREVWTYMKENGIQDMEQFYELWLKS

SEQ ID NO: 98885 - protein, 225 aa, Homo sapiens
  Payload ID: 19736
  Gene Name: zinc finger CCCH-type containing 7A
  ENSP ID: ENSP00000459811
  MOD_RES (1)..(1): Any amino acid
XNGKINLTVFKLLQEHLGEFIFLCEKCFDHKPRMISKRNKDNSTACSHPVTKHEFEDNKCLVHILRETTVKYSKIRSFHGQCQLDLCRHEVRYGCLREDECFYAHSLVELKVWIMQNETGISHDAIAQESKRYWQNLEANVPGAQVLGNQIMPGFLNMKIKFVCAQCLRNGQVIEPDKNRKYCSAKARHSWTKDRRAMRVMSIEPVQPYCFWEKMSICWKLFLCS

SEQ ID NO: 98886 - protein, 328 aa, Homo sapiens
  Payload ID: 19736
  Gene Name: zinc finger CCCH-type containing 7A
  ENSP ID: ENSP00000460122
IKLTQELAQKLGFKIRKAYVRAEALNHSVEDIEPDLLTPRQEAVPVVSLPAPSFSHEVGSELASVPVMPLTSILPLQVEESALPSAVLANGGKMPFTMPEAFLDDGDMVLGDELDDLLDSAPETNETVMPSALVRGPLQTASVSPSMPFSASLLGTLPIGARYAPPPSFSEFYPPLTSSLEDFCSSLNSFSMSESKRDLSTSTSREGTPLNNSNSSLLLMNGPGSLFASENFLGISSQPRNDFGNFFGSAVTKPSSSVTPRHPLEGTHELRQACQICFVKSGPKLMDFTYHANIDHKCKKDILIGRIKNVEDKSWKKIRPRPTKTNYE

SEQ ID NO: 98887 - protein, 152 aa, Homo sapiens
  Payload ID: 19736
  Gene Name: zinc finger CCCH-type containing 7A
  ENSP ID: ENSP00000460253
MSNVSEERRKRQQNIKEGLQFIQSPLSYPGTQEQYAVYLRALVRNLFNEGNDVYREHDWNNSISQYTEALNIADYAKSEEILIPKEIIEKLYINRIACYSNMGFHDKVLEDCNIVLSLNASNCKALYRKSKALSDLGRYKKAYDAVAKCSLA

SEQ ID NO: 98888 - protein, 70 aa, Homo sapiens
  Payload ID: 19736
  Gene Name: zinc finger CCCH-type containing 7A
  ENSP ID: ENSP00000460422
MSNVSEERRKRQQNIKEGLQFIQSPLSYPGTQEQYAVYLRALVRNLFNEGNDVYREHDWNNSISQYTEAL

SEQ ID NO: 98889 - protein, 60 aa, Homo sapiens
  Payload ID: 19736
  Gene Name: zinc finger CCCH-type containing 7A
  ENSP ID: ENSP00000460679
MSNVSEERRKRQQNIKEGLQFIQSPLSYPGTQEQYAVYLRALVRNLFNEGNDVYREHDWN

SEQ ID NO: 98890 - protein, 977 aa, Homo sapiens
  Payload ID: 19737
  Gene Name: zinc finger CCCH-type containing 7B
  Uniprot ID: Q9UGR2
  ENSP ID: ENSP00000345793
MERQKRKADIEKGLQFIQSTLPLKQEEYEAFLLKLVQNLFAEGNDLFREKDYKQALVQYMEGLNVADYAASDQVALPRELLCKLHVNRAACYFTMGLYEKALEDSEKALGLDSESIRALFRKARALNELGRHKEAYECSSRCSLALPHDESVTQLGQELAQKLGLRVRKAYKRPQELETFSLLSNGTAAGVADQGTSNGLGSIDDIETDCYVDPRGSPALLPSTPTMPLFPHVLDLLAPLDSSRTLPSTDSLDDFSDGDVFGPELDTLLDSLSLVQGGLSGSGVPSELPQLIPVFPGGTPLLPPVVGGSIPVSSPLPPASFGLVMDPSKKLAASVLDALDPPGPTLDPLDLLPYSETRLDALDSFGSTRGSLDKPDSFMEETNSQDHRPPSGAQKPAPSPEPCMPNTALLIKNPLAATHEFKQACQLCYPKTGPRAGDYTYREGLEHKCKRDILLGRLRSSEDQTWKRIRPRPTKTSFVGSYYLCKDMINKQDCKYGDNCTFAYHQEEIDVWTEERKGTLNRDLLFDPLGGVKRGSLTIAKLLKEHQGIFTFLCEICFDSKPRIISKGTKDSPSVCSNLAAKHSFYNNKCLVHIVRSTSLKYSKIRQFQEHFQFDVCRHEVRYGCLREDSCHFAHSFIELKVWLLQQYSGMTHEDIVQESKKYWQQMEAHAGKASSSMGAPRTHGPSTFDLQMKFVCGQCWRNGQVVEPDKDLKYCSAKARHCWTKERRVLLVMSKAKRKWVSVRPLPSIRNFPQQYDLCIHAQNGRKCQYVGNCSFAHSPEERDMWTFMKENKILDMQQTYDMWLKKHNPGKPGEGTPISSREGEKQIQMPTDYADIMMGYHCWLCGKNSNSKKQWQQHIQSEKHKEKVFTSDSDASGWAFRFPMGEFRLCDRLQKGKACPDGDKCRCAHGQEELNEWLDRREVLKQKLAKARKDMLLCPRDDDFGKYNFLLQEDGDLAGATPEAPAAAATATTGE

SEQ ID NO: 98891 - protein, 291 aa, Homo sapiens [sequence omitted]

SEQ ID NO: 98892 - protein, 291 aa, Homo sapiens [sequence omitted]

SEQ ID NO: 98893 - protein, 297 aa, Homo sapiens
  Payload ID: 19738
  Gene Name: zinc finger CCCH-type containing 8
  ENSP ID: ENSP00000483976
MDFENLFSKPPNPALGKTATDSDERIDDEIDTEVEETQEEKIKLECEQIPKKFRHSAISPKSSLHRKSRSKDYDVYSDNDICSQESEDNFAKELQQYIQAREMANAAQPEESTKKEGVKDTPQAAKQKNKNLKAGHKNGKQKKMKRKWPGPGNKGSNALLRNSGSQEEDGKPKEKQQHLSQAFINQHTVERKGKQICKYFLERKCIKGDQCKFDHDAEIEKKKEMCKFYVQGYCTRGENCLYLHNEYPCKFYHTGTKCYQGEYCKFSHAPLTPETQELLAKVLDTEKKSCNKIDIKR

SEQ ID NO: 98894 - protein, 902 aa, Homo sapiens
  Payload ID: 19739
  Gene Name: zinc finger CCCH-type, antiviral 1
  Uniprot ID: Q7Z2W4
  ENSP ID: ENSP00000242351
MADPEVCCFITKILCAHGGRMALDALLQEIALSEPQLCEVLQVAGPDRFVVLETGGEAGITRSVVATTRARVCRRKYCQRPCDNLHLCKLNLLGRCNYSQSERNLCKYSHEVLSEENFKVLKNHELSGLNKEELAVLLLQSDPFFMPEICKSYKGEGRQQICNQQPPCSRLHICDHFTRGNCRFPNCLRSHNLMDRKVLAIMREHGLNPDVVQNIQDICNSKHMQKNPPGPRAPSSHRRNMAYRARSKSRDRFFQGSQEFLASASASAERSCTPSPDQISHRASLEDAPVDDLTRKFTYLGSQDRARPPSGSSKATDLGGTSQAGTSQRFLENGSQEDLLHGNPGSTYLASNSTSAPNWKSLTSWTNDQGARRKTVFSPTLPAARSSLGSLQTPEAVTTRKGTGLLSSDYRIINGKSGTQDIQPGPLFNNNADGVATDITSTRSLNYKSTSSGHREISSPRIQDAGPASRDVQATGRIADDADPRVALVNDSLSDVTSTTSSRVDDHDSEEICLDHLCKGCPLNGSCSKVHFHLPYRWQMLIGKTWTDFEHMETIEKGYCNPGIHLCSVGSYTINFRVMSCDSFPIRRLSTPSSVTKPANSVFTTKWIWYWKNESGTWIQYGEEKDKRKNSNVDSSYLESLYQSCPRGVVPFQAGSRNYELSFQGMIQTNIASKTQKDVIRRPTFVPQWYVQQMKRGPDHQPAKTSSVSLTATFRPQEDFCFLSSKKYKLSEIHHLHPEYVRVSEHFKASMKNFKIEKIKKIENSELLDKFTWKKSQMKEEGKLLFYATSRAYVESICSNNFDSFLHETHENKYGKGIYFAKDAIYSHKNCPYDAKNVVMFVAQVLVGKFTEGNITYTSPPPQFDSCVDTRSNPSVFVIFQKDQVYPQYVIEYTEDKACVIS

SEQ ID NO: 98895 - protein, 1024 aa, Homo sapiens
  Payload ID: 19739
  Gene Name: zinc finger CCCH-type, antiviral 1
  ENSP ID: ENSP00000418385
MADPEVCCFITKILCAHGGRMALDALLQEIALSEPQLCEVLQVAGPDRFVVLETGGEAGITRSVVATTRARVCRRKYCQRPCDNLHLCKLNLLGRCNYSQSERNLCKYSHEVLSEENFKVLKNHELSGLNKEELAVLLLQSDPFFMPEICKSYKGEGRQQICNQQPPCSRLHICDHFTRGNCRFPNCLRSHNLMDRKVLAIMREHGLNPDVVQNIQDICNSKHMQKNPPGPRAPSSHRRNMAYRARSKSRDRFFQGSQEFLASASASAERSCTPSPDQISHRASLEDAPVDDLTRKFTYLGSQDRARPPSGSSKATDLGGTSQAGTSQRFLENGSQEDLLHGNPGSTYLASNSTSAPNWKSLTSWTNDQGARRKTVFSPTLPAARSSLGSLQTPEAVTTRKGTGLLSSDYRIINGKSGTQDIQPGPLFNNNADGVATDITSTRSLNYKSTSSGHREISSPRIQDAGPASRDVQATGRIADDADPRVALVNGKYKGKTLWASTFVHDIPNGSSQVVDKTTDVEKTGATGFGLTMAVKAEKDMLRTGSQSLRNLVPTTPGESTAPAQVSTLPQSPAALSSSNRAAVWGAQGQNCTQVPVSSASELTRKTTGSAQYSLSDVTSTTSSRVDDHDSEEICLDHLCKGCPLNGSCSKVHFHLPYRWQMLIGKTWTDFEHMETIEKGYCNPGIHLCSVGSYTINFRVMSCDSFPIRRLSTPSSVTKPANSVFTTKWIWYWKNESGTWIQYGEEKDKRKNSNVDSSYLESLYQSCPRGVVPFQAGSRNYELSFQGMIQTNIASKTQKDVIRRPTFVPQWYVQQMKRGPDHQPAKTSSVSLTATFRPQEDFCFLSSKKYKLSEIHHLHPEYVRVSEHFKASMKNFKIEKIKKIENSELLDKFTWKKSQMKEEGKLLFYATSRAYVESICSNNFDSFLHETHENKYGKGIYFAKDAIYSHKNCPYDAKNVVMFVAQVLVGKFTEGNITYTSPPPQFDSCVDTRSNPSVFVIFQKDQVYPQYVIEYTEDKACVIS

SEQ ID NO: 98896 - protein, 699 aa, Homo sapiens
  Payload ID: 19739
  Gene Name: zinc finger CCCH-type, antiviral 1
  Uniprot ID: Q7Z2W4
  ENSP ID: ENSP00000419855
MADPEVCCFITKILCAHGGRMALDALLQEIALSEPQLCEVLQVAGPDRFVVLETGGEAGITRSVVATTRARVCRRKYCQRPCDNLHLCKLNLLGRCNYSQSERNLCKYSHEVLSEENFKVLKNHELSGLNKEELAVLLLQSDPFFMPEICKSYKGEGRQQICNQQPPCSRLHICDHFTRGNCRFPNCLRSHNLMDRKVLAIMREHGLNPDVVQNIQDICNSKHMQKNPPGPRAPSSHRRNMAYRARSKSRDRFFQGSQEFLASASASAERSCTPSPDQISHRASLEDAPVDDLTRKFTYLGSQDRARPPSGSSKATDLGGTSQAGTSQRFLENGSQEDLLHGNPGSTYLASNSTSAPNWKSLTSWTNDQGARRKTVFSPTLPAARSSLGSLQTPEAVTTRKGTGLLSSDYRIINGKSGTQDIQPGPLFNNNADGVATDITSTRSLNYKSTSSGHREISSPRIQDAGPASRDVQATGRIADDADPRVALVNDSLSDVTSTTSSRVDDHDSEEICLDHLCKGCPLNGSCSKVHFHLPYRWQMLIGKTWTDFEHMETIEKGYCNPGIHLCSVGSYTINFRVMSCDSFPIRRLSTPSSVTKPANSVFTTKWIWYWKNESGTWIQYGEEKDKRKNSNVDSSYLESLYQSCPRGVVPFQAGSRNYELSFQGMIQTNIASKTQKDVIRRPTFVPQWYVQQMKRGPE

SEQ ID NO: 98897 - protein, 264 aa, Homo sapiens
  Payload ID: 19739
  Gene Name: zinc finger CCCH-type, antiviral 1
  ENSP ID: ENSP00000420107
  MOD_RES (1)..(1): Any amino acid
XESTAPAQVSTLPQSPAALSSSNRAAVWGAQGQNCTQVPVSSASELTRKTTGSAQYSLSDVTSTTSSRVDDHDSEEICLDHLCKGCPLNGSCSKVHFHLPYRWQMLIGKTWTDFEHMETIEKGYCNPGIHLCSVGSYTINFRVMSCDSFPIRRLSTPSSVTKPANSVFTTKWIWYWKNESGTWIQYGEEKDKRKNSNVDSSYLESLYQSCPRGVVPFQAGSRNYELSFQGMIQTNIASKTQKDVIRRPTFVPQWYVQQMKRGPE

SEQ ID NO: 98898 - protein, 300 aa, Homo sapiens
  Payload ID: 19740
  Gene Name: zinc finger CCCH-type, antiviral 1-like
  Uniprot ID: Q96H79
  ENSP ID: ENSP00000275766
MAEPTVCSFLTKVLCAHGGRMFLKDLRGHVELSEARLRDVLQRAGPERFLLQEVETQEGLGDAEAEAAAGAVGGGGTSAWRVVAVSSVRLCARYQRGECQACDQLHFCRRHMLGKCPNRDCWSTCTLSHDIHTPVNMQVLKSHGLFGLNENQLRILLLQNDPCLLPEVCLLYNKGEALYGYCNLKDKCNKFHVCKSFVKGECKLQTCKRSHQLIHAASLKLLQDQGLNIPSVVNFQIISTYKHMKLHKMLENTDNSSPSTEHSQGLEKQGVHAAGAAEAGPLASVPAQSAKKPCPVSCEK

SEQ ID NO: 98899 - protein, 217 aa, Homo sapiens
  Payload ID: 19741
  Gene Name: zinc finger CCHC-type and RNA binding motif 1
  Uniprot ID: Q8TBF4
  ENSP ID: ENSP00000266529
MSGGLAPSKSTVYVSNLPFSLTNNDLYRIFSKYGKVVKVTIMKDKDTRKSKGVAFILFLDKDSAQNCTRAINNKQLFGRVIKASIAIDNGRAAEFIRRRNYFDKSKCYECGESGHLSYACPKNMLGEREPPKKKEKKKKKKAPEPEEEIEEVEESEDEGEDPALDSLSQAIAFQQAKIEEEQKKWKPSSGVPSTSDDSRRPRIKKSTYFSDEEELSD

SEQ ID NO: 98900 - protein, 176 aa, Homo sapiens
  Payload ID: 19741
  Gene Name: zinc finger CCHC-type and RNA binding motif 1
  ENSP ID: ENSP00000446732
MKDKDTRKSKGVAFILFLDKDSAQNCTRAINNKQLFGRVIKASIAIDNGRAAEFIRRRNYFDKSKCYECGESGHLSYACPKNMLGEREPPKKKEKKKKKKAPEPEEEIEEVEESEDEGEDPALDSLSQAIAFQQAKIEEEQKKWKPSSGVPSTSDDSRRPRIKKSTYFSDEEELSD

SEQ ID NO: 98901 - protein, 133 aa, Homo sapiens
  Payload ID: 19741
  Gene Name: zinc finger CCHC-type and RNA binding motif 1
  ENSP ID: ENSP00000448780
MKDKDTRKSKGVAFILFLDKDSAQNCTRAINNKQLFGRVIKASIAIDNGRAAEFIRRRNYFDKSKCYECGESGHLSYACPKNMLGEREPPKKKEKKKKKKAPEPEEEIEEVEESEDEGEDPALDSLSQAIAFQ

SEQ ID NO: 98902 - protein, 1124 aa, Homo sapiens
  Payload ID: 19742
  Gene Name: zinc finger E-box binding homeobox 1
  Uniprot ID: P37275
  ENSP ID: ENSP00000319248
MADGPRCKRRKQANPRRNNVTNYNTVVETNSDSDDEDKLHIVEEESVTDAADCEGVPEDDLPTDQTVLPGRSSEREGNAKNCWEDDRKEGQEILGPEAQADEAGCTVKDDECESDAENEQNHDPNVEEFLQQQDTAVIFPEAPEEDQRQGTPEASGHDENGTPDAFSQLLTCPYCDRGYKRFTSLKEHIKYRHEKNEDNFSCSLCSYTFAYRTQLERHMTSHKSGRDQRHVTQSGCNRKFKCTECGKAFKYKHHLKEHLRIHSGEKPYECPNCKKRFSHSGSYSSHISSKKCISLIPVNGRPRTGLKTSQCSSPSLSASPGSPTRPQIRQKIENKPLQEQLSVNQIKTEPVDYEFKPIVVASGINCSTPLQNGVFTGGGPLQATSSPQGMVQAVVLPTVGLVSPISINLSDIQNVLKVAVDGNVIRQVLENNQANLASKEQETINASPIQQGGHSVISAISLPLVDQDGTTKIIINYSLEQPSQLQVVPQNLKKENPVATNSCKSEKLPEDLTVKSEKDKSFEGGVNDSTCLLCDDCPGDINALPELKHYDLKQPTQPPPLPAAEAEKPESSVSSATGDGNLSPSQPPLKNLLSLLKAYYALNAQPSAEELSKIADSVNLPLDVVKKWFEKMQAGQISVQSSEPSSPEPGKVNIPAKNNDQPQSANANEPQDSTVNLQSPLKMTNSPVLPVGSTTNGSRSSTPSPSPLNLSSSRNTQGYLYTAEGAQEEPQVEPLDLSLPKQQGELLERSTITSVYQNSVYSVQEEPLNLSCAKKEPQKDSCVTDSEPVVNVIPPSANPINIAIPTVTAQLPTIVAIADQNSVPCLRALAANKQTILIPQVAYTYSTTVSPAVQEPPLKVIQPNGNQDERQDTSSEGVSNVEDQNDSDSTPPKKKMRKTENGMYACDLCDKIFQKSSSLLRHKYEHTGKRPHECGICKKAFKHKHHLIEHMRLHSGEKPYQCDKCGKRFSHSGSYSQHMNHRYSYCKREAEERDSTEQEEAGPEILSNEHVGARASPSQGDSDERESLTREEDEDSEKEEEEEDKEMEELQEEKECEKPQGDEEEEEEEEEVEEEEVEEAENEGEEAKTEGLMKDDRAESQASSLGQKVGESSEQVSEEKTNEA

SEQ ID NO: 98903 - protein, 1125 aa, Homo sapiens
  Payload ID: 19742
  Gene Name: zinc finger E-box binding homeobox 1
  Uniprot ID: P37275
  ENSP ID: ENSP00000354487
MADGPRCKRRKQANPRRNNVTNYNTVVETNSDSDDEDKLHIVEEESVTDAADCEGVPEDDLPTDQTVLPGRSSEREGNAKNCWEDDTGKEGQEILGPEAQADEAGCTVKDDECESDAENEQNHDPNVEEFLQQQDTAVIFPEAPEEDQRQGTPEASGHDENGTPDAFSQLLTCPYCDRGYKRFTSLKEHIKYRHEKNEDNFSCSLCSYTFAYRTQLERHMTSHKSGRDQRHVTQSGCNRKFKCTECGKAFKYKHHLKEHLRIHSGEKPYECPNCKKRFSHSGSYSSHISSKKCISLIPVNGRPRTGLKTSQCSSPSLSASPGSPTRPQIRQKIENKPLQEQLSVNQIKTEPVDYEFKPIVVASGINCSTPLQNGVFTGGGPLQATSSPQGMVQAVVLPTVGLVSPISINLSDIQNVLKVAVDGNVIRQVLENNQANLASKEQETINASPIQQGGHSVISAISLPLVDQDGTTKIIINYSLEQPSQLQVVPQNLKKENPVATNSCKSEKLPEDLTVKSEKDKSFEGGVNDSTCLLCDDCPGDINALPELKHYDLKQPTQPPPLPAAEAEKPESSVSSATGDGNLSPSQPPLKNLLSLLKAYYALNAQPSAEELSKIADSVNLPLDVVKKWFEKMQAGQISVQSSEPSSPEPGKVNIPAKNNDQPQSANANEPQDSTVNLQSPLKMTNSPVLPVGSTTNGSRSSTPSPSPLNLSSSRNTQGYLYTAEGAQEEPQVEPLDLSLPKQQGELLERSTITSVYQNSVYSVQEEPLNLSCAKKEPQKDSCVTDSEPVVNVIPPSANPINIAIPTVTAQLPTIVAIADQNSVPCLRALAANKQTILIPQVAYTYSTTVSPAVQEPPLKVIQPNGNQDERQDTSSEGVSNVEDQNDSDSTPPKKKMRKTENGMYACDLCDKIFQKSSSLLRHKYEHTGKRPHECGICKKAFKHKHHLIEHMRLHSGEKPYQCDKCGKRFSHSGSYSQHMNHRYSYCKREAEERDSTEQEEAGPEILSNEHVGARASPSQGDSDERESLTREEDEDSEKEEEEEDKEMEELQEEKECEKPQGDEEEEEEEEEVEEEEVEEAENEGEEAKTEGLMKDDRAESQASSLGQKVGESSEQVSEEKTNEA

SEQ ID NO: 98904 - protein, 1108 aa, Homo sapiens
  Payload ID: 19742
  Gene Name: zinc finger E-box binding homeobox 1
  Uniprot ID: P37275
  ENSP ID: ENSP00000391612
MKVTNYNTVVETNSDSDDEDKLHIVEEESVTDAADCEGVPEDDLPTDQTVLPGRSSEREGNAKNCWEDDTGKEGQEILGPEAQADEAGCTVKDDECESDAENEQNHDPNVEEFLQQQDTAVIFPEAPEEDQRQGTPEASGHDENGTPDAFSQLLTCPYCDRGYKRFTSLKEHIKYRHEKNEDNFSCSLCSYTFAYRTQLERHMTSHKSGRDQRHVTQSGCNRKFKCTECGKAFKYKHHLKEHLRIHSGEKPYECPNCKKRFSHSGSYSSHISSKKCISLIPVNGRPRTGLKTSQCSSPSLSASPGSPTRPQIRQKIENKPLQEQLSVNQIKTEPVDYEFKPIVVASGINCSTPLQNGVFTGGGPLQATSSPQGMVQAVVLPTVGLVSPISINLSDIQNVLKVAVDGNVIRQVLENNQANLASKEQETINASPIQQGGHSVISAISLPLVDQDGTTKIIINYSLEQPSQLQVVPQNLKKENPVATNSCKSEKLPEDLTVKSEKDKSFEGGVNDSTCLLCDDCPGDINALPELKHYDLKQPTQPPPLPAAEAEKPESSVSSATGDGNLSPSQPPLKNLLSLLKAYYALNAQPSAEELSKIADSVNLPLDVVKKWFEKMQAGQISVQSSEPSSPEPGKVNIPAKNNDQPQSANANEPQDSTVNLQSPLKMTNSPVLPVGSTTNGSRSSTPSPSPLNLSSSRNTQGYLYTAEGAQEEPQVEPLDLSLPKQQGELLERSTITSVYQNSVYSVQEEPLNLSCAKKEPQKDSCVTDSEPVVNVIPPSANPINIAIPTVTAQLPTIVAIADQNSVPCLRALAANKQTILIPQVAYTYSTTVSPAVQEPPLKVIQPNGNQDERQDTSSEGVSNVEDQNDSDSTPPKKKMRKTENGMYACDLCDKIFQKSSSLLRHKYEHTGKRPHECGICKKAFKHKHHLIEHMRLHSGEKPYQCDKCGKRFSHSGSYSQHMNHRYSYCKREAEERDSTEQEEAGPEILSNEHVGARASPSQGDSDERESLTREEDEDSEKEEEEEDKEMEELQEEKECEKPQGDEEEEEEEEEVEEEEVEEAENEGEEAKTEGLMKDDRAESQASSLGQKVGESSEQVSEEKTNEA

SEQ ID NO: 98905 - protein, 53 aa, Homo sapiens
  Payload ID: 19742
  Gene Name: zinc finger E-box binding homeobox 1
  ENSP ID: ENSP00000405958
MADGPRCKRRKQANPRRNNVFSLNSQLAIGRKLPSEDMIIQMSFCDLATVCLT

SEQ ID NO: 98906 - protein, 289 aa, Homo sapiens
  Payload ID: 19742
  Gene Name: zinc finger E-box binding homeobox 1
  ENSP ID: ENSP00000415961
MADGPRCKRRKQANPRRNNVTNYNTVVETNSDSDDEDKLHIVEEESVTDAADCEGVPEDDLPTDQTVLPGRSSEREGNAKNCWEDDTGKEGQEILGPEAQADEAGCTVKDDECESDAENEQNHDPNVEEFLQQQDTAVIFPEAPEEDQRQGTPEASGHDENGTPDAFSQLLTCPYCDRGYKRFTSLKEHIKYRHEKNEDNFSCSLCSYTFAYRTQLERHMTSHKSGRDQRHVTQSGCNRKFKCTECGKAFKYKHHLKEHLRIHSGEKPYECPNCKKRFSHSGSYSSHIS

SEQ ID NO: 98907 - protein, 1057 aa, Homo sapiens
  Payload ID: 19742
  Gene Name: zinc finger E-box binding homeobox 1
  Uniprot ID: P37275
  ENSP ID: ENSP00000444891
MADGPRCKRRKQANPRRNNGKEGQEILGPEAQADEAGCTVKDDECESDAENEQNHDPNVEEFLQQQDTAVIFPEAPEEDQRQGTPEASGHDENGTPDAFSQLLTCPYCDRGYKRFTSLKEHIKYRHEKNEDNFSCSLCSYTFAYRTQLERHMTSHKSGRDQRHVTQSGCNRKFKCTECGKAFKYKHHLKEHLRIHSGEKPYECPNCKKRFSHSGSYSSHISSKKCISLIPVNGRPRTGLKTSQCSSPSLSASPGSPTRPQIRQKIENKPLQEQLSVNQIKTEPVDYEFKPIVVASGINCSTPLQNGVFTGGGPLQATSSPQGMVQAVVLPTVGLVSPISINLSDIQNVLKVAVDGNVIRQVLENNQANLASKEQETINASPIQQGGHSVISAISLPLVDQDGTTKIIINYSLEQPSQLQVVPQNLKKENPVATNSCKSEKLPEDLTVKSEKDKSFEGGVNDSTCLLCDDCPGDINALPELKHYDLKQPTQPPPLPAAEAEKPESSVSSATGDGNLSPSQPPLKNLLSLLKAYYALNAQPSAEELSKIADSVNLPLDVVKKWFEKMQAGQISVQSSEPSSPEPGKVNIPAKNNDQPQSANANEPQDSTVNLQSPLKMTNSPVLPVGSTTNGSRSSTPSPSPLNLSSSRNTQGYLYTAEGAQEEPQVEPLDLSLPKQQGELLERSTITSVYQNSVYSVQEEPLNLSCAKKEPQKDSCVTDSEPVVNVIPPSANPINIAIPTVTAQLPTIVAIADQNSVPCLRALAANKQTILIPQVAYTYSTTVSPAVQEPPLKVIQPNGNQDERQDTSSEGVSNVEDQNDSDSTPPKKKMRKTENGMYACDLCDKIFQKSSSLLRHKYEHTGKRPHECGICKKAFKHKHHLIEHMRLHSGEKPYQCDKCGKRFSHSGSYSQHMNHRYSYCKREAEERDSTEQEEAGPEILSNEHVGARASPSQGDSDERESLTREEDEDSEKEEEEEDKEMEELQEEKECEKPQGDEEEEEEEEEVEEEEVEEAENEGEEAKTEGLMKDDRAESQASSLGQKVGESSEQVSEEKTNEA

SEQ ID NO: 98908 - protein, 1104 aa, Homo sapiens
  Payload ID: 19742
  Gene Name: zinc finger E-box binding homeobox 1
  Uniprot ID: P37275
  ENSP ID: ENSP00000452787
MADGPRCKRRKQANPRRNNVTNYNTVVETNSDSDDEDKLHIVEEESVTDAADCEGVPEDDLPTDQTVLPGRSSEREGNAKNCWEDDIKDDECESDAENEQNHDPNVEEFLQQQDTAVIFPEAPEEDQRQGTPEASGHDENGTPDAFSQLLTCPYCDRGYKRFTSLKEHIKYRHEKNEDNFSCSLCSYTFAYRTQLERHMTSHKSGRDQRHVTQSGCNRKFKCTECGKAFKYKHHLKEHLRIHSGEKPYECPNCKKRFSHSGSYSSHISSKKCISLIPVNGRPRTGLKTSQCSSPSLSASPGSPTRPQIRQKIENKPLQEQLSVNQIKTEPVDYEFKPIVVASGINCSTPLQNGVFTGGGPLQATSSPQGMVQAVVLPTVGLVSPISINLSDIQNVLKVAVDGNVIRQVLENNQANLASKEQETINASPIQQGGHSVISAISLPLVDQDGTTKIIINYSLEQPSQLQVVPQNLKKENPVATNSCKSEKLPEDLTVKSEKDKSFEGGVNDSTCLLCDDCPGDINALPELKHYDLKQPTQPPPLPAAEAEKPESSVSSATGDGNLSPSQPPLKNLLSLLKAYYALNAQPSAEELSKIADSVNLPLDVVKKWFEKMQAGQISVQSSEPSSPEPGKVNIPAKNNDQPQSANANEPQDSTVNLQSPLKMTNSPVLPVGSTTNGSRSSTPSPSPLNLSSSRNTQGYLYTAEGAQEEPQVEPLDLSLPKQQGELLERSTITSVYQNSVYSVQEEPLNLSCAKKEPQKDSCVTDSEPVVNVIPPSANPINIAIPTVTAQLPTIVAIADQNSVPCLRALAANKQTILIPQVAYTYSTTVSPAVQEPPLKVIQPNGNQDERQDTSSEGVSNVEDQNDSDSTPPKKKMRKTENGMYACDLCDKIFQKSSSLLRHKYEHTGKRPHECGICKKAFKHKHHLIEHMRLHSGEKPYQCDKCGKRFSHSGSYSQHMNHRYSYCKREAEERDSTEQEEAGPEILSNEHVGARASPSQGDSDERESLTREEDEDSEKEEEEEDKEMEELQEEKECEKPQGDEEEEEEEEEVEEEEVEEAENEGEEAKTEGLMKDDRAESQASSLGQKVGESSEQVSEEKTNEA

SEQ ID NO: 98909 - protein, 274 aa, Homo sapiens
  Payload ID: 19742
  Gene Name: zinc finger E-box binding homeobox 1
  ENSP ID: ENSP00000453559
MTSHKSGRDQRHVTQSGCNRKFKCTECGKAFKYKHHLKEHLRIHSGEKPYECPNCKKRFSHSGSYSSHISSKKCISLIPVNGRPRTGLKTSQCSSPSLSASPGSPTRPQIRQKIENKPLQEQLSVNQIKTEPVDYEFKPIVVASGINCSTPLQNGVFTGGGPLQATSSPQGMVQAVVLPTVGLVSPISINLSDIQNVLKVAVDGNVIRQVLENNQANLASKEQETINASPIQQGGHSVISAISLPLVDQDGTTKIIINYSLEQPSQLQVVPQNL

SEQ ID NO: 98910 - protein, 277 aa, Homo sapiens
  Payload ID: 19742
  Gene Name: zinc finger E-box binding homeobox 1
  ENSP ID: ENSP00000453674
MKVTNYNTVVETNSDSDDEDKLHIVEEESVTDAADCEGVPEDDLPTDQTVLPGRSSEREGNAKNCWEDDTGKEGQEILGPEAQADEAGCTVKDDECESDAENEQNHDPNVEEFLQQQDTAVIFPEAPEEDQRQGTPEASGHDENGTPDAFSQLLTCPYCDRGYKRFTSLKEHIKYRHEKNEDNFSCSLCSYTFAYRTQLERHMTSHKSGRDQRHVTQSGCNRKFKCTECGKAFKYKHHLKEHLRIHSGEKPYECPNCKKRFSHSGSYSSHISSKKCI

SEQ ID NO: 98911 - protein, 288 aa, Homo sapiens
  Payload ID: 19742
  Gene Name: zinc finger E-box binding homeobox 1
  ENSP ID: ENSP00000453970
MADGPRCKRRKQANPRRNNVTNYNTVVETNSDSDDEDKLHIVEEESVTDAADCEGVPEDDLPTDQTVLPGRSSEREGNAKNCWEDDRTPDAFSQLLTCPYCDRGYKRFTSLKEHIKYRHEKNEDNFSCSLCSYTFAYRTQLERHMTSHKSGRDQRHVTQSGCNRKFKCTECGKAFKYKHHLKEHLRIHSGEKPYECPNCKKRFSHSGSYSSHISSKKCISLIPVNGRPRTGLKTSQCSSPSLSASPGSPTRPQIRQKIENKPLQEQLSVNQIKTEPVDYEFKPIVVAS

SEQ ID NO: 98912 - protein, 1213 aa, Homo sapiens
  Payload ID: 19743
  Gene Name: zinc finger E-box binding homeobox 2
  ENSP ID: ENSP00000302501
MKQPIMADGPRCKRRKQANPRRKNVVNYDNVVDTGSETDEEDKLHIAEDDGIANPLDQETSPASVPNHESSPHVSQALLPREEEEDEIREGGVEHPWHNNEILQASVDGPEMKEDYDTMGPEATIQTAINNGTVKNANCTSDFEEYFAKRKLEERDGHAVSIEEYLQRSDTAIIYPEAPEELSRLGTPEANGQEENDLPPGTPDAFAQLLTCPYCDRGYKRLTSLKEHIKYRHEKNEENFSCPLCSYTFAYRTQLERHMVTHKPGTDQHQMLTQGAGNRKFKCTECGKAFKYKHHLKEHLRIHSGEKPYECPNCKKRFSHSGSYSSHISSKKCIGLISVNGRMRNNIKTGSSPNSVSSSPTNSAITQLRNKLENGKPLSMSEQTGLLKIKTEPLDFNDYKVLMATHGFSGTSPFMNGGLGATSPLGVHPSAQSPMQHLGVGMEAPLLGFPTMNSNLSEVQKVLQIVDNTVSRQKMDCKAEEISKLKGYHMKDPCSQPEEQGVTSPNIPPVGLPVVSHNGATKSIIDYTLEKVNEAKACLQSLTTDSRRQISNIKKEKLRTLIDLVTDDKMIENHNISTPFSCQFCKESFPGPIPLHQHERYLCKMNEEIKAVLQPHENIVPNKAGVFVDNKALLLSSVLSEKGMTSPINPYKDHMSVLKAYYAMNMEPNSDELLKISIAVGLPQEFVKEWFEQRKVYQYSNSRSPSLERSSKPLAPNSNPPTKDSLLPRSPVKPMDSITSPSIAELHNSVTNCDPPLRLTKPSHFTNIKPVEKLDHSRSNTPSPLNLSSTSSKNSHSSSYTPNSFSSEELQAEPLDLSLPKQMKEPKSIIATKNKTKASSISLDHNSVSSSSENSDEPLNLTFIKKEFSNSNNLDNKSTNPVFSMNPFSAKPLYTALPPQSAFPPATFMPPVQTSIPGLRPYPGLDQMSFLPHMAYTYPTGAATFADMQQRRKYQRKQGFQGELLDGAQDYMSGLDDMTDSDSCLSRKKIKKTESGMYACDLCDKTFQKSSSLLRHKYEHTGKRPHQCQICKKAFKHKHHLIEHSRLHSGEKPYQCDKCGKRFSHSGSYSQHMNHRYSYCKREAEEREAAEREAREKGHLEPTELLMNRAYLQSITPQGYSDSEERESMPRDGESEKEHEKEGEDGYGKLGRQDGDEEFEEEEEESENKSMDTDPETIRDEEETGDHSMDDSSEDGKMETKSDHEEDNMEDGM

SEQ ID NO: 98913 - protein, 467 aa, Homo sapiens
  Payload ID: 19743
  Gene Name: zinc finger E-box binding homeobox 2
  ENSP ID: ENSP00000376601
MCVSEIEPACCRSRAPSPCELPSDPLLSMKQPIMADGPRCKRRKQANPRRKNVVNYDNVVDTGSETDEEDKLHIAEDDGIANPLDQETSPASVPNHESSPHVSQALLPREEEEDEIREGGVEHPWHNNEILQASVDGPEEMKEDYDTMGPEATIQTAINNGTVKNANCTSDFEEYFAKRKLEERDGHAVSIEEYLQRSDTAIIYPEAPEELSRLGTPEANGQEENDLPPGTPDAFAQLLTCPYCDRGYKRLTSLKEHIKYRHEKNEENFSCPLCSYTFAYRTQLERHMVTHKPGTDQHQMLTQGAGNRKFKCTECGKAFKYKHHLKEHLRIHSGEKPYECPNCKKRFSHSGSYSSHISSKKCIGLISVNGRMRNNIKTGSSPNSVSSSPTNSAITQLRNKLENGKPLSMSEQTGLLKIKTEPLDFNDYKVLMATHGFSGTSPFMNGGLGATSPLGVHPSAQSPMQHL

SEQ ID NO: 98914 - protein, 1214 aa, Homo sapiens
  Payload ID: 19743
  Gene Name: zinc finger E-box binding homeobox 2
  Uniprot ID: O60315
  ENSP ID: ENSP00000386854
MKQPIMADGPRCKRRKQANPRRKNVVNYDNVVDTGSETDEEDKLHIAEDDGIANPLDQETSPASVPNHESSPHVSQALLPREEEEDEIREGGVEHPWHNNEILQASVDGPEEMKEDYDTMGPEATIQTAINNGTVKNANCTSDFEEYFAKRKLEERDGHAVSIEEYLQRSDTAIIYPEAPEELSRLGTPEANGQEENDLPPGTPDAFAQLLTCPYCDRGYKRLTSLKEHIKYRHEKNEENFSCPLCSYTFAYRTQLERHMVTHKPGTDQHQMLTQGAGNRKFKCTECGKAFKYKHHLKEHLRIHSGEKPYECPNCKKRFSHSGSYSSHISSKKCIGLISVNGRMRNNIKTGSSPNSVSSSPTNSAITQLRNKLENGKPLSMSEQTGLLKIKTEPLDFNDYKVLMATHGFSGTSPFMNGGLGATSPLGVHPSAQSPMQHLGVGMEAPLLGFPTMNSNLSEVQKVLQIVDNTVSRQKMDCKAEEISKLKGYHMKDPCSQPEEQGVTSPNIPPVGLPVVSHNGATKSIIDYTLEKVNEAKACLQSLTTDSRRQISNIKKEKLRTLIDLVTDDKMIENHNISTPFSCQFCKESFPGPIPLHQHERYLCKMNEEIKAVLQPHENIVPNKAGVFVDNKALLLSSVLSEKGMTSPINPYKDHMSVLKAYYAMNMEPNSDELLKISIAVGLPQEFVKEWFEQRKVYQYSNSRSPSLERSSKPLAPNSNPPTKDSLLPRSPVKPMDSITSPSIAELHNSVTNCDPPLRLTKPSHFTNIKPVEKLDHSRSNTPSPLNLSSTSSKNSHSSSYTPNSFSSEELQAEPLDLSLPKQMKEPKSIIATKNKTKASSISLDHNSVSSSSENSDEPLNLTFIKKEFSNSNNLDNKSTNPVFSMNPFSAKPLYTALPPQSAFPPATFMPPVQTSIPGLRPYPGLDQMSFLPHMAYTYPTGAATFADMQQRRKYQRKQGFQGELLDGAQDYMSGLDDMTDSDSCLSRKKIKKTESGMYACDLCDKTFQKSSSLLRHKYEHTGKRPHQCQICKKAFKHKHHLIEHSRLHSGEKPYQCDKCGKRFSHSGSYSQHMNHRYSYCKREAEEREAAEREAREKGHLEPTELLMNRAYLQSITPQGYSDSEERESMPRDGESEKEHEKEGEDGYGKLGRQDGDEEFEEEEEESENKSMDTDPETIRDEEETGDHSMDDSSEDGKMETKSDHEEDNMEDGM

SEQ ID NO: 98915 - protein, 120 aa, Homo sapiens
  Payload ID: 19743
  Gene Name: zinc finger E-box binding homeobox 2
  ENSP ID: ENSP00000387256
MKQPIMADGPRCKRRKQANPRRKNVVNYDNVVDTGSETDEEDKLHIAEDDGIANPLDQETSPASVPNHESSPHVSQALLPREEEEDEIREGGVEHPWHNNEILQASVDGPVKNANCTSDF

SEQ ID NO: 98916 - protein, 220 aa, Homo sapiens
  Payload ID: 19743
  Gene Name: zinc finger E-box binding homeobox 2
  ENSP ID: ENSP00000394777
MKQPIMADGPRCKRRKQANPRRKNVVNYDNVVDTGSETDEEDKLHIAEDDGIANPLDQETSPASVPNHESSPHVSQALLPREEEEDEIREGGVEHPWHNNEILQASVDGPDLPPGTPDAFAQLLTCPYCDRGYKRLTSLKEHIKYRHEKNEENFSCPLCSYTFAYRTQLERHMVTHKPGTDQHQMLTQGAGNRKFKCTECGKAFKYKHHLKEHLRIHSGT

SEQ ID NO: 98917 - protein, 731 aa, Homo sapiens
  Payload ID: 19743
  Gene Name: zinc finger E-box binding homeobox 2
  ENSP ID: ENSP00000395496
MTHFEDIEPACCRSRAPSPCELPSDPLLSMKQPIMADGPRCKRRKQANPRRKNVVNYDNVVDTGSETDEEDKLHIAEDDGIANPLDQETSPASVPNHESSPHVSQALLPREEEEDEIREGGVEHPWHNNEILQASVDGPEEMKEDYDTMGPEATIQTAINNGTVKNANCTSDFEEYFAKRKLEERDGHAVSIEEYLQRSDTAIIYPEAPEELSRLGTPEANGQEENDLPPGTPDAFAQLLTCPYCDRGYKRLTSLKEHIKYRHEKNEENFSCPLCSYTFAYRTQLERHMVTHKPGTDQHQMLTQGAGNRKFKCTECGKAFKYKHHLKEHLRIHSGEKPYECPNCKKRFSHSGSYSSHISSKKCIGLISVNGRMRNNIKTGSSPNSVSSSPTNSAITQLRNKLENGKPLSMSEQTGLLKIKTEPLDFNDYKVLMATHGFSGTSPFMNGGLGATSPLGVHPSAQSPMQHLGVGMEAPLLGFPTMNSNLSEVQKVLQIVDNTVSRQKMDCKAEEISKLKGYHMKDPCSQPEEQGVTSPNIPPVGLPVVSHNGATKSIIDYTLEKVNEAKACLQSLTTDSRRQISNIKKEKLRTLIDLVTDDKMIENHNISTPFSCQFCKESFPGPIPLHQHERYLCKMNEEIKAVLQPHENIVPNKAGVFVDNKALLLSSVLSEKGMTSPINPYKDHMSVLKAYYAMNMEPNSDELLKISIAVGLPQEFVKEWFEQRKVYQYSN

SEQ ID NO: 98918 - protein, 63 aa, Homo sapiens
  Payload ID: 19743
  Gene Name: zinc finger E-box binding homeobox 2
  ENSP ID: ENSP00000399451
MKQPIMADGPRCKRRKQANPRRKNVVNYDNVVDTGSETDEEDKLHIAEDDGIANPLDQETSPA

SEQ ID NO: 98919 - protein, 91 aa, Homo sapiens
  Payload ID: 19743
  Gene Name: zinc finger E-box binding homeobox 2
  ENSP ID: ENSP00000400993
MKQPIMADGPRCKRRKQANPRRKNVVNYDNVVDTGSETDEEDKLHIAEDDGIANPLDQETSPASVPNHESSPHVSQALLPREEEEDEIREG

SEQ ID NO: 98920 - protein, 1190 aa, Homo sapiens
  Payload ID: 19743
  Gene Name: zinc finger E-box binding homeobox 2
  Uniprot ID: O60315
  ENSP ID: ENSP00000443792
MKQPIMADGPRCKRRKQANPRRKNVVNYDNVVDTGSETDEEDKLHIAEDDGIANPLDQETSPASVPNHESSPHVSQALLPREEEEDEIREGGVEHPWHNNEILQASVDGPVKNANCTSDFEEYFAKRKLEERDGHAVSIEEYLQRSDTAIIYPEAPEELSRLGTPEANGQEENDLPPGTPDAFAQLLTCPYCDRGYKRLTSLKEHIKYRHEKNEENFSCPLCSYTFAYRTQLERHMVTHKPGTDQHQMLTQGAGNRKFKCTECGKAFKYKHHLKEHLRIHSGEKPYECPNCKKRFSHSGSYSSHISSKKCIGLISVNGRMRNNIKTGSSPNSVSSSPTNSAITQLRNKLENGKPLSMSEQTGLLKIKTEPLDFNDYKVLMATHGFSGTSPFMNGGLGATSPLGVHPSAQSPMQHLGVGMEAPLLGFPTMNSNLSEVQKVLQIVDNTVSRQKMDCKAEEISKLKGYHMKDPCSQPEEQGVTSPNIPPVGLPVVSHNGATKSIIDYTLEKVNEAKACLQSLTTDSRRQISNIKKEKLRTLIDLVTDDKMIENHNISTPFSCQFCKESFPGPIPLHQHERYLCKMNEEIKAVLQPHENIVPNKAGVFVDNKALLLSSVLSEKGMTSPINPYKDHMSVLKAYYAMNMEPNSDELLKISIAVGLPQEFVKEWFEQRKVYQYSNSRSPSLERSSKPLAPNSNPPTKDSLLPRSPVKPMDSITSPSIAELHNSVTNCDPPLRLTKPSHFTNIKPVEKLDHSRSNTPSPLNLSSTSSKNSHSSSYTPNSFSSEELQAEPLDLSLPKQMKEPKSIIATKNKTKASSISLDHNSVSSSSENSDEPLNLTFIKKEFSNSNNLDNKSTNPVFSMNPFSAKPLYTALPPQSAFPPATFMPPVQTSIPGLRPYPGLDQMSFLPHMAYTYPTGAATFADMQQRRKYQRKQGFQGELLDGAQDYMSGLDDMTDSDSCLSRKKIKKTESGMYACDLCDKTFQKSSSLLRHKYEHTGKRPHQCQICKKAFKHKHHLIEHSRLHSGEKPYQCDKCGKRFSHSGSYSQHMNHRYSYCKREAEEREAAEREAREKGHLEPTELLMNRAYLQSITPQGYSDSEERESMPRDGESEKEHEKEGEDGYGKLGRQDGDEEFEEEEEESENKSMDTDPETIRDEEETGDHSMDDSSEDGKMETKSDHEEDNMEDGM

SEQ ID NO: 98921 - protein, 1214 aa, Homo sapiens; identical to SEQ ID NO: 98914
  Payload ID: 19743
  Gene Name: zinc finger E-box binding homeobox 2
  Uniprot ID: O60315
  ENSP ID: ENSP00000454157

SEQ ID NO: 98922 - protein, 184 aa, Homo sapiens
  Payload ID: 19743
  Gene Name: zinc finger E-box binding homeobox 2
  ENSP ID: ENSP00000475267
MKQPIMADGPRCKRRKQANPRRKNVVNYDNVVDTGSETDEEDKLHIAEDDGIANPLDQETSPASVPNHESSPHVSQALLPREEEEDEIREGGVEHPWHNNEILQASVDGPVKNANCTSDFEEYFAKRKLEERDGHAVSIEEYLQRSDTAIIYPEAPEELSRLGTPEANGQEENDLPPGTPDAFA

SEQ ID NO: 98923 - protein, 87 aa, Homo sapiens
  Payload ID: 19743
  Gene Name: zinc finger E-box binding homeobox 2
  ENSP ID: ENSP00000475329
MTHFEDIEPACCRSRAPSPCELPSDPLLSMKQPIMADGPRCKRRKQANPRRKNALESEMSTRSGRCPAAACHRCGPFVTCKVCCFCP

SEQ ID NO: 98924 - protein, 58 aa, Homo sapiens
  Payload ID: 19743
  Gene Name: zinc finger E-box binding homeobox 2
  ENSP ID: ENSP00000475400
MKQPIMADGPRCKRRKQANPRRKNALESEMSTRSGRCPAAACHRCGPFVTCKVCCFCP

SEQ ID NO: 98925 - protein, 58 aa, Homo sapiens; identical to SEQ ID NO: 98924
  Payload ID: 19743
  Gene Name: zinc finger E-box binding homeobox 2
  ENSP ID: ENSP00000475502

SEQ ID NO: 98926 - protein, 423 aa, Homo sapiens
  Payload ID: 19743
  Gene Name: zinc finger E-box binding homeobox 2
  ENSP ID: ENSP00000475553
MADGPRCKRRKQANPRRKNVVNYDNVVDTGSETDEEDKLHIAEDDGIANPLDQETSPASVPNHESSPHVSQALLPREEEEDEIREGGVEHPWHNNEILQASVDGPEEMKEDYDTMGPEATIQTAINNGTVKNANCTSDFEEYFAKRKLEERDGHAVSIEEYLQRSDTAIIYPEAPEELSRLGTPEANGQEENDLPPGTPDAFAQLLTCPYCDRGYKRLTSLKEHIKYRHEKNEENFSCPLCSYTFAYRTQLERHMVTHKPGTDQHQMLTQGAGNRKFKCTECGKAFKYKHHLKEHLRIHSGEKPYECPNCKKRFSHSGSYSSHISSKKCIGLISVNGRMRNNIKTGSSPNSVSSSPTNSAITQLRNKLENGKPLSMSEQTGLLKNSRRQWLMPVIPALWEANEGGSGQEFETSLANMVKHHLS

SEQ ID NO: 98927 - protein, 58 aa, Homo sapiens; identical to SEQ ID NO: 98924
  Payload ID: 19743
  Gene Name: zinc finger E-box binding homeobox 2
  ENSP ID: ENSP00000486240

SEQ ID NO: 98928 - protein, 41 aa, Homo sapiens
  Payload ID: 19743
  Gene Name: zinc finger E-box binding homeobox 2
  ENSP ID: ENSP00000486341
MKQPIMADGPRCKRRKQANPRRKNAKTNHLNREINSTSVQH

SEQ ID NO: 98929 - protein, 39 aa, Homo sapiens
  Payload ID: 19743
  Gene Name: zinc finger E-box binding homeobox 2
  ENSP ID: ENSP00000486346
MKQPIMADGPRCKRRKQANPRRKNVVNYDNVVDTGSETD

SEQ ID NO: 98930 - protein, 1214 aa, Homo sapiens; identical to SEQ ID NO: 98914
  Payload ID: 19743
  Gene Name: zinc finger E-box binding homeobox 2
  Uniprot ID: O60315
  ENSP ID: ENSP00000487174

SEQ ID NO: 98931 - protein, 41 aa, Homo sapiens
  Payload ID: 19743
  Gene Name: zinc finger E-box binding homeobox 2
  ENSP ID: ENSP00000487261
MKQPIMADGPRCKRRKQANPRRKNGSSRLSEKAWTTCLSQH

SEQ ID NO: 98932 - protein, 141 aa, Homo sapiens
  Payload ID: 19743
  Gene Name: zinc finger E-box binding homeobox 2
  ENSP ID: ENSP00000487476
MKQPIMADGPRCKRRKQANPRRKNVVNYDNVVDTGSETDEEDKLHIAEDDGIANPLDQETSPASVPNHESSPHVSQALLPREEEEDEIREGGVEHPWHNNEILQASVDGPEEMKEDYDTMGPEATIQTAINNGTVKNANCT

SEQ ID NO: 98933 - protein, 281 aa, Homo sapiens
  Payload ID: 19744
  Gene Name: zinc finger family member 783
  Uniprot ID: Q6ZMS7
  ENSP ID: ENSP00000367291
MAEAAPARDPETDKHTEDQSPSTPLPQPAAEKNSYLYSTEITLWTVVAAIQALEKKVDSCLTRLLTLEGRTGTAEKKLADCEKTAVEFGNQLEGKWAVLGTLLQEYGLLQRRLENVENLLRNRNFWILRLPPGSKGEAPKVPVTFDDVAVYFSELEWGKLEDWQKELYKHVMRGNYETLVSLDYAISKPDILTRIERGEEPCLDRWGQEKGNEVEVGRPRMMGTGLPPYPEHLTSPLSPAQEELKEGQAPKQQQDSEARVAPAGPEAGLALRTDLQGEAQI

SEQ ID NO: 98934 - protein, 546 aa, Homo sapiens
  Payload ID: 19744
  Gene Name: zinc finger family member 783
  Uniprot ID: Q6ZMS7
  ENSP ID: ENSP00000410890
MAEAAPARDPETDKHTEDQSPSTPLPQPAAEKNSYLYSTEITLWTVVAAIQALEKKVDSCLTRLLTLEGRTGTAEKKLADCEKTAVEFGNQLEGKWAVLGTLLQEYGLLQRRLENVENLLRNRNFWILRLPPGSKGEAPKVPVTFDDVAVYFSELEWGKLEDWQKELYKHVMRGNYETLVSLDYAISKPDILTRIERGEEPCLDRWGQEKGNEVEVGRPRMMGTGLPPYPEHLTSPLSPAQEELKEGQAPKQQQDSEARVAPAGPEAGGGVAIKTEAQSEDEMTPERLFLGVSRGQTECRIPRGPRNRPGGPSRHQAQGMPRVRAGEPRPPGASGETPRVLSRRRQRAFPCPDCGQSFRLKINLTIHQRTHVEEGRQEAPGRSPTSCGDSQAMLEPGEVVVPGPVIRWLPEEPEGRRSVAGGRALVGRRPAASKMYHCSECLRFFQQRKSLLLHQRLHTGNGQGWPACPYCGKAFRRPSDLFRHQRIHTGERPYQCPQCGRTFNRNHHLAVHMQTHARGQVGPHFPAAPARHGSLPLPWPSRKEEG

SEQ ID NO: 98935 - protein, 281 aa, Homo sapiens; identical to SEQ ID NO: 98933
  Payload ID: 19744
  Gene Name: zinc finger family member 783
  Uniprot ID: Q6ZMS7
  ENSP ID: ENSP00000418666

SEQ ID NO: 98936 - protein, 248 aa, Homo sapiens
  Payload ID: 19744
  Gene Name: zinc finger family member 783
  ENSP ID: ENSP00000419521
MEPQAAWLQSLEGCMWTAKKKLADCEKVAVEFGNQLETPESQSRKHVEIISSALCLQAGRRPGHHQARSGTSGERRQAGNCSLPSAERGQSPGTGESLRVWAWASPPASGPWLMVEPAWCVAARSGWCLQSGCVRRASCMTETQASWNVPRRSVLDQARGRGKWEEPAGPTGDHCGTPVLRQHGAGRCRGSLMHETQIPLRREKTNTDTVHGGKGHFHVCSQRALSESDPKDGQYSKKKHICLRCANS

SEQ ID NO: 98937 - protein, 259 aa, Homo sapiens
  Payload ID: 19745
  Gene Name: zinc finger family member 788
  ENSP ID: ENSP00000380866
RSHTREKRYKCKQCGKPFIYFNAFQRHQRSHTGENPYECKQCGKACISSTAFQCRELSHTGAKRYKCKQCGKGFNLPSSIRYHEMTHTGEKPYECKQCGRAFRSASHLRTHERTHIGEKPYECKQCGKVYRYWSGLRIHGLTHIGKKPYECKECGKAFDNPTSFQKHEGSHRKGKSYECKECGKVFSFSRSFRRHGRMHTGEKPYECKNCGKAFTSAKSLQNHGRTHTGEKPCECKQCGKAFICSSSCQRHEETHSVNM

SEQ ID NO: 98938 - protein, 62 aa, Homo sapiens
  Payload ID: 19745
  Gene Name: zinc finger family member 788
  ENSP ID: ENSP00000391703
MDSVAFEDVAVNFTPDEWALLDPSQKNLYREVMQETLRNLASIEVLWKRDSLKVKVISMEKF

SEQ ID NO: 98939 - protein, 82 aa, Homo sapiens
  Payload ID: 19745
  Gene Name: zinc finger family member 788
  ENSP ID: ENSP00000473243
MRNMIPQDNENPPQQGEANQNDSVAFEDVAVNFTPDEWALLDPSQKNLYREVMQETLRNLASIEVLWKRDSLKVKVISMEKF

SEQ ID NO: 98940 - protein, 361 aa, Homo sapiens
  Payload ID: 19746
  Gene Name: zinc finger homeobox 2
  ENSP ID: ENSP00000409464
MATLNSASTTGTTPSPGHNAPSLPSDTFSSSTPSDPVTKDPPAASSTSENMRSSEPGGQLLESGCGLVPPKEIGEPQEGPDCGHFPPNDPGVEKDKEQEEEEEGLPPMDLSNHLFFTAGGEAYLVAKLSLPGGSELLLPKGFPWGEAGIKEEPSLPFLAYPPPSHLTALHIQHGFDPIQGFSSSDQILSHDTSAPSPAACEERHGAFWSYQLAPNPPGDPKDGPMGNSGGNHVAVFWLCLLCRLGFSKPQAFMDHTQSHGVKLTPAQYQGLSGSPAVLQEGDEGCKALISFLEPKLPARPSSDIPLDNSSTVNMEANVAQTEDGPPEAEVQALILLDEEVMALSPPSPPTATWDPSPTQAK

SEQ ID NO: 98941 - protein, 2572 aa, Homo sapiens
  Payload ID: 19746
  Gene Name: zinc finger homeobox 2
  Uniprot ID: Q9C0A1
  ENSP ID: ENSP00000413418
MATLNSASTTGTTPSPGHNAPSLPSDTFSSSTPSDPVTKDPPAASSTSENMRSSEPGGQLLESGCGLVPPKEIGEPQEGPDCGHFPPNDPGVEKDKEQEEEEEGLPPMDLSNHLFFTAGGEAYLVAKLSLPGGSELLLPKGFPWGEAGIKEEPSLPFLAYPPPSHLTALHIQHGFDPIQGFSSSDQILSHDTSAPSPAACEERHGAFWSYQLAPNPPGDPKDGPMGNSGGNHVAVFWLCLLCRLGFSKPQAFMDHTQSHGVKLTPAQYQGLSGSPAVLQEGDEGCKALISFLEPKLPARPSSDIPLDNSSTVNMEANVAQTEDGPPEAEVQALILLDEEVMALSPPSPPTATWDPSPTQAKESPVAAGEAGPDWFPEGQEEDGGLCPPLNQSSPTSKEGGTLPAPVGSPEDPSDPPQPYRLADDYTPAPAAFQGLSLSSHMSLLHSRNSCKTLKCPKCNWHYKYQQTLDVHMREKHPESNSHCSYCSAGGAHPRLARGESYNCGYKPYRCDVCNYSTTTKGNLSIHMQSDKHLANLQGFQAGPGGQGSPPEASLPPSAGDKEPKTKSSWQCKVCSYETNISRNLRIHMTSEKHMQNVLMLHQGLPLGLPPGLMGPGPPPPPGATPTSPPELFQYFGPQALGQPQTPLAGPGLRPDKPLEAQLLLNGFHHVGAPARKFPTSAPGSLSPDAHLPPSQLLGSSSDSLPTSPPPDDSLSLKVFRCLVCQAFSTDSLELLLYHCSIGRSLPEAEWKEVAGDTHRCKLCCYGTQLKANFQLHLKTDKHAQKYQLAAHLREGGGAMGTPSPASLGDGAPYGSVSPLHLRCNICDFESNSKEKMQLHARGAAHEENSQIYKFLLDMEGAEAGAELGLYHCLLCAWETPSRLAVLQHLRTPAHRDAQAQRRLQLLQNGPTTEEGLAALQSILSFSHGQLRTPGKAPVTPLAEPPTPEKDAQNKTEQLASEETENKTGPSRDSANQTTVYCCPYCSFLSPESSQVRAHTLSQHAVQPKYRCPLCQEQLVGRPALHFHLSHLHNVVPECVEKLLLVATTVEMTFTTKVLSAPTLSPLDNGQEPPTHGPEPTPSRDQAAEGPNLTPEASPDPLPEPPLASVEVPDKPSGSPGQPPSPAPSPVPEPDAQAEDVAPPPTMAEEEEGTTGELRSAEPAPADSRHPLTYRKTTNFALDKFLDPARPYKCTVCKESFTQKNILLVHYNSVSHLHKMKKAAIDPSAPARGEAGAPPTTTAATDKPFKCTVCRVSYNQSSTLEIHMRSVLHQTRSRGTKTDSKIEGPERSQEEPKEGETEGEVGTEKKGPDTSGFISGLPFLSPPPPPLDLHRFPAPLFTPPVLPPFPLVPESLLKLQQQQLLLPFYLHDLKVGPKLTLAGPAPVLSLPAATPPPPPQPPKAELAEREWERPPMAKEGNEAGPSSPPDPLPNEAARTAAKALLENFGFELVIQYNEGKQAVPPPPTPPPPEALGGGDKLACGACGKLFSNMLILKTHEEHVHRRFLPFEALSRYAAQFRKSYDSLYPPLAEPPKPPDGSLDSPVPHLGPPFLVPEPEAGGTRAPEERSRAGGHWPIEEEESSRGNLPPLVPAGRRFSRTKFTEFQTQALQSFFETSAYPKDGEVERLASLLGLASRVVVVWFQNARQKARKNACEGGSMPTGGGTGGASGCRRCHATFSCVFELVRHLKKCYDDQTLEEEEEEAERGEEEEEVEEEEVEEEQGLEPPAGPEGPLPEPPDGEELSQAEATKAGGKEPEEKATPSPSPAHTCDQCAISFSSQDLLTSHRRLHFLPSLQPSAPPQLLDLPLLVFGERNPLVAATSPMPGPPLKRKHEDGSLSPTGSEAGGGGEGEPPRDKRLRTTILPEQLEILYRWYMQDSNPTRKMLDCISEEVGLKKRVVQVWFQNTRARERKGQFRSTPGGVPSPAVKPPATATPASLPKFNLLLGKVDDGTGREAPKREAPAFPYPTATLASGPQPFLPPGKEATTPTPEPPLPLLPPPPPSEEEGPEEPPKASPESEACSLSAGDLSDSSASSLAEPESPGAGGTSGGPGGGTGVPDGMGQRRYRTQMSSLQLKIMKACYEAYRTPTMQECEVLGEEIGLPKRVIQVWFQNARAKEKKAKLQGTAAGSTGGSSEGLLAAQRTDCPYCDVKYDFYVSCRGHLFSRQHLAKLKEAVRAQLKSESKCYDLAPAPEAPPALKAPPATTPASMPLGAAPTLPRLAPVLLSGPALAQPPLGNLAPFNSGPAASSGLLGLATSVLPTTTVVQTAGPGRPLPQRPMPDQTNTSTAGTTDPVPGPPTEPLGDKVSSERKPVAGPTSSSNDALKNLKALKTTVPALLGGQFLPFPLPPAGGTAPPAVFGPQLQGAYFQQLYGMKKGLFPMNPMIPQTLIGLLPNALLQPPPQPPEPTATAPPKPPELPAPGEGEAGEVDELLTGSTGISTVDVTHRYLCRQCKMAFDGEAPATAHQRSFCFFGRGSGGSMPPPLRVPICTYHCLACEVLLSGREALASHLRSSAHRRKAAPPQGGPPISITNAATAASAAVAFAKEEARLPHTDSNPKTTTTSTLLAL

SEQ ID NO: 98942 - protein, 246 aa, Homo sapiens
  Payload ID: 19746
  Gene Name: zinc finger homeobox 2
  ENSP ID: ENSP00000451342
MATLNSASTTGTTPSPGHNAPSLPSDTFSSSTPSDPVTKDPPAASSTSENMRSSEPGGQLLESGCGLVPPKEIGEPQEGPDCGHFPPNDPGVEKDKEQEEEEEGLPPMDLSNHLFFTAGGEAYLVAKLSLPGGSELLLPKGFPWGEAGIKEEPSLPFLAYPPPSHLTALHIQHGFDPIQGFSSSDQILSHDTSAPSPAACEERHGAFWSYQLAPNPPGDPKDGPMGNSGGNHVAVFWLCLLCRLGF

SEQ ID NO: 98943 - protein, 408 aa, Homo sapiens
  Payload ID: 19746
  Gene Name: zinc finger homeobox 2
  ENSP ID: ENSP00000478696
MATLNSASTTGTTPSPGHNAPSLPSDTFSSSTPSDPVTKDPPAASSTSENMRSSEPGGQLLESGCGLVPPKEIGEPQEGPDCGHFPPNDPGVEKDKEQEEEEEGLPPMDLSNHLFFTAGGEAYLVAKLSLPGGSELLLPKGFPWGEAGIKEEPSLPFLAYPPPSHLTALHIQHGFDPIQGFSSSDQILSHDTSAPSPAACEERHGAFWSYQLAPNPPGDPKDGPMGNSGGNHVAVFWLCLLCRLGFSKPQAFMDHTQSHGVKLTPAQYQGLSGSPAVLQEGDEGCKALISFLEPKLPARPSSDIPLDNSSTVNMEANVAQTEDGPPEAEVQALILLDEEVMALSPPSPPTATWGYTTACCVRGRHPPAWLCCNTCAHLPTAMPRPRGVCSCYRMAQPLRKDSQLFRAS

SEQ ID NO: 98944 - protein, 3703 aa, Homo sapiens
  Payload ID: 19747
  Gene Name: zinc finger homeobox 3
  Uniprot ID: Q15911
  ENSP ID: ENSP00000268489
MEGCDSPVVSGKDNGCGIPQHQQWTELNSTHLPDKPSSMEQSTGESHGPLDSLRAPFNERLAESTASAGPPSEPASKEVTCNECSASFASLQTYMEHHCPSARPPPPLREESASDTGEEGDEESDVENLAGEIVYQPDGSAYIVESLSQLTQGGGACGSGSGSGPLPSLFLNSLPGAGGKQGDPSCAAPVYPQIINTFHIASSFGKWFEGPDQAFPNTSALAGLSPVLHSFRVFDVRHKSNKDYLNSDGSAKSSCVSKDVPNNVDLSKFDGFVLYGKRKPILMCFLCKLSFGYVRSFVTHAVHDHRMTLSEDERKILSNKNISAIIQGIGKDKEPLVSFLEPKNKNFQHPLVSTANLIGPGHSFYGKFSGIRMEGEEALPAGSAAGPEQPQAGLLTPSTLLNLGGLTSSVLKTPITSVPLGPLASSPTKSSEGKDSGAAEGEKQEVGDGDCFSEKVEPAEEEAEEEEEEEEAEEEEEEEEEEEEEEEDEGCKGLFPSELDEELEDRPHEEPGAAAGSSSKKDLALSNQSISNSPLMPNVLQTLSRGTASTSSNSASSFVVFDGANRRNRLSFNSEGVRANVAEGGRRLDFADESANKDNATAPEPNESTEGDDGGFVPHHQHAGSLCELGVGECPSGSGVECPKCDTVLGSSRSLGGHMTMMHSRNSCKTLKCPKCNWHYKYQQTLEAHMKEKHPEPGGSCVYCKSGQPHPRLARGESYTCGYKPFRCEVCNYSTTTKGNLSIHMQSDKHLNNMQNLQNGGGEQVFSHTAGAAAAAVAAAAAAANISSSCGAPSPTKPKTKPTWRCEVCDYETNVARNLRIHMTSEKHMHNMMLLQQNMTQIQHNRHLGLGSLPSPAEAELYQYYLAQNMNLPNLKMDSAASDAQFMMSGFQLDPAGPMAAMTPALVGGEIPLDMRLGGGQLVSEELMNLGESFIQTNDPSLKLFQCAVCNKFTTDNLDMLGLHMNVERSLSEDEWKAVMGDSYQCKLCRYNTQLKANFQLHCKTDKHVQKYQLVAHIKEGGKANEWRLKCVAIGNPVHLKCNACDYYTNSLEKLRLHTVNSRHEASLKLYKHLQQHESGVEGESCYYHCVLCNYSTKAKLNLIQHVRSMKHQRSESLRKLQRLQKGLPEEDEDLGQIFTIRRCPSTDPEEAIEDVEGPSETAADPEELAKDQEGGASSSQAEKELTDSPATSKRISFPGSSESPLSSKRPKTAEEIKPEQMYQCPYCKYSNADVNRLRVHAMTQHSVQPMLRCPLCQDMLNNKIHLQLHLTHLHSVAPDCVEKLIMTVTTPEMVMPSSMFLPAAVPDRDGNSNLEEAGKQPETSEDLGKNILPSASTEQSGDLKPSPADPGSVREDSGFICWKKGCNQVFKTSAALQTHFNEVHAKRPQLPVSDRHVYKYRCNQCSLAFKTIEKLQLHSQYHVIRAATMCCLCQRSFRTFQALKKHLETSHLELSEADIQQLYGGLLANGDLLAMGDPTLAEDHTIIVEEDKEEESDLEDKQSPTGSDSGSVQEDSGSEPKRALPFRKGPNFTMEKFLDPSRPYKCTVCKESFTQKNILLVHYNSVSHLHKLKRALQESATGQPEPTSSPDNKPFKCNTCNVAYSQSSTLEIHMRSVLHQTKARAAKLEAASGSSNGTGNSSSISLSSSTPSPVSTSGSNTFTTSNPSSAGIAPSSNLLSQVPTESVGMPPLGNPIGANIASPSEPKEANRKKLADMIASRQQQQQQQQQQQQQQQQQQQAQTLAQAQAQVQAHLQQELQQQAALIQSQLFNPTLLPHFPMTTETLLQLQQQQHLLFPFYIPSAEFQLNPEVSLPVTSGALTLTGTGPGLLEDLKAQVQVPQQSHQQILPQQQQNQLSIAQSHSALLQPSQHPEKKNKLVIKEKEKESQRERDSAEGGEGNTGPKETLPDALKAKEKKELAPGGGSEPSMLPPRIASDARGNATKALLENFGFELVIQYNENKQKVQKKNGKTDQGENLEKLECDSCGKLFSNILILKSHQEHVHQNYFPFKQLERFAKQYRDHYDKLYPLRPQTPEPPPPPPPPPPPPLPAAPPQPASTPAIPASAPPITSPTIAPAQPSVPLTQLSMPMELPIFSPLMMQTMPLQTLPAQLPPQLGPVEPLPADLAQLYQHQLNPTLLQQQNKRPRTRITDDQLRVLRQYFDINNSPSEEQIKEMADKSGLPQKVIKHWFRNTLFKERQRNKDSPYNFSNPPITSLEELKIDSRPPSPEPPKQEYWGSKRSSRTRFTDYQLRVLQDFFDANAYPKDDEFEQLSNLLNLPTRVIVVWFQNARQKARKNYENQGEGKDGERRELTNDRYIRTSNLNYQCKKCSLVFQRIFDLIKHQKKLCYKDEDEEGQDDSQNEDSMDAMEILTPTSSSCSTPMPSQAYSAPAPSANNTASSAFLQLTAEAEELATFNSKTEAGDEKPKLAEAPSAQPNQTQEKQGQPKPELQQQEQPEQKTNTPQQKLPQLVSLPSLPQPPPQAPPPQCPLPQSSPSPSQLSHLPLKPLHTSTPQQLANLPPQLIPYQCDQCKLAFPSFEHWQEHQQLHFLSAQNQFIHPQFLDRSLDMPFMLFDPSNPLLASQLLSGAIPQIPASSATSPSTPTSTMNTLKRKLEEKASASPGENDSGTGGEEPQRDKRLRTTITPEQLEILYQKYLLDSNPTRKMLDHIAHEVGLKKRVVQVWFQNTRARERKGQFRAVGPAQAHRRCPFCRALFKAKTALEAHIRSRHWHEAKRAGYNLTLSAMLLDCDGGLQMKGDIFDGTSFSHLPPSSSDGQGVPLSPVSKTMELSPRTLLSPSSIKVEGIEDFESPSMSSVNLNFDQTKLDNDDCSSVNTAITDTTTGDEGNADNDSATGIATETKSSSAPNEGLTKAAMMAMSEYEDRLSSGLVSPAPSFYSKEYDNEGTVDYSETSSLADPCSPSPGASGSAGKSGDSGDRPGQKRFRTQMTNLQLKVLKSCFNDYRTPTMLECEVLGNDIGLPKRVVQVWFQNARAKEKKSKLSMAKHFGINQTSYEGPKTECTLCGIKYSARLSVRDHIFSQQHISKVKDTIGSQLDKEKEYFDPATVRQLMAQQELDRIKKANEVLGLAAQQQGMFDNTPLQALNLPTAYPALQGIPPVLLPGLNSPSLPGFTPSNTALTSPKPNLMGLPSTTVPSPGLPTSGLPNKPSSASLSSPTPAQATMAMGPQQPPQQQQQQQQPQVQQPPPPPAAQPPPTPQLPLQQQQQRKDKDSEKVKEKEKAHKGKGEPLPVPKKEKGEAPTATAATISAPLPTMEYAVDPAQLQALQAALTSDPTALLTSQFLPYFVPGFSPYYAPQIPGALQSGYLQPMYGMEGLFPYSPALSQALMGLSPGSLLQQYQQYQQSLQEAIQQQQQRQLQQQQQQKVQQQQPKASQTPVPPGAPSPDKDPAKESPKPEEQKNTPREVSPLLPKLPEEPEAESKSADSLYDPFIVPKVQYKLVCRKCQAGFSDEEAARSHLKSLCFFGQSVVNLQEMVLHVPTGGGGGGSGGGGGGGGGGGGGGSYHCLACESALCGEEALSQHLESALHKHRTITRAARNAKEHPSLLPHSACFPDPSTASTSQSAAHSNDSPPPPSAAAPSSASPHASRKSWPQVVSRASAAKPPSFPPLSSSSTVTSSSCSTSGVQPSMPTDDYSEESDTDLSQKSDGPASPVEGPKDPSCPKDSGLTSVGTDTFRL

SEQ ID NO: 98945 - protein, 2789 aa, Homo sapiens
  Payload ID: 19747
  Gene Name: zinc finger homeobox 3
  Uniprot ID: Q15911
  ENSP ID: ENSP00000438926
MRLGGGQLVSEELMNLGESFIQTNDPSLKLFQCAVCNKFTTDNLDMLGLHMNVERSLSEDEWKAVMGDSYQCKLCRYNTQLKANFQLHCKTDKHVQKYQLVAHIKEGGKANEWRLKCVAIGNPVHLKCNACDYYTNSLEKLRLHTVNSRHEASLKLYKHLQQHESGVEGESCYYHCVLCNYSTKAKLNLIQHVRSMKHQRSESLRKLQRLQKGLPEEDEDLGQIFTIRRCPSTDPEEAIEDVEGPSETAADPEELAKDQEGGASSSQAEKELTDSPATSKRISFPGSSESPLSSKRPKTAEEIKPEQMYQCPYCKYSNADVNRLRVHAMTQHSVQPMLRCPLCQDMLNNKIHLQLHLTHLHSVAPDCVEKLIMTVTTPEMVMPSSMFLPAAVPDRDGNSNLEEAGKQPETSEDLGKNILPSASTEQSGDLKPSPADPGSVREDSGFICWKKGCNQVFKTSAALQTHFNEVHAKRPQLPVSDRHVYKYRCNQCSLAFKTIEKLQLHSQYHVIRAATMCCLCQRSFRTFQALKKHLETSHLELSEADIQQLYGGLLANGDLLAMGDPTLAEDHTIIVEEDKEEESDLEDKQSPTGSDSGSVQEDSGSEPKRALPFRKGPNFTMEKFLDPSRPYKCTVCKESFTQKNILLVHYNSVSHLHKLKRALQESATGQPEPTSSPDNKPFKCNTCNVAYSQSSTLEIHMRSVLHQTKARAAKLEAASGSSNGTGNSSSISLSSSTPSPVSTSGSNTFTTSNPSSAGIAPSSNLLSQVPTESVGMPPLGNPIGANIASPSEPKEANRKKLADMIASRQQQQQQQQQQQQQQQQQQQAQTLAQAQAQVQAHLQQELQQQAALIQSQLFNPTLLPHFPMTTETLLQLQQQQHLLFPFYIPSAEFQLNPEVSLPVTSGALTLTGTGPGLLEDLKAQVQVPQQSHQQILPQQQQNQLSIAQSHSALLQPSQHPEKKNKLVIKEKEKESQRERDSAEGGEGNTGPKETLPDALKAKEKKELAPGGGSEPSMLPPRIASDARGNATKALLENFGFELVIQYNENKQKVQKKNGKTDQGENLEKLECDSCGKLFSNILILKSHQEHVHQNYFPFKQLERFAKQYRDHYDKLYPLRPQTPEPPPPPPPPPPPPLPAAPPQPASTPAIPASAPPITSPTIAPAQPSVPLTQLSMPMELPIFSPLMMQTMPLQTLPAQLPPQLGPVEPLPADLAQLYQHQLNPTLLQQQNKRPRTRITDDQLRVLRQYFDINNSPSEEQIKEMADKSGLPQKVIKHWFRNTLFKERQRNKDSPYNFSNPPITSLEELKIDSRPPSPEPPKQEYWGSKRSSRTRFTDYQLRVLQDFFDANAYPKDDEFEQLSNLLNLPTRVIVVWFQNARQKARKNYENQGEGKDGERRELTNDRYIRTSNLNYQCKKCSLVFQRIFDLIKHQKKLCYKDEDEEGQDDSQNEDSMDAMEILTPTSSSCSTPMPSQAYSAPAPSANNTASSAFLQLTAEAEELATFNSKTEAGDEKPKLAEAPSAQPNQTQEKQGQPKPELQQQEQPEQKTNTPQQKLPQLVSLPSLPQPPPQAPPPQCPLPQSSPSPSQLSHLPLKPLHTSTPQQLANLPPQLIPYQCDQCKLAFPSFEHWQEHQQLHFLSAQNQFIHPQFLDRSLDMPFMLFDPSNPLLASQLLSGAIPQIPASSATSPSTPTSTMNTLKRKLEEKASASPGENDSGTGGEEPQRDKRLRTTITPEQLEILYQKYLLDSNPTRKMLDHIAHEVGLKKRVVQVWFQNTRARERKGQFRAVGPAQAHRRCPFCRALFKAKTALEAHIRSRHWHEAKRAGYNLTLSAMLLDCDGGLQMKGDIFDGTSFSHLPPSSSDGQGVPLSPVSKTMELSPRTLLSPSSIKVEGIEDFESPSMSSVNLNFDQTKLDNDDCSSVNTAITDTTTGDEGNADNDSATGIATETKSSSAPNEGLTKAAMMAMSEYEDRLSSGLVSPAPSFYSKEYDNEGTVDYSETSSLADPCSPSPGASGSAGKSGDSGDRPGQKRFRTQMTNLQLKVLKSCFNDYRTPTMLECEVLGNDIGLPKRVVQVWFQNARAKEKKSKLSMAKHFGINQTSYEGPKTECTLCGIKYSARLSVRDHIFSQQHISKVKDTIGSQLDKEKEYFDPATVRQLMAQQELDRIKKANEVLGLAAQQQGMFDNTPLQALNLPTAYPALQGIPPVLLPGLNSPSLPGFTPSNTALTSPKPNLMGLPSTTVPSPGLPTSGLPNKPSSASLSSPTPAQATMAMGPQQPPQQQQQQQQPQVQQPPPPPAAQPPPTPQLPLQQQQQRKDKDSEKVKEKEKAHKGKGEPLPVPKKEKGEAPTATAATISAPLPTMEYAVDPAQLQALQAALTSDPTALLTSQFLPYFVPGFSPYYAPQIPGALQSGYLQPMYGMEGLFPYSPALSQALMGLSPGSLLQQYQQYQQSLQEAIQQQQQRQLQQQQQQKVQQQQPKASQTPVPPGAPSPDKDPAKESPKPEEQKNTPREVSPLLPKLPEEPEAESKSADSLYDPFIVPKVQYKLVCRKCQAGFSDEEAARSHLKSLCFFGQSVVNLQEMVLHVPTGGGGGGSGGGGGGGGGGGGGGSYHCLACESALCGEEALSQHLESALHKHRTITRAARNAKEHPSLLPHSACFPDPSTASTSQSAAHSNDSPPPPSAAAPSSASPHASRKSWPQVVSRASAAKPPSFPPLSSSSTVTSSSCSTSGVQPSMPTDDYSEESDTDLSQKSDGPASPVEGPKDPSCPKDSGLTSVGTDTFRL

SEQ ID NO: 98946 - protein, 140 aa, Homo sapiens
  Payload ID: 19748
  Gene Name: zinc finger homeobox 4
  ENSP ID: ENSP00000427739
METCDSPPISRQENGQSTSKLCGTTQLDNEVPEKVAGMEPDRENSSTDDNLKTDERKSEALLGFSVENAAATQVTSAKEIPCNECATSFPSLQKYMEHHCPNARLPVLKDDNESEISELEDSDVENLTGEIVYQPDGSAY

SEQ ID NO: 98947 - protein, 155 aa, Homo sapiens
  Payload ID: 19748
  Gene Name: zinc finger homeobox 4
  ENSP ID: ENSP00000427775
METCDSPPISRQENGQSTSKLCGTTQLDNEVPEKVAGMEPDRENSSTDDNLKTDERKSEALLGFSVENAAATQVTSAKEIPCNECATSFPSLQKYMEHHCPNARLPVLKDDNESEISELEDSDVENLTGEIVYQPDGSAYIIEDSKESGQNAQTG

SEQ ID NO: 98948 - protein, 155 aa, Homo sapiens; identical to SEQ ID NO: 98947
  Payload ID: 19748
  Gene Name: zinc finger homeobox 4
  ENSP ID: ENSP00000428525

SEQ ID NO: 98949 - protein, 101 aa, Homo sapiens
  Payload ID: 19748
  Gene Name: zinc finger homeobox 4
  ENSP ID: ENSP00000429495
METCDSPPISRQENGQSTSKLCGTTQLDNEVPEKVAGMEPDRENSSTDDNLKTDERKSEALLGFSVENAAATQVTSAKEIPCNECATSFPSLQKYMEHHCP

SEQ ID NO: 98950 - protein, 86 aa, Homo sapiens
  Payload ID: 19748
  Gene Name: zinc finger homeobox 4
  ENSP ID: ENSP00000430375
  MOD_RES (1)..(1): Any amino acid
XKLNLVQHVRSVKHQQTEGLRKLQLHQQGLAPEEDNLSEIFFVKDCPPNELASSCQIFWSACNFLCTEPNRLISSRRNCLIGSQDL

SEQ ID NO: 98951 - protein, 3616 aa, Homo sapiens
  Payload ID: 19748
  Gene Name: zinc finger homeobox 4
  Uniprot ID: Q86UP3
  ENSP ID: ENSP00000430497
METCDSPPISRQENGQSTSKLCGTTQLDNEVPEKVAGMEPDRENSSTDDNLKTDERKSEALLGFSVENAAATQVTSAKEIPCNECATSFPSLQKYMEHHCPNARLPVLKDDNESEISELEDSDVENLTGEIVYQPDGSAYIIEDSKESGQNAQTGANSKLFSTAMFLDSLASAGEKSDQSASAPMSFYPQIINTFHIASSLGKPFTADQAFPNTSALAGVGPVLHSFRVYDLRHKREKDYLTSDGSAKNSCVSKDVPNNVDLSKFDGCVSDGKRKPVLMCFLCKLSFGYIRSFVTHAVHDHRMTLNDEEQKLLSNKCVSAIIQGIGKDKEPLISFLEPKKSTSVYPHFSTTNLIGPDPTFRGLWSAFHVENGDSLPAGFAFLKGSASTSSSAEQPLGITQMPKAEVNLGGLSSLVVNTPITSVSLSHSSSESSKMSESKDQENNCERPKESNVLHPNGECPVKSEPTEPGDEDEEDAYSNELDDEEVLGELTDSIGNKDFPLLNQSISPLSSSVLKFIEKGTSSSSATVSDDTEKKKQTAAVRASGSVASNYGISGKDFADASASKDSATAAHPSEIARGDEDSSATPHQHGFTPSTPGTPGPGGDGSPGSGIECPKCDTVLGSSRSLGGHMTMMHSRNSCKTLKCPKCNWHYKYQQTLEAHMKEKHPEPGGSCVYCKTGQPHPRLARGESYTCGYKPFRCEVCNYSTTTKGNLSIHMQSDKHLNNVQNLQNGNGEQVFGHSAPAPNTSLSGCGTPSPSKPKQKPTWRCEVCDYETNVARNLRIHMTSEKHMHNMMLLQQNMKQIQHNLHLGLAPAEAELYQYYLAQNIGLTGMKLENPADPQLMINPFQLDPATAAALAPGLVNNELPPEIRLASGQLMGDDLSLLTAGELSPYISDPALKLFQCAVCNKFTSDSLEALSVHVSSERSLPEEEWRAVIGDIYQCKLCNYNTQLKANFQLHCKTDKHMQKYQLVAHIKEGGKSNEWRLKCIAIGNPVHLKCNACDYYTNSVDKLRLHTTNHRHEAALKLYKHLQKQEGAVNPESCYYYCAVCDYTTKVKLNLVQHVRSVKHQQTEGLRKLQLHQQGLAPEEDNLSEIFFVKDCPPNELETASLGARTCDDDLTEQQLRSTSEEQSEEAEGAIKPTAVAEDDEKDTSERDNSEGKNSNKDSGIITPEKELKVSVAGGTQPLLLAKEEDVATKRSKPTEDNKFCHEQFYQCPYCNYNSRDQSRIQMHVLSQHSVQPVICCPLCQDVLSNKMHLQLHLTHLHSVSPDCVEKLLMTVPVPDVMMPNSMLLPAAASEKSERDTPAAVTAEGSGKYSGESPMDDKSMAGLEDSKANVEVKNEEQKPTKEPLEVSEWNKNSSKDVKIPDTLQDQLNEQQKRQPLSVSDRHVYKYRCNHCSLAFKTMQKLQIHSQYHAIRAATMCNLCQRSFRTFQALKKHLEAGHPELSEAELQQLYASLPVNGELWAESETMSQDDHGLEQEMEREYEVDHEGKASPVGSDSSSIPDDMGSEPKRTLPFRKGPNFTMEKFLDPSRPYKCTVCKESFTQKNILLVHYNSVSHLHKLKKVLQEASSPVPQETNSNTDNKPYKCSICNVAYSQSSTLEIHMRSVLHQTKARAAKLEPSGHVAGGHSIAANVNSPGQGMLDSMSLAAVNSKDTHLDAKELNKKQTPDLISAQPAHHPPQSPAQIQMQLQHELQQQAAFFQPQFLNPAFLPHFPMTPEALLQFQQPQFLFPFYIPGTEFSLGPDLGLPGSATFGMPGMTGMAGSLLEDLKQQIQTQHHVGQTQLQILQQQAQQYQATQPQLQPQKQQQQPPPPQQQQQQQASKLLKQEQSNIVSADCQIMKDVPSYKEAEDISEKPEKPKQEFISEGEGLKEGKDTKKQKSLEPSIPPPRIASGARGNAAKALLENFGFELVIQYNENRQKVQKKGKSGEGENTDKLECGTCGKLFSNVLILKSHQEHVHGQFFPYAALEKFARQYREAYDKLYPISPSSPETPPPPPPPPPLPPAPPQPSSMGPVKIPNTVSTPLQAPPPTPPPPPPPPPPPPPPPPPPPPSAPPQVQLPVSLDLPLFPSIMMQPVQHPALPPQLALQLPQMDALSADLTQLCQQQLGLDPNFLRHSQFKRPRTRITDDQLKILRAYFDINNSPSEEQIQEMAEKSGLSQKVIKHWFRNTLFKERQRNKDSPYNFSNPPITVLEDIRIDPQPTSLEHYKSDASFSKRSSRTRFTDYQLRVLQDFFDTNAYPKDDEIEQLSTVLNLPTRVIVVWFQNARQKARKSYENQAETKDNEKRELTNERYIRTSNMQYQCKKCNVVFPRIFDLITHQKKQCYKDEDDDAQDESQTEDSMDATDQVVYKHCTVSGQTDAAKNAAAPAASSGSGTSTPLIPSPKPEPEKTSPKPEYPAEKPKQSDPSPPSQGTKPALPLASTSSDPPQASTAQPQPQPQPPKQPQLIGRPPSASQTPVPSSPLQISMTSLQNSLPPQLLQYQCDQCTVAFPTLELWQEHQHMHFLAAQNQFLHSPFLERPMDMPYMIFDPNNPLMTGQLLGSSLTQMPPQASSSHTTAPTTVAASLKRKLDDKEDNNCSEKEGGNSGEDQHRDKRLRTTITPEQLEILYEKYLLDSNPTRKMLDHIAREVGLKKRVVQVWFQNTRARERKGQFRAVGPAQSHKRCPFCRALFKAKSALESHIRSRHWNEGKQAGYSLPPSPLISTEDGGESPQKYIYFDYPSLPLTKIDLSSENELASTVSTPVSKTAELSPKNLLSPSSFKAECSEDVENLNAPPAEAGYDQNKTDFDETSSINTAISDATTGDEGNTEMESTTGSSGDVKPALSPKEPKTLDTLPKPATTPTTEVCDDKFLFSLTSPSIHFNDKDGDHDQSFYITDDPDDNADRSETSSIADPSSPNPFGSSNPFKSKSNDRPGHKRFRTQMSNLQLKVLKACFSDYRTPTMQECEMLGNEIGLPKRVVQVWFQNARAKEKKFKINIGKPFMINQGGTEGTKPECTLCGVKYSARLSIRDHIFSKQHISKVRETVGSQLDREKDYLAPTTVRQLMAQQELDRIKKASDVLGLTVQQPGMMDSSSLHGISLPTAYPGLPGLPPVLLPGMNGPSSLPGFPQNSNTLTPPGAGMLGFPTSATSSPALSLSSAPTKPLLQTPPPPPPPPPPPPSSSLSGQQTEQQNKESEKKQTKPNKVKKIKEEELEATKPEKHPKKEEKISSALSVLGKVVGETHVDPIQLQALQNAIAGDPASFIGGQFLPYFIPGFASYFTPQLPGTVQGGYFPPVCGMESLFPYGPTMPQTLAGLSPGALLQQYQQYQQNLQESLQKQQKQQQEQQQKPVQAKTSKVESDQPQNSNDASETKEDKSTATESTKEEPQLESKSADFSDTYVVPFVKYEFICRKCQMMFTDEDAAVNHQKSFCYFGQPLIDPQETVLRVPVSKYQCLACDVAISGNEALSQHLQSSLHKEKTIKQAMRNAKEHVRLLPHSVCSPNPNTTSTSQSAASSNNTYPHLSCFSMKSWPNILFQASARRAASPPSSPPSLSLPSTVTSSLCSTSGVQTSLPTESCSDESDSELSQKLEDLDNSLEVKAKPASGLDGNFNSIRMDMFSV

SEQ ID NO: 98952 - protein, 3590 aa, Homo sapiens
  Payload ID: 19748
  Gene Name: zinc finger homeobox 4
  ENSP ID: ENSP00000430848
METCDSPPISRQENGQSTSKLCGTTQLDNEVPEKVAGMEPDRENSSTDDNLKTDERKSEALLGFSVENAAATQVTSAKEIPCNECATSFPSLQKYMEHHCPNARLPVLKDDNESEISELEDSDVENLTGEIVYQPDGSAYIIEDSKESGQNAQTGANSKLFSTAMFLDSLASAGEKSDQSASAPMSFYPQIINTFHIASSLGKPFTADQAFPNTSALAGVGPVLHSFRVYDLRHKREKDYLTSDGSAKNSCVSKDVPNNVDLSKFDGCVSDGKRKPVLMCFLCKLSFGYIRSFVTHAVHDHRMTLNDEEQKLLSNKCVSAIIQGIGKDKEPLISFLEPKKSTSVYPHFSTTNLIGPDPTFRGLWSAFHVENGDSLPAGFAFLKGSASTSSSAEQPLGITQMPKAEVNLGGLSSLVVNTPITSVSLSHSSSESSKMSESKDQENNCERPKESNVLHPNGECPVKSEPTEPGDEDEEDAYSNELDDEEVLGELTDSIGNKDFPLLNQSISPLSSSVLKFIEKGTSSSSATVSDDTEKKKQTAAVRASGSVASNYGISGKDFADASASKDSATAAHPSEIARGDEDSSATPHQHGFTPSTPGTPGPGGDGSPGSGIECPKCDTVLGSSRSLGGHMTMMHSRNSCKTLKCPKCNWHYKYQQTLEAHMKEKHPEPGGSCVYCKTGQPHPRLARGESYTCGYKPFRCEVCNYSTTTKGNLSIHMQSDKHLNNVQNLQNGNGEQVFGHSAPAPNTSLSGCGTPSPSKPKQKPTWRCEVCDYETNVARNLRIHMTSEKHMHNMMLLQQNMKQIQHNLHLGLAPAEAELYQYYLAQNIGLTGMKLENPADPQLMINPFQLDPATAAALAPGLGELSPYISDPALKLFQCAVCNKFTSDSLEALSVHVSSERSLPEEEWRAVIGDIYQCKLCNYNTQLKANFQLHCKTDKHMQKYQLVAHIKEGGKSNEWRLKCIAIGNPVHLKCNACDYYTNSVDKLRLHTTNHRHEAALKLYKHLQKQEGAVNPESCYYYCAVCDYTTKVKLNLVQHVRSVKHQQTEGLRKLQLHQQGLAPEEDNLSEIFFVKDCPPNELETASLGARTCDDDLTEQQLRSTSEEQSEEAEGAIKPTAVAEDDEKDTSERDNSEGKNSNKDSGIITPEKELKVSVAGGTQPLLLAKEEDVATKRSKPTEDNKFCHEQFYQCPYCNYNSRDQSRIQMHVLSQHSVQPVICCPLCQDVLSNKMHLQLHLTHLHSVSPDCVEKLLMTVPVPDVMMPNSMLLPAAASEKSERDTPAAVTAEGSGKYSGESPMDDKSMAGLEDSKANVEVKNEEQKPTKEPLEVSEWNKNSSKDVKIPDTLQDQLNEQQKRQPLSVSDRHVYKYRCNHCSLAFKTMQKLQIHSQYHAIRAATMCNLCQRSFRTFQALKKHLEAGHPELSEAELQQLYASLPVNGELWAESETMSQDDHGLEQEMEREYEVDHEGKASPVGSDSSSIPDDMGSEPKRTLPFRKGPNFTMEKFLDPSRPYKCTVCKESFTQKNILLVHYNSVSHLHKLKKVLQEASSPVPQETNSNTDNKPYKCSICNVAYSQSSTLEIHMRSVLHQTKARAAKLEPSGHVAGGHSIAANVNSPGQGMLDSMSLAAVNSKDTHLDAKELNKKQTPDLISAQPAHHPPQSPAQIQMQLQHELQQQAAFFQPQFLNPAFLPHFPMTPEALLQFQQPQFLFPFYIPGTEFSLGPDLGLPGSATFGMPGMTGMAGSLLEDLKQQIQTQHHVGQTQLQILQQQAQQYQATQPQLQPQKQQQQPPPPQQQQQQQASKLLKQEQSNIVSADCQIMKDVPSYKEAEDISEKPEKPKQEFISEGEGLKEGKDTKKQKSLEPSIPPPRIASGARGNAAKALLENFGFELVIQYNENRQKVQKKGKSGEGENTDKLECGTCGKLFSNVLILKSHQEHVHGQFFPYAALEKFARQYREAYDKLYPISPSSPETPPPPPPPPPLPPAPPQPSSMGPVKIPNTVSTPLQAPPPTPPPPPPPPPPPPPPPPPPPPSAPPQVQLPVSLDLPLFPSIMMQPVQHPALPPQLALQLPQMDALSADLTQLCQQQLGLDPNFLRHSQFKRPRTRITDDQLKILRAYFDINNSPSEEQIQEMAEKSGLSQKVIKHWFRNTLFKERQRNKDSPYNFSNPPITVLEDIRIDPQPTSLEHYKSDASFSKRSSRTRFTDYQLRVLQDFFDTNAYPKDDEIEQLSTVLNLPTRVIVVWFQNARQKARKSYENQAETKDNEKRELTNERYIRTSNMQYQCKKCNVVFPRIFDLITHQKKQCYKDEDDDAQDESQTEDSMDATDQVVYKHCTVSGQTDAAKNAAAPAASSGSGTSTPLIPSPKPEPEKTSPKPEYPAEKPKQSDPSPPSQGTKPALPLASTSSDPPQASTAQPQPQPQPPKQPQLIGRPPSASQTPVPSSPLQISMTSLQNSLPPQLLQYQCDQCTVAFPTLELWQEHQHMHFLAAQNQFLHSPFLERPMDMPYMIFDPNNPLMTGQLLGSSLTQMPPQASSSHTTAPTTVAASLKRKLDDKEDNNCSEKEGGNSGEDQHRDKRLRTTITPEQLEILYEKYLLDSNPTRKMLDHIAREVGLKKRVVQVWFQNTRARERKGQFRAVGPAQSHKRCPFCRALFKAKSALESHIRSRHWNEGKQAGYSLPPSPLISTEDGGESPQKYIYFDYPSLPLTKIDLSSENELASTVSTPVSKTAELSPKNLLSPSSFKAECSEDVENLNAPPAEAGYDQNKTDFDETSSINTAISDATTGDEGNTEMESTTGSSGDVKPALSPKEPKTLDTLPKPATTPTTEVCDDKFLFSLTSPSIHFNDKDGDHDQSFYITDDPDDNADRSETSSIADPSSPNPFGSSNPFKSKSNDRPGHKRFRTQMSNLQLKVLKACFSDYRTPTMQECEMLGNEIGLPKRVVQVWFQNARAKEKKFKINIGKPFMINQGGTEGTKPECTLCGVKYSARLSIRDHIFSKQHISKVRETVGSQLDREKDYLAPTTVRQLMAQQELDRIKKASDVLGLTVQQPGMMDSSSLHGISLPTAYPGLPGLPPVLLPGMNGPSSLPGFPQNSNTLTPPGAGMLGFPTSATSSPALSLSSAPTKPLLQTPPPPPPPPPPPPSSSLSGQQTEQQNKESEKKQTKPNKVKKIKEEELEATKPEKHPKKEEKISSALSVLGKVVGETHVDPIQLQALQNAIAGDPASFIGGQFLPYFIPGFASYFTPQLPGTVQGGYFPPVCGMESLFPYGPTMPQTLAGLSPGALLQQYQQYQQNLQESLQKQQKQQQEQQQKPVQAKTSKVESDQPQNSNDASETKEDKSTATESTKEEPQLESKSADFSDTYVVPFVKYEFICRKCQMMFTDEDAAVNHQKSFCYFGQPLIDPQETVLRVPVSKYQCLACDVAISGNEALSQHLQSSLHKEKTIKQAMRNAKEHVRLLPHSVCSPNPNTTSTSQSAASSNNTYPHLSCFSMKSWPNILFQASARRAASPPSSPPSLSLPSTVTSSLCSTSGVQTSLPTESCSDESDSELSQKLEDLDNSLEVKAKPASGLDGNFNSIRMDMFSV

SEQ ID NO: 98953 - protein, 82 aa, Homo sapiens
  Payload ID: 19748
  Gene Name: zinc finger homeobox 4
  ENSP ID: ENSP00000431101
  MOD_RES (1)..(1): Any amino acid
XKVKLNLVQHVRSVKHQQTEGLRKLQLHQQGLAPEEDNLSEIFFVKDCPPNELETASLGARTCDDDLTEQQLRSTSAYLSTY

SEQ ID NO: 98954 - protein, 573 aa, Homo sapiens
  Payload ID: 19749
  Gene Name: zinc finger protein 10
  Uniprot ID: P21506
  ENSP ID: ENSP00000248211
MDAKSLTAWSRTLVTFKDVFVDFTREEWKLLDTAQQIVYRNVMLENYKNLVSLGYQLTKPDVILRLEKGEEPWLVEREIHQETHPDSETAFEIKSSVSSRSIFKDKQSCDIKMEGMARNDLWYLSLEEVWKCRDQLDKYQENPERHLRQVAFTQKKVLTQERVSESGKYGGNCLLPAQLVLREYFHKRDSHTKSLKHDLVLNGHQDSCASNSNECGQTFCQNIHLIQFARTHTGDKSYKCPDNDNSLTHGSSLGISKGIHREKPYECKECGKFFSWRSNLTRHQLIHTGEKPYECKECGKSFSRSSHLIGHQKTHTGEEPYECKECGKSFSWFSHLVTHQRTHTGDKLYTCNQCGKSFVHSSRLIRHQRTHTGEKPYECPECGKSFRQSTHLILHQRTHVRVRPYECNECGKSYSQRSHLVVHHRIHTGLKPFECKDCGKCFSRSSHLYSHQRTHTGEKPYECHDCGKSFSQSSALIVHQRIHTGEKPYECCQCGKAFIRKNDLIKHQRIHVGEETYKCNQCGIIFSQNSPFIVHQIAHTGEQFLTCNQCGTALVNTSNLIGYQTNHIRENAY

SEQ ID NO: 98955 - protein, 439 aa, Homo sapiens
  Payload ID: 19749
  Gene Name: zinc finger protein 10
  ENSP ID: ENSP00000384893
MDAKSLTAWSRTLVTFKDVFVDFTREEWKLLDTAQQIVYRNVMLENYKNLVSLGYQLTKPDVILRLEKGEEPWLVEREIHQETHPDSETAFEIKSSVSSRSIFKDKQSCDIKMEGMARNDLWYLSLEEVWKCRDQLDKYQENPERHLRHQLIHTGEKPYECKECGKSFSRSSHLIGHQKTHTGEEPYECKECGKSFSWFSHLVTHQRTHTGDKLYTCNQCGKSFVHSSRLIRHQRTHTGEKPYECPECGKSFRQSTHLILHQRTHVRVRPYECNECGKSYSQRSHLVVHHRIHTGLKPFECKDCGKCFSRSSHLYSHQRTHTGEKPYECHDCGKSFSQSSALIVHQRIHTGEKPYECCQCGKAFIRKNDLIKHQRIHVGEETYKCNQCGIIFSQNSPFIVHQIAHTGEQFLTCNQCGTALVNTSNLIGYQTNHIRENAY

SEQ ID NO: 98956 - protein, 573 aa, Homo sapiens; identical to SEQ ID NO: 98954
  Payload ID: 19749
  Gene Name: zinc finger protein 10
  Uniprot ID: P21506
  ENSP ID: ENSP00000393814

SEQ ID NO: 98957 - protein, 47 aa, Homo sapiens
  Payload ID: 19749
  Gene Name: zinc finger protein 10
  ENSP ID: ENSP00000438232
MDAKSLTAWSRTLVTFKDVFVDFTREEWKLLDTAQQIVYRNVMLENY

SEQ ID NO: 98958 - protein, 72 aa, Homo sapiens
  Payload ID: 19749
  Gene Name: zinc finger protein 10
  ENSP ID: ENSP00000441339
MDAKSLTAWSRTLVTFKDVFVDFTREEWKLLDTAQQIVYRNVMLENYKNLVSLGYQLTKPDVILRLEKGEEP

SEQ ID NO: 98959 - protein, 43 aa, Homo sapiens
  Payload ID: 19749
  Gene Name: zinc finger protein 10
  ENSP ID: ENSP00000445997
MDAKSLTAWSRTLVTFKDVFVDFTREEWKLLDTAQQIVYRNVM

SEQ ID NO: 98960 - protein, 542 aa, Homo sapiens
  Payload ID: 19750
  Gene Name: zinc finger protein 100
  Uniprot ID: Q8IYN0
  ENSP ID: ENSP00000351042
MDDPRYGMCPLKGASGCPGAERSLLVQSYFEKGPLTFRDVAIEFSLEEWQCLDSAQQGLYRKVMLENYRNLVFLAGIALTKPDLITCLEQGKEPWNIKRHEMVAKPPVICSHFPQDLWAEQDIKDSFQEAILKKYGKYGHDNLQLQKGCKSVDECKVHKEHDNKLNQCLITTQSNIFQCDPSAKVFHTFSNSNRHKIRHTRKKPFKCKKCEKSFCMLLHLTQHKRFHITENSYQCKDCGKAFNWFSTLTTHRRIHTGEKPYKCEECGKAFNRSSHLTTHKIIHTGEKPYRCEECGKAFNRSSHLTTHKRIHTGVKPYKCTECGKAFNRSSHLTTHRIIHTGEKPYKCEECGKAFNQSSTLTTHKITHAGEKPYKCEECGKAFYRFSYLTKHKTSHTGEKFYKCEECGKGFNWSSALTKHKRIHTGEKPYKCEECGKAFNESSNLTTHKMIHTGEKPYKCDECGKAFNRSSQLTAHKMIHTGEKPYKCEECGKAFNRSSTLTKHKITHTGEKSYKWEECGKDFNQSLSLIKQNNSYWRETLQM

SEQ ID NO: 98961 - protein, 478 aa, Homo sapiens
  Payload ID: 19750
  Gene Name: zinc finger protein 100
  ENSP ID: ENSP00000445201
MLENYRNLVFLGIALTKPDLITCLEQGKEPWNIKRHEMVAKPPVICSHFPQDLWAEQDIKDSFQEAILKKYGKYGHDNLQLQKGCKSVDECKVHKEHDNKLNQCLITTQSNIFQCDPSAKVFHTFSNSNRHKIRHTRKKPFKCKKCEKSFCMLLHLTQHKRFHITENSYQCKDCGKAFNWFSTLTTHRRIHTGEKPYKCEECGKAFNRSSHLTTHKIIHTGEKPYRCEECGKAFNRSSHLTTHKRIHTGVKPYKCTECGKAFNRSSHLTTHRIIHTGEKPYKCEECGKAFNQSSTLTTHKITHAGEKPYKCEECGKAFYRFSYLTKHKTSHTGEKFYKCEECGKGFNWSSALTKHKRIHTGEKPYKCEECGKAFNESSNLTTHKMIHTGEKPYKCDECGKAFNRSSQLTAHKMIHTGEKPYKCEECGKAFNRSSTLTKHKITHTGEKSYKWEECGKDFNQSLSLIKQNNSYWRETLQM

SEQ ID NO: 98962 - protein, 156 aa, Homo sapiens
  Payload ID: 19750
  Gene Name: zinc finger protein 100
  ENSP ID: ENSP00000471057
MDDPRYGMCPLKGASGCPGAERSLLVQSYFEKGPLTFRDVAIEFSLEEWQCLDSAQQGLYRKVMLENYRNLVFLAGIALTKPDLITCLEQGKEPWNIKRHEMVAKPPDGVSLCHQVGVQWRDLGSLQPPPPGFKQSSCLSLLSSCDYRHMPPRQAN

SEQ ID NO: 98963 - protein, 63 aa, Homo sapiens
  Payload ID: 19750
  Gene Name: zinc finger protein 100
  ENSP ID: ENSP00000471371
MLENYRNLVFLGIALTKPDLITCLEQGKEPWNIKRHEMVAKPPVICSHFPQDLWAEQDIKDSF

SEQ ID NO: 98964 - protein, 566 aa, Homo sapiens
  Payload ID: 19750
  Gene Name: zinc finger protein 100
  ENSP ID: ENSP00000476534
MVDPRYGMCPLKGASGCPGAERSLLVQSYFEKGPLTFRDVAIEFSLEEWQCLDSAQQGLYRKVMLENYRNLVFLGIALTKPDLITCLEQGKEPWNIKRHEMVAKPPVICSHFPQDLWAEQDIKDSFQEAILKKYGKYGHDNLQLQKGCKSVDECKVHKEHDNKLNQCLITTQSNIFQCDPSAKVFHTFSNSNRHKIRHTRKKPFKCKKCEKSFCMLLHLTQHKRFHITENSYQCKDCGKAFNWFSTLTTHRRIHTGEKPYKCEECGKAFNRSSHLTTHKIIHTGEKPYRCEECGKAFNRSSHLTTHKRIHTGVKPYKCTECGKAFNRSSHLTTHRIIHTGEKPYKCEECGKAFNQSSTLTTHKITHAGEKPYKCEECGKAFYRFSYLTKHKTSHTGEKFYKCEECGKGFNWSSALTKHKRIHTGEKPYKCEECGKAFNESSNLTTHKMIHTGEKPYKCDECGKAFNRSSQLTAHKMIHTGEKPYKCEECGKAFNRSSTLTKHKITHTGEKSYKWEECGKDFNQSLSLIKITHTGEKPYKCEKCGKAFYQSSTLTKHKNSYWRELLL

SEQ ID NO: 98965 - protein, 542 aa, Homo sapiens; identical to SEQ ID NO: 98960
  Payload ID: 19750
  Gene Name: zinc finger protein 100
  Uniprot ID: Q8IYN0
  ENSP ID: ENSP00000483779

SEQ ID NO: 98966 - protein, 478 aa, Homo sapiens; identical to SEQ ID NO: 98961
  Payload ID: 19750
  Gene Name: zinc finger protein 100
  ENSP ID: ENSP00000485113

SEQ ID NO: 98967 - protein, 156 aa, Homo sapiens; identical to SEQ ID NO: 98962
  Payload ID: 19750
  Gene Name: zinc finger protein 100
  ENSP ID: ENSP00000485132

SEQ ID NO: 98968 - protein, 63 aa, Homo sapiens; identical to SEQ ID NO: 98963
  Payload ID: 19750
  Gene Name: zinc finger protein 100
  ENSP ID: ENSP00000485182

SEQ ID NO: 98969 - protein, 436 aa, Homo sapiens
  Payload ID: 19751
  Gene Name: zinc finger protein 101
  Uniprot ID: Q8IZC7
  ENSP ID: ENSP00000319716
MDSVAFEDVAVNFTQEEWALLSPSQKNLYRDVTLETFRNLASVGIQWKDQDIENLYQNLGIKLRSLVERLCGRKEGNEHRETFSQIPDCHLNKKSQTGVKPCKCSVCGKVFLRHSFLDRHMRAHAGHKRSECGGEWRETPRKQKQHGKASISPSSGARRTVTPTRKRPYECKVCGKAFNSPNLFQIHQRTHTGKRSYKCREIVRAFTVSSFFRKHGKMHTGEKRYECKYCGKPIDYPSLFQIHVRTHTGEKPYKCKQCGKAFISAGYLRTHEIRSHALEKSHQCQECGKKLSCSSSLHRHERTHSGGKLYECQKCAKVFRCPTSLQAHERAHTGERPYECNKCGKTFNYPSCFRRHKKTHSGEKPYECTRCGKAFGWCSSLRRHEMTHTGEKPFDCKQCGKVFTFSNYLRLHERTHLAGRSQCFGRRQGDHLSPGV

SEQ ID NO: 98970 - protein, 316 aa, Homo sapiens
  Payload ID: 19751
  Gene Name: zinc finger protein 101
  Uniprot ID: Q8IZC7
  ENSP ID: ENSP00000400952
MRAHAGHKRSECGGEWRETPRKQKQHGKASISPSSGARRTVTPTRKRPYECKVCGKAFNSPNLFQIHQRTHTGKRSYKCREIVRAFTVSSFFRKHGKMHTGEKRYECKYCGKPIDYPSLFQIHVRTHTGEKPYKCKQCGKAFISAGYLRTHEIRSHALEKSHQCQECGKKLSCSSSLHRHERTHSGGKLYECQKCAKVFRCPTSLQAHERAHTGERPYECNKCGKTFNYPSCFRRHKKTHSGEKPYECTRCGKAFGWCSSLRRHEMTHTGEKPFDCKQCGKVFTFSNYLRLHERTHLAGRSQCFGRRQGDHLSPGV

SEQ ID NO: 98971 - protein, 61 aa, Homo sapiens
  Payload ID: 19751
  Gene Name: zinc finger protein 101
  ENSP ID: ENSP00000466697
MDSVAFEDVAVNFTQEEWALLSPSQKNLYRDVTLETFRNLASESNGKTRTLRICTKTWGLS

SEQ ID NO: 98972 - protein, 147 aa, Homo sapiens
  Payload ID: 19751
  Gene Name: zinc finger protein 101
  ENSP ID: ENSP00000466744
  MOD_RES (1)..(1): Any amino acid
XLSCSSSLHRHERTHSGGKLYECQKCAKVFRCPTSLQAHERAHTGERPYECNKCGKTFNYPSCFRRHKKTHSGEKPYECTRCGKAFGWCSSLRRHEMTHTGEKPFDCKQCGKVFTFSNYLRLHERTHLAGRSQCFGRRQGDHLSPGV

SEQ ID NO: 98973 - protein, 58 aa, Homo sapiens
  Payload ID: 19751
  Gene Name: zinc finger protein 101
  ENSP ID: ENSP00000467112
MRAHAGHKRSECGGEWRETPRKQKQHGKASISPSSGARRTVTPTRKRPYECKVCGKAF

SEQ ID NO: 98974 - protein, 436 aa, Homo sapiens; identical to SEQ ID NO: 98969
  Payload ID: 19751
  Gene Name: zinc finger protein 101
  Uniprot ID: Q8IZC7
  ENSP ID: ENSP00000468049

SEQ ID NO: 98975 - protein, 1883 aa, Homo sapiens
  Payload ID: 19752
  Gene Name: zinc finger protein 106
  Uniprot ID: Q9H2Y7
  ENSP ID: ENSP00000263805
MPVGRIECPSSPSFPRDISHECRVCGVTEVGLSAYAKHISGQLHKDNVDAQEREDDGKGEEEEEDYFDKELIQLIKQRKEQSRQDEPSNSNQEINSDDRRPQWRREDRIPYQDRESYSQPAWHHRGPPQRDWKWEKDGFNNTRKNSFPHSLRNGGGPRGRSGWHKGVAGGSSTWFHNHSNSGGGWLSNSGAVDWNHNGTGRNSSWLSEGTGGFSSWHMNNSNGNWKSSVRSTNNWNYSGPGDKFQPGRNRNSNCQMEDMTMLWNKKSNKSNKYSHDRYNWQRQENDKLGTVATYRGPSEGFTSDKFPSEGLLDFNFEQLESQTTKQADTATSKVSGKNGSAAREKPRRWTPYPSQKTLDLQSGLKDITGNKSEMIEKPLFDFSLITTGIQEPQTDETRNSPTQKTQKEIHTGSLNHKASSDSAASFEVVRQCPTAEKPEQEHTPNKMPSLKSPLLPCPATKSLSQKQDPKNISKNTKTNFFSPGEHSNPSNKPTVEDNHGPYISKLRSSCPHVLKGNKSTFGSQKQSGDNLNDTLRKAKEVLQCHESLQNPLLSTSKSTRNYAKASRNVEESEKGSLKIEFQVHALEDESDGETSDTEKHGTKIGTLGSATTELLSGSTRTADEKEEDDRILKTSRELSTSPCNPIVRQKESELQMTSAASPHPGLLLDLKTSLEDAQVDDSIKSHVSYETEGFESASLDAELQKSDISQPSGPLLPELSKLGFPASLQRDLTRHISLKSKTGVHLPEPNLNSARRIRNISGHRKSETEKESGLKPTLRQILNASRRNVNWEQVIQQVTKKKQELGKGLPRFGIEMVPLVQNEQEALDLDGEPDLSSLEGFQWEGVSISSSPGLARKRSLSESSVIMDRAPSVYSFFSEEGTGKENEPQQMVSPSNSLRAGQSQKATMHLKQEVTPRAASLRTGERAENVATQRRHSAQLSSDHIIPLMHLAKDLNSQERSIPPSENQNSQESNGEGNCLSSSASSALAISSLADAATDSSCTSGAEQNDGQSIRKKRRATGDGSSPELPSLERKNKRRKIKGKKERSQVDQLLNISLREEELSKSLQCMDNNLLQARAALQTAYVEVQRLLMLKQQITMEMSALRTHRIQILQGLQETYEPSEHPDQVPCSLTRERRNSRSQTSIDAALLPTPFFPLFLEPPSSHVSPSPTGASLQITTSPTFQTHGSVPAPDSSVQIKQEPMSPEQDENVNAVPPSSACNVSKELLEANREISDSCPVYPVITARLSLPESTESFHEPSQELKFSVEQRNTRNRENSPSSQSAGLSSINKEGEEPTKGNSGSEACTSSFLRLSFASETPLEKEPHSPADQPEQQAESTLTSAETRGSKKKKKLRKKKSLRAAHVPENSDTEQDVLTVKPVRKVKAGKLIKGGKVTTSTWEDSRTGREQESVRDEPDSDSSLEVLEIPNPQLEVVAIDSSESGEEKPDSPSKKDIWNSTEQNPLETSRSGCDEVSSTSEIGTRYKDGIPVSVAETQTVISSIKGSKNSSEISSEPGDDDEPTEGSFEGHQAAVNAIQIFGNLLYTCSADKTVRVYNLVSRKCIGVFEGHTSKVNCLLVTQTSGKNAALYTGSSDHTIRCYNVKSRECVEQLQLEDRVLCLHSRWRILYAGLANGTVVTFNIKNNKRLEIFECHGPRAVSCLATAQEGARKLLVVGSYDCTISVRDARNGLLLRTLEGHSKTILCMKVVNDLVFSGSSDQSVHAHNIHTGELVRIYKGHNHAVTVVNILGKVMVTACLDKFVRVYELQSHDRLQVYGGHKDMIMCMTIHKSMIYTGCYDGSIQAVRLNLMQNYRCWWHGCSLIFGVVDHLKQHLLTDHTNPNFQTLKCRWKNCDAFFTARKGSKQDAAGHIERHAEDDSKIDS

SEQ ID NO: 98976 - protein, 201 aa, Homo sapiens
  Payload ID: 19752
  Gene Name: zinc finger protein 106
  ENSP ID: ENSP00000454882
MVRERKCILCHIVYSSKKEMDEHMRSMLHHRELENLKGRDISHECRVCGVTEVGLSAYAKHISGQLHKDNVDAQEREDDGKGEEEEEDYFDKELIQLIKQRKEQSRQDEPSNSNQEINSDDRRPQWRREDRIPYQDRESYSQPAWHHRGPPQRDWKWEKDGFNNTRKNSFPHSLRNGGGPRGRSGWHKGVAGGSSTWFHNH

SEQ ID NO: 98977 - protein, 816 aa, Homo sapiens
  Payload ID: 19752
  Gene Name: zinc finger protein 106
  ENSP ID: ENSP00000455049
MNNSNGNWKSSVRSTNNWNYSGPGDKFQPGRNRNSNCQMEDMTMLWNKKSNKSNKYSHDRYNWQRQENDKLGTVATYRGPSEGFTSDKFPSEGLLDFNFEQLESQTTKQADTATSKVSGKNGSAAREKPRRWTPYPSQKTLDLQSGLKDITGNKSEMIEKPLFDFSLITTGIQEPQTDETRNSPTQKTQKEIHTGSLNHKASSDSAASFEVVRQCPTAEKPEQEHTPNKMPSLKSPLLPCPATKSLSQKQDPKNISKNTKTNFFSPGEHSNPSNKPTVEDNHGPYISKLRSSCPHVLKGNKSTFGSQKQSGDNLNDTLRKAKEVLQCHESLQNPLLSTSKSTRNYAKASRNVEESEKGSLKIEFQVHALEDESDGETSDTEKHGTKIGTLGSATTELLSGSTRTADEKEEDDRILKTSRELSTSPCNPIVRQKESELQMTSAASPHPGLLLDLKTSLEDAQVDDSIKSHVSYETEGFESASLDAELQKSDISQPSGPLLPELSKLGFPASLQRDLTRHISLKSKTGVHLPEPNLNSARRIRNISGHRKSETEKESGLKPTLRQILNASRRNVNWEQVIQQVTKKKQELGKGLPRFGIEMVPLVQNEQEALDLDGEPDLSSLEGFQWEGVSISSSPGLARKRSLSESSVIMDRAPSVYSFFSEEGTGKENEPQQMVSPSNSLRAGQSQKATMHLKQEVTPRAASLRTGERAENVATQRRHSAQLSSDHIIPLMHLAKDLNSQERSIPPSENQNSQESNGEGNCLSSSASSALAISSLADAATDSSCTSGAEQNDGQSIRKKRRATGDGSSPELPSLE

SEQ ID NO: 98978 - protein, 1111 aa, Homo sapiens
  Payload ID: 19752
  Gene Name: zinc finger protein 106
  Uniprot ID: Q9H2Y7
  ENSP ID: ENSP00000455674
MVRERKCILCHIVYSSKKEMDEHMRSMLHHRELENLKGRFGIEMVPLVQNEQEALDLDGEPDLSSLEGFQWEGVSISSSPGLARKRSLSESSVIMDRAPSVYSFFSEEGTGKENEPQQMVSPSNSLRAGQSQKATMHLKQEVTPRAASLRTGERAENVATQRRHSAQLSSDHIIPLMHLAKDLNSQERSIPPSENQNSQESNGEGNCLSSSASSALAISSLADAATDSSCTSGAEQNDGQSIRKKRRATGDGSSPELPSLERKNKRRKIKGKKERSQVDQLLNISLREEELSKSLQCMDNNLLQARAALQTAYVEVQRLLMLKQQITMEMSALRTHRIQILQGLQETYEPSEHPDQVPCSLTRERRNSRSQTSIDAALLPTPFFPLFLEPPSSHVSPSPTGASLQITTSPTFQTHGSVPAPDSSVQIKQEPMSPEQDENVNAVPPSSACNVSKELLEANREISDSCPVYPVITARLSLPESTESFHEPSQELKFSVEQRNTRNRENSPSSQSAGLSSINKEGEEPTKGNSGSEACTSSFLRLSFASETPLEKEPHSPADQPEQQAESTLTSAETRGSKKKKKLRKKKSLRAAHVPENSDTEQDVLTVKPVRKVKAGKLIKGGKVTTSTWEDSRTGREQESVRDEPDSDSSLEVLEIPNPQLEVVAIDSSESGEEKPDSPSKKDIWNSTEQNPLETSRSGCDEVSSTSEIGTRYKDGIPVSVAETQTVISSIKGSKNSSEISSEPGDDDEPTEGSFEGHQAAVNAIQIFGNLLYTCSADKTVRVYNLVSRKCIGVFEGHTSKVNCLLVTQTSGKNAALYTGSSDHTIRCYNVKSRECVEQLQLEDRVLCLHSRWRILYAGLANGTVVTFNIKNNKRLEIFECHGPRAVSCLATAQEGARKLLVVGSYDCTISVRDARNGLLLRTLEGHSKTILCMKVVNDLVFSGSSDQSVHAHNIHTGELVRIYKGHNHAVTVVNILGKVMVTACLDKFVRVYELQSHDRLQVYGGHKDMIMCMTIHKSMIYTGCYDGSIQAVRLNLMQNYRCWWHGCSLIFGVVDHLKQHLLTDHTNPNFQTLKCRWKNCDAFFTARKGSKQDAAGHIERHAEDDSKIDS

SEQ ID NO: 98979 - protein, 217 aa, Homo sapiens
  Payload ID: 19752
  Gene Name: zinc finger protein 106
  ENSP ID: ENSP00000456191
EDRVLCLHSRWRILYAGLANGTVVTFNIKNNKRLEIFECHGPRAVSCLATAQEGARKLLVVGSYDCTISVRDARNGLLLRTLEGHSKTILCMKVVNDLVFSGSSDQSVHAHNIHTGELVRIYKGHNHAVTVVNILGKVMVTACLDKFVRVYELQSHDRLQVYGGHKDMIMCMTIHKSMIYTGCYDGSIQAVRLNLMQNYRCWERLQWFLLDPKNVKN

SEQ ID NO: 98980 - protein, 850 aa, Homo sapiens
  Payload ID: 19752
  Gene Name: zinc finger protein 106
  ENSP ID: ENSP00000456604
  MOD_RES (1)..(1): Any amino acid
XLMHLAKDLNSQERSIPPSENQNSQESNGEGNCLSSSASSALAISSLADAATDSSCTSGAEQNDGQSIRKKRRATGDGSSPELPSLERKNKRRKIKGKKERSQVDQLLNISLREEELSKSLQCMDNNLLQARAALQTAYVEVQRLLMLKQQITMEMSALRTHRIQILQGLQETYEPSEHPDQVPCSLTRERRNSRSQTSIDAALLPTPFFPLFLEPPSSHVSPSPTGASLQITTSPTFQTHGSVPAPDSSVQIKQEPMSPEQDENVNAVPPSSACNVSKELLEANKTPLEKEPHSPADQPEQQAESTLTSAETRGSKKKKKLRKKKSLRAAHVPENSDTEQDVLTVKPVRKVKAGKLIKGGKVTTSTWEDSRTGREQESVRDEPDSDSSLEVLEIPNPQLEVVAIDSSESGEEKPDSPSKKDIWNSTEQNPLETSRSGCDEVSSTSEIGTRYKDGIPVSVAETQTVISSIKGSKNSSEISSEPGDDDEPTEGSFEGHQAAVNAIQIFGNLLYTCSADKTVRVYNLVSRKCIGVFEGHTSKVNCLLVTQTSGKNAALYTGSSDHTIRCYNVKSRECVEQLQLEDRVLCLHSRWRILYAGLANGTVVTFNIKNNKRLEIFECHGPRAVSCLATAQEGARKLLVVGSYDCTISVRDARNGLLLRTLEGHSKTILCMKVVNDLVFSGSSDQSVHAHNIHTGELVRIYKGHNHAVTVVNILGKVMVTACLDKFVRVYELQSHDRLQVYGGHKDMIMCMTIHKSMIYTGCYDGSIQAVRLNLMQNYRCWWHGCSLIFGVVDHLKQHLLTDHTNPNFQTLKCRWKNCDAFFTARKGSKQDAAGHIERHAEDDSKIDS

SEQ ID NO: 98981 - protein, 431 aa, Homo sapiens
  Payload ID: 19752
  Gene Name: zinc finger protein 106
  ENSP ID: ENSP00000456845
MVRERKCILCHIVYSSKKEMDEHMRSMLHHRELENLKGRDISHECRVCGVTEVGLSAYAKHISGQLHKDNVDAQEREDDGKGEEEEEDYFDKELIQLIKQRKEQSRQDEPSNSNQEINSDDRRPQWRREDRIPYQDRESYSQPAWHHRGPPQRDWKWEKDGFNNTRKNSFPHSLRNGGGPRGRSGWHKGVAGGSSTWFHNHSNSGGGWLSNSGAVDWNHNGTGRNSSWLSEGTGGFSSWHMNNSNGNWKSSVRSTNNWNYSGPGDKFQPGRNRNSNCQMEDMTMLWNKKSNKSNKYSHDRYNWQRQENDKLGTVATYRGPSEGFTSDKFPSEGLLDFNFEQLESQTTKQADTATSKVSGKNGSAAREKPRRWTPYPSQKTLDLQSGLKDITGNKSEMIEKPLFDFSLITTGIQEPQTDETRNSPTQKTQKE

SEQ ID NO: 98982 - protein, 1068 aa, Homo sapiens
  Payload ID: 19752
  Gene Name: zinc finger protein 106
  ENSP ID: ENSP00000457637
MVPLVQNEQEALDLDGEPDLSSLEGFQWEGVSISSSPGLARKRSLSESSVIMDRAPSVYSFFSEEGTGKENEPQQMVSPSNSLRAGQSQKATMHLKQEVTPRAASLRTGERAENVATQRRHSAQLSSDHIIPLMHLAKDLNSQERSIPPSENQNSQESNGEGNCLSSSASSALAISSLADAATDSSCTSGAEQNDGQSIRKKRRATGDGSSPELPSLERKNKRRKIKGKKERSQVDQLLNISLREEELSKSLQCMDNNLLQARAALQTAYVEVQRLLMLKQQITMEMSALRTHRIQILQGLQETYEPSEHPDQVPCSLTRERRNSRSQTSIDAALLPTPFFPLFLEPPSSHVSPSPTGASLQITTSPTFQTHGSVPAPDSSVQIKQEPMSPEQDENVNAVPPSSACNVSKELLEANREISDSCPVYPVITARLSLPESTESFHEPSQELKFSVEQRNTRNRENSPSSQSAGLSSINKEGEEPTKGNSGSEACTSSFLRLSFASETPLEKEPHSPADQPEQQAESTLTSAETRGSKKKKKLRKKKSLRAAHVPENSDTEQDVLTVKPVRKVKAGKLIKGGKVTTSTWEDSRTGREQESVRDEPDSDSSLEVLEIPNPQLEVVAIDSSESGEEKPDSPSKKDIWNSTEQNPLETSRSGCDEVSSTSEIGTRYKDGIPVSVAETQTVISSIKGSKNSSEISSEPGDDDEPTEGSFEGHQAAVNAIQIFGNLLYTCSADKTVRVYNLVSRKCIGVFEGHTSKVNCLLVTQTSGKNAALYTGSSDHTIRCYNVKSRECVEQLQLEDRVLCLHSRWRILYAGLANGTVVTFNIKNNKRLEIFECHGPRAVSCLATAQEGARKLLVVGSYDCTISVRDARNGLLLRTLEGHSKTILCMKVVNDLVFSGSSDQSVHAHNIHTGELVRIYKGHNHAVTVVNILGKVMVTACLDKFVRVYELQSHDRLQVYGGHKDMIMCMTIHKSMIYTGCYDGSIQAVRLNLMQNYRCWWHGCSLIFGVVDHLKQHLLTDHTNPNFQTLKCRWKNCDAFFTARKGSKQDAAGHIERHAEDDSKIDS

SEQ ID NO: 98983 - protein, 191 aa, Homo sapiens
  Payload ID: 19752
  Gene Name: zinc finger protein 106
  ENSP ID: ENSP00000475881
GKKERSQVDQLLNISLREEELSKSLQCMDNNLLQARAALQTAYVEVQRLLMLKQQITMEMSALRTHRIQILQGLQETYEPSEHPDQVPCSLTRERRNSRSQTSIDAALLPTPFFPLFLEPPSSHVSPSPTGASLQITTSPTFQTHGSVPAPDSSVQIKQEPMSPEQDENVNAVPPSSACNVSKELLEANSM

SEQ ID NO: 98984 - protein, 783 aa, Homo sapiens
  Payload ID: 19753
  Gene Name: zinc finger protein 107
  Uniprot ID: Q9UII5
  ENSP ID: ENSP00000343443
MVAKPPVMSFHFAQDLWPEQNIKDSFQKVTLRRYGKCEYENLQLRKGCKHVDECTGHKGGHNTVNQCLTATPSKIFQCNKYVKVFDKFSNSNRYKRRHTGNKHFKCKECSKSFCVLSQLTQHRRIHTRVNSYKCEECGKAFNWFSTLTKHKRIHTGEKPYKCEECGKAFNQSSQLTRHKIIHTEEKPNKCEECGKAFKQASHLTIHKIIHTGEKPYKYEECGKVFSQSSHLTTQKILHTGENLYKCKECGKAFNLFSNLTNHKRIHAGEKPYKCKECGRAFNISSNLNKQEKIHTGGKLNKCEECDKAFNRSLKLTAHKKILMEEKPYKCEECGKVFNQFSTLTRHKIIHTGEKPYKCKECGKAFNQSSNLTEHKKIHTAEKSYKCEECGKAFNQHSNLINHRKIYSGEKPYKCEECGKAFNRSSTLTRHKKIHTGEKPYKCEECDRAFSQSSNLTEHKKIHTGEKPYKCEECGKAFNRFSTLTKHKRIHTGEKPYKCEECGKAFNQSYQLTRHKIVHTKEKLNKCEEFGKAFKQSSHRTIHKIIHTGEKPYKCEEHGKVFNQSSNLTTQKIIHTGENLYKFEEHGKAFNLFSNITNHKIIYTGEKPHKCEECGKAYNRFSNLTIHKRIHTGEKPYQCAECGKAFNCSSTLNRHKIIHTGEKPYKCKECGKAFNLSSTLTAHKKIHTGEKPYKCEECGKAFNQSSNLTTHKKIHTSEKPYKCEECGKSFNQFSSLNIHKIIHTGEKPYKCGDYGRAFNLSSNLTTHKKIHTGEKPYKCEYGKT

SEQ ID NO: 98985 - protein, 91 aa, Homo sapiens
  Payload ID: 19753
  Gene Name: zinc finger protein 107
  ENSP ID: ENSP00000353234
MVAKPPVMSFHFAQDLWPEQNIKDSFQKVTLRRYGKCEYENLQLRKGCKHVDECTGHKGGHNTVNQCLTATPSKIFQCNKYVKVFDKFSNS

SEQ ID NO: 98986 - protein, 783 aa, Homo sapiens; identical to SEQ ID NO: 98984
  Payload ID: 19753
  Gene Name: zinc finger protein 107
  Uniprot ID: Q9UII5
  ENSP ID: ENSP00000378789

SEQ ID NO: 98987 - protein, 783 aa, Homo sapiens; identical to SEQ ID NO: 98984
  Payload ID: 19753
  Gene Name: zinc finger protein 107
  Uniprot ID: Q9UII5
  ENSP ID: ENSP00000400037

SEQ ID NO: 98988 - protein, 820 aa, Homo sapiens
  Payload ID: 19753
  Gene Name: zinc finger protein 107
  ENSP ID: ENSP00000481898
MEPLTFKDVAIEFSLEEWQCLDTAQRDLYRNVLLENYRNLVFLVMSFHFAQDLWPEQNIKDSFQKVTLRRYGKCEYENLQLRKGCKHVDECTGHKGGHNTVNQCLTATPSKIFQCNKYVKVFDKFSNSNRYKRRHTGNKHFKCKECSKSFCVLSQLTQHRRIHTRVNSYKCEECGKAFNWFSTLTKHKRIHTGEKPYKCEECGKAFNQSSQLTRHKIIHTEEKPNKCEECGKAFKQASHLTIHKIIHTGEKPYKYEECGKVFSQSSHLTTQKILHTGENLYKCKECGKAFNLFSNLTNHKRIHAGEKPYKCKECGRAFNISSNLNKQEKIHTGGKLNKCEECDKAFNRSLKLTAHKKILMEEKPYKCEECGKVFNQFSTLTRHKIIHTGEKPYKCKECGKAFNQSSNLTEHKKIHTAEKSYKCEECGKAFNQHSNLINHRKIYSGEKPYKCEECGKAFNRSSTLTRHKKIHTGEKPYKCEECDRAFSQSSNLTEHKKIHTGEKPYKCEECGKAFNRFSTLTKHKRIHTGEKPYKCEECGKAFNQSYQLTRHKIVHTKEKLNKCEEFGKAFKQSSHRTIHKIIHTGEKPYKCEEHGKVFNQSSNLTTQKIIHTGENLYKFEEHGKAFNLFSNITNHKIIYTGEKPHKCEECGKAYNRFSNLTIHKRIHTGEKPYQCAECGKAFNCSSTLNRHKIIHTGEKPYKCKECGKAFNLSSTLTAHKKIHTGEKPYKCEECGKAFNQSSNLTTHKKIHTSEKPYKCEECGKSFNQFSSLNIHKIIHTGEKPYKCGDYGRAFNLSSNLTTHKKIHTGEKPYKCEYGKT

SEQ ID NO: 98989 - protein, 852 aa, Homo sapiens
  Payload ID: 19753
  Gene Name: zinc finger protein 107
  ENSP ID: ENSP00000483720
MEPLTFKDVAIEFSLEEWQCLDTAQRDLYRNVLLENYRNLVFLGIAVSKPYLITCLEQKKEPWNIKRHEMVAKPPVMSFHFAQDLWPEQNIKDSFQKVTLRRYGKCEYENLQLRKGCKHVDECTGHKGGHNTVNQCLTATPSKIFQCNKYVKVFDKFSNSNRYKRRHTGNKHFKCKECSKSFCVLSQLTQHRRIHTRVNSYKCEECGKAFNWFSTLTKHKRIHTGEKPYKCEECGKAFNQSSQLTRHKIIHTEEKPNKCEECGKAFKQASHLTIHKIIHTGEKPYKYEECGKVFSQSSHLTTQKILHTGENLYKCKECGKAFNLFSNLTNHKRIHAGEKPYKCKECGRAFNISSNLNKQEKIHTGGKLNKCEECDKAFNRSLKLTAHKKILMEEKPYKCEECGKVFNQFSTLTRHKIIHTGEKPYKCKECGKAFNQSSNLTEHKKIHTAEKSYKCEECGKAFNQHSNLINHRKIYSGEKPYKCEECGKAFNRSSTLTRHKKIHTGEKPYKCEECDRAFSQSSNLTEHKKIHTGEKPYKCEECGKAFNRFSTLTKHKRIHTGEKPYKCEECGKAFNQSYQLTRHKIVHTKEKLNKCEEFGKAFKQSSHRTIHKIIHTGEKPYKCEEHGKVFNQSSNLTTQKIIHTGENLYKFEEHGKAFNLFSNITNHKIIYTGEKPHKCEECGKAYNRFSNLTIHKRIHTGEKPYQCAECGKAFNCSSTLNRHKIIHTGEKPYKCKECGKAFNLSSTLTAHKKIHTGEKPYKCEECGKAFNQSSNLTTHKKIHTSEKPYKCEECGKSFNQFSSLNIHKIIHTGEKPYKCGDYGRAFNLSSNLTTHKKIHTGEKPYKCEYGKT

SEQ ID NO: 98990 - protein, 913 aa, Homo sapiens
  Payload ID: 19754
  Gene Name: zinc finger protein 112
  Uniprot ID: Q9UJU3
  ENSP ID: ENSP00000337081
MTKFQEMVTFKDVAVVFTEEELGLLDSVQRKLYRDVMLENFRNLLLVAHQPFKPDLISQLEREEKLLMVETETPRDGCSGRKNQQKMESIQEVTVSYFSPKELSSRQTWQQSAGGLIRCQDFLKVFQGKNSQLQEQGNSLGQVWAGIPVQISEDKNYIFTHIGNGSNYIKSQGYPSWRAHHSWRKMYLKESHNYQCRCQQISMKNHFCKCDSVSWLSHHNDKLEVHRKENYSCHDCGEDIMKVSLLNQESIQTEEKPYPCTGYRKAFSNDSSSEVHQQFHLEGKPYTYSSCGKGCNYSSLLHIHQNIEREDDIENSHLKSYQRVHTEEKPCKCGEYGENFNHCSPLNTYELIHTGEMSYRHNIYEKAFSHSLDLNSIFRVHTRDEPHEYEENENVFNQSSCLQVHQKIHTEEKLYTDIEYGKSFICSSNLDIQHRVHMEENSYNSEECGNGFSLASHFQDLQIVHTKEQPYKRYVCSNSFSHNLYLQGHPKIHIGEKPRKEHGNGFNWSSKLKDHQRVHTGQKPYKCNICGKGFNHRSVLNVHQRVHTGEKPYKCEECDKGFSRSSYLQAHQRVHTGEKPYKCEECGKGFSRNSYLQGHQRVHTGEKPYKCEECGKGFSRSSHLQGHQRVHTGEKPFKCEECGKGFSWSFNLQIHQRVHTGEKPYKCEECGKGFSKASTLLAHQRVHTGEKPYQCDECGKSFSQRSYLQSHQSVHSGERPYICEVCGKGFSQRAYLQGHQRVHTRVKPYKCEMCGKGFSQSSRLEAHRRVHTGGKPYKCEVCTKGFSESSRLQAHQRVHVEGRPYKCEQCGKGFSGYSSLQAHHRVHTGEKPYKCEVCGKGFSQRSNLQAHQRVHTGEKPYKCDACGKGFRWSSGLLIHQRVHSSDKFYKSEDYGKDYPSSENLHRNEDSVLF

SEQ ID NO: 98991 - protein, 907 aa, Homo sapiens
  Payload ID: 19754
  Gene Name: zinc finger protein 112
  Uniprot ID: Q9UJU3
  ENSP ID: ENSP00000346305
MVTFKDVAVVFTEEELGLLDSVQRKLYRDVMLENFRNLLLVAHQPFKPDLISQLEREEKLLMVETETPRDGCSGRKNQQKMESIQEVTVSYFSPKELSSRQTWQQSAGGLIRCQDFLKVFQGKNSQLQEQGNSLGQVWAGIPVQISEDKNYIFTHIGNGSNYIKSQGYPSWRAHHSWRKMYLKESHNYQCRCQQISMKNHFCKCDSVSWLSHHNDKLEVHRKENYSCHDCGEDIMKVSLLNQESIQTEEKPYPCTGYRKAFSNDSSSEVHQQFHLEGKPYTYSSCGKGCNYSSLLHIHQNIEREDDIENSHLKSYQRVHTEEKPCKCGEYGENFNHCSPLNTYELIHTGEMSYRHNIYEKAFSHSLDLNSIFRVHTRDEPHEYEENENVFNQSSCLQVHQKIHTEEKLYTDIEYGKSFICSSNLDIQHRVHMEENSYNSEECGNGFSLASHFQDLQIVHTKEQPYKRYVCSNSFSHNLYLQGHPKIHIGEKPRKEHGNGFNWSSKLKDHQRVHTGQKPYKCNICGKGFNHRSVLNVHQRVHTGEKPYKCEECDKGFSRSSYLQAHQRVHTGEKPYKCEECGKGFSRNSYLQGHQRVHTGEKPYKCEECGKGFSRSSHLQGHQRVHTGEKPFKCEECGKGFSWSFNLQIHQRVHTGEKPYKCEECGKGFSKASTLLAHQRVHTGEKPYQCDECGKSFSQRSYLQSHQSVHSGERPYICEVCGKGFSQRAYLQGHQRVHTRVKPYKCEMCGKGFSQSSRLEAHRRVHTGGKPYKCEVCTKGFSESSRLQAHQRVHVEGRPYKCEQCGKGFSGYSSLQAHHRVHTGEKPYKCEVCGKGFSQRSNLQAHQRVHTGEKPYKCDACGKGFRWSSGLLIHQRVHSSDKFYKSEDYGKDYPSSENLHRNEDSVLF

SEQ ID NO: 98992 - protein, 54 aa, Homo sapiens
  Payload ID: 19754
  Gene Name: zinc finger protein 112
  ENSP ID: ENSP00000464862
MTKFQEMVTFKDVAVVFTEEELGLLDSVQRKLYRDVMLENFRNLLLHISPSSQT

SEQ ID NO: 98993 - protein, 151 aa, Homo sapiens
  Payload ID: 19754
  Gene Name: zinc finger protein 112
  ENSP ID: ENSP00000466797
MVETETPRDGCSGRKNQQKMESIQEVTVSYFSPKELSSRQTWQQSAGGLIRCQDFLKVFQGKNSQLQEQGNSLGQVWAGIPVQISEDKNYIFTHIGNGSNYIKSQGYPSWRAHHSWRKMYLKESHNYQCRCQQISMKNHFCKCDSVSWLSH

SEQ ID NO: 98994 - protein, 149 aa, Homo sapiens
  Payload ID: 19754
  Gene Name: zinc finger protein 112
  ENSP ID: ENSP00000467064
MVTFKDVAVVFTEEELGLLDSVQRKLYRDVMLENFRNLLLVAHQPFKPDLISQLEREEKLLMVETETPRDGCSGRKNQQKMESIQEVTVSYFSPKELSSRQTWQQSAGGLIRCQDFLKVFQGKNSQLQEQGNSLGQVWAGIPVQISEDK

SEQ ID NO: 98995 - protein, 146 aa, Homo sapiens
  Payload ID: 19754
  Gene Name: zinc finger protein 112
  ENSP ID: ENSP00000467994
MGLGPRSLPFSRKRKRKMTKFQEMVTFKDVAVVFTEEELGLLDSVQRKLYRDVMLENFRNLLLVAHQPFKPDLISQLEREEKLLMVETETPRDGCSGRKNQQKMESIQEVTVSYFSPKELSSRQTWQQSAGGLIRCQDFLKVFQGK

SEQ ID NO: 98996 - protein, 417 aa, Homo sapiens
  Payload ID: 19755
  Gene Name: zinc finger protein 114
  Uniprot ID: Q8NC26
  ENSP ID: ENSP00000318898
MSQDSVTFADVAVNFTKEEWTLLDPAQRNLYRDVMLENSRNLAFIDWATPCKTKDATPQPDILPKRTFPEANRVCLTSISSQHSTLREDWRCPKTEEPHRQGVNNVKPPAVAPEKDESPVSICEDHEMRNHSKPTCRLVPSQGDSIRQCILTRDSSIFKYNPVLNDSQKTHENNEDDGVLGWNIQWVPCGRKTELKSSTWTGSQNTVHHIRDEIDTGANRHQRNPFGKAFREDGSLRAHNTHGREKMYDFTQCENTSRNNSIHAMQMQLYTAETNKKDCQTGATSANAPNSGSHKSHCTGEKTHKCPECGRAFFYQSFLMRHMKIHTGEKPYECGKCGKAFRYSLHLNKHLRKHVVQKKPYECEECGKVIRESSKYTHIRSHTGEKPYKCKTCGKDFAKSSGLKKHLKTHKDEKPCE

SEQ ID NO: 98997 - protein, 114 aa, Homo sapiens
  Payload ID: 19755
  Gene Name: zinc finger protein 114
  ENSP ID: ENSP00000469287
MSQGLALLPRLDCSGRIIAYCNLHLPGSGNPPSSASRVAETTGTRPHSRDSVTFADVAVNFTKEEWTLLDPAQRNLYRDVMLENSRNLAFIDWATPCKTKDATPQPDILPKRTF

SEQ ID NO: 98998 - protein, 417 aa, Homo sapiens; identical to SEQ ID NO: 98996
  Payload ID: 19755
  Gene Name: zinc finger protein 114
  Uniprot ID: Q8NC26
  ENSP ID: ENSP00000469998

SEQ ID NO: 98999 - protein, 60 aa, Homo sapiens
  Payload ID: 19755
  Gene Name: zinc finger protein 114
  ENSP ID: ENSP00000471237
MSQGLALLPRLDCSGRIIAYCNLHLPGSGNPPSSASRVAETTGTRPHSRDSVTFADVAVN

SEQ ID NO: 99000 - protein, 131 aa, Homo sapiens
  Payload ID: 19755
  Gene Name: zinc finger protein 114
  ENSP ID: ENSP00000471469
MSQGLALLPRLDCSGRIIAYCNLHLPGSGNPPSSASRVAETTGTRPHSRDSVTFADVAVNFTKEEWTLLDPAQRNLYRDVMLENSRNLAFIDWATPCKTKDATPQPDILPKRTFPEANRVCLTSISSQHST

SEQ ID NO: 99001 - protein, 417 aa, Homo sapiens; identical to SEQ ID NO: 98996
  Payload ID: 19755
  Gene Name: zinc finger protein 114
  Uniprot ID: Q8NC26
  ENSP ID: ENSP00000471727

SEQ ID NO: 99002 - protein, 383 aa, Homo sapiens
  Payload ID: 19755
  Gene Name: zinc finger protein 114
  Uniprot ID: Q8NC26
  ENSP ID: ENSP00000472747
MLENSRNLAFIDWATPCKTKDATPQPDILPKRTFPEANRVCLTSISSQHSTLREDWRCPKTEEPHRQGVNNVKPPAVAPEKDESPVSICEDHEMRNHSKPTCRLVPSQGDSIRQCILTRDSSIFKYNPVLNDSQKTHENNEDDGVLGWNIQWVPCGRKTELKSSTWTGSQNTVHHIRDEIDTGANRHQRNPFGKAFREDGSLRAHNTHGREKMYDFTQCENTSRNNSIHAMQMQLYTAETNKKDCQTGATSANAPNSGSHKSHCTGEKTHKCPECGRAFFYQSFLMRHMKIHTGEKPYECGKCGKAFRYSLHLNKHLRKHVVQKKPYECEECGKVIRESSKYTHIRSHTGEKPYKCKTCGKDFAKSSGLKKHLKTHKDEKPCE

SEQ ID NO: 99003 - protein, 483 aa, Homo sapiens
  Payload ID: 19756
  Gene Name: zinc finger protein 117
  Uniprot ID: Q03924
  ENSP ID: ENSP00000282869
MKRHEMVAKHLVMFYYFAQHLWPEQNIRDSFQKVTLRRYRKCGYENLQLRKGCKSVVECKQHKGDYSGLNQCLKTTLSKIFQCNKYVEVFHKISNSNRHKMRHTENKHFKCKECRKTFCMLSHLTQHKRIQTRVNFYKCEAYGRAFNWSSTLNKHKRIHTGEKPYKCKECGKAFNQTSHLIRHKRIHTEEKPYKCEECGKAFNQSSTLTTHNIIHTGEIPYKCEKCVRAFNQASKLTEHKLIHTGEKRYECEECGKAFNRSSKLTEHKYIHTGEKLYKCEECGKAFNQSSTLTTHKRIHSGEKPYKCEECGKAFKQFSNLTDHKKIHTGEKPYKCEECGKAFNQLSNLTRHKVIHTGEKPYKCGECGKAFNQSSALNTHKIIHTGENPHKCRESGKVFHLSSKLSTCKKIHTGEKLYKCEECGKAFNRSSTLIGHKRIHTGEKPYKCEECGKAFNQSSTLTTHKIIHTEEKQYKCDECGKAST

SEQ ID NO: 99004 - protein, 483 aa, Homo sapiens; identical to SEQ ID NO: 99003
  Payload ID: 19756
  Gene Name: zinc finger protein 117
  Uniprot ID: Q03924
  ENSP ID: ENSP00000479944

SEQ ID NO: 99005 - protein, 383 aa, Homo sapiens
  Payload ID: 19756
  Gene Name: zinc finger protein 117
  ENSP ID: ENSP00000484825
MKRHEMVAKHLVMFYYFAQHLWPEQNIRDSFQKVTLRRYRKCGYENLQLRKGCKSVVECKQHKGDYSGLNQCLKTTLSKIFQCNKYVEVFHKISNSNRHKMRHTENKHFKCKECRKTFCMLSHLTQHKRIQTRVNFYKCEAYGRAFNWSSTLNKHKRIHTGEKPYKCKECGKAFNQTSHLIRHKRIHTEEKPYKCEECGKAFNQSSTLTTHNIIHTGEIPYKCEKCVRAFNQASKLTEHKLIHTGEKRYECEECGKAFNRSSKLTEHKYIHTGEKLYKCEECDKAFNLSSTLTKHKVIHTGEKLYKCKECGKAFKQFSHLAIHNIIHTGEKLYKCEECGKAFNLSSNLTAHKKNRTGEKPYKCEECGKANLSSTLTPHKTIHI

SEQ ID NO: 99006 - protein, 659 aa, Homo sapiens
  Payload ID: 19757
  Gene Name: zinc finger protein 12
  Uniprot ID: P17014
  ENSP ID: ENSP00000344745
MNKSLGPVSFKDVAVDFTQEEWQQLDPEQKITYRDVMLENYSNLVSVGYHIIKPDVISKLEQGEEPWIVEGEFLLQSYPDEVWQTDDLIERIQEEENKPSRQTVFIETLIEEREYISSDGSYARMKADECSGCGKSLLHIKLEKTHPGDQAYEFNQNGEPYTLNEESLYQKIRILEKPFEYIECQKAFQKDTVFVNHMEEKPYKWNGSEIAFLQMSDLTVHQTSHMEMKPYECSECGKSFCKKSKFIIHQRTHTGEKPYECNQCGKSFCQKGTLTVHQRTHTGEKPYECNECGKNFYQKLHLIQHQRTHSGEKPYECSYCGKSFCQKTHLTQHQRTHSGERPYVCHDCGKTFSQKSALNDHQKIHTGVKLYKCSECGKCFCRKSTLTTHLRTHTGEKPYECNECGKFFSRLSYLTVHYRTHSGEKPYECNECGKTFYLNSALMRHQRVHTGEKPYECNECGKLFSQLSYLTIHHRTHSGVKPYECSECGKTFYQNSALCRHRRIHKGEKPYECYICGKFFSQMSYLTIHHRIHSGEKPYECSECGKTFCQNSALNRHQRTHTGEKAYECYECGKCFSQMSYLTIHHRIHSGEKPFECNECGKAFSRMSYLTVHYRTHSGEKPYECTECGKKFYHKSAFNSHQRIHRRGNMNVIDVGRLL

SEQ ID NO: 99007 - protein, 66 aa, Homo sapiens
  Payload ID: 19757
  Gene Name: zinc finger protein 12
  ENSP ID: ENSP00000378375
MNKSLGPVSFKDVAVDFTQEEWQQLDPEQKITYRDVMLENYSNLVSGITLSNRMLSASWSKEKSHG

SEQ ID NO: 99008 - protein, 623 aa, Homo sapiens
  Payload ID: 19757
  Gene Name: zinc finger protein 12
  Uniprot ID: P17014
  ENSP ID: ENSP00000384405
MLENYSNLVSVGYHIIKPDVISKLEQGEEPWIVEGEFLLQSYPDEVWQTDDLIERIQEEENKPSRQTVFIETLIEEREYISSDGSYARMKADECSGCGKSLLHIKLEKTHPGDQAYEFNQNGEPYTLNEESLYQKIRILEKPFEYIECQKAFQKDTVFVNHMEEKPYKWNGSEIAFLQMSDLTVHQTSHMEMKPYECSECGKSFCKKSKFIIHQRTHTGEKPYECNQCGKSFCQKGTLTVHQRTHTGEKPYECNECGKNFYQKLHLIQHQRTHSGEKPYECSYCGKSFCQKTHLTQHQRTHSGERPYVCHDCGKTFSQKSALNDHQKIHTGVKLYKCSECGKCFCRKSTLTTHLRTHTGEKPYECNECGKFFSRLSYLTVHYRTHSGEKPYECNECGKTFYLNSALMRHQRVHTGEKPYECNECGKLFSQLSYLTIHHRTHSGVKPYECSECGKTFYQNSALCRHRRIHKGEKPYECYICGKFFSQMSYLTIHHRIHSGEKPYECSECGKTFCQNSALNRHQRTHTGEKAYECYECGKCFSQMSYLTIHHRIHSGEKPFECNECGKAFSRMSYLTVHYRTHSGEKPYECTECGKKFYHKSAFNSHQRIHRRGNMNVIDVGRLL

SEQ ID NO: 99009 - protein, 697 aa, Homo sapiens
  Payload ID: 19757
  Gene Name: zinc finger protein 12
  Uniprot ID: P17014
  ENSP ID: ENSP00000385939
MNKSLGPVSFKDVAVDFTQEEWQQLDPEQKITYRDVMLENYSNLVSVGYHIIKPDVISKLEQGEEPWIVEGEFLLQSYPDEVWQTDDLIERIQEEENKPSRQTVFIETLIEERGNVPGKTFDVETNPVPSRKIAYKNSLCDSCEKCLTSVSEYISSDGSYARMKADECSGCGKSLLHIKLEKTHPGDQAYEFNQNGEPYTLNEESLYQKIRILEKPFEYIECQKAFQKDTVFVNHMEEKPYKWNGSEIAFLQMSDLTVHQTSHMEMKPYECSECGKSFCKKSKFIIHQRTHTGEKPYECNQCGKSFCQKGTLTVHQRTHTGEKPYECNECGKNFYQKLHLIQHQRTHSGEKPYECSYCGKSFCQKTHLTQHQRTHSGERPYVCHDCGKTFSQKSALNDHQKIHTGVKLYKCSECGKCFCRKSTLTTHLRTHTGEKPYECNECGKFFSRLSYLTVHYRTHSGEKPYECNECGKTFYLNSALMRHQRVHTGEKPYECNECGKLFSQLSYLTIHHRTHSGVKPYECSECGKTFYQNSALCRHRRIHKGEKPYECYICGKFFSQMSYLTIHHRIHSGEKPYECSECGKTFCQNSALNRHQRTHTGEKAYECYECGKCFSQMSYLTIHHRIHSGEKPFECNECGKAFSRMSYLTVHYRTHSGEKPYECTECGKKFYHKSAFNSHQRIHRRGNMNVIDVGRLL

SEQ ID NO: 99010 - protein, 390 aa, Homo sapiens
  Payload ID: 19758
  Gene Name: zinc finger protein 121
  Uniprot ID: P58317
  ENSP ID: ENSP00000326967
MAEIHNGGELCDFMENGEIFSEHSCLNAHMGTENTGDTYDCDEYGENFPMLHNSAPAGETLSVLNQCRKAFSLPPNVHQRTWIGDKSFEYSDCEEAFVDQSHLQANRITHNGETLYEQKQCGRAFTYSTSHAVSVKMHTVEKPYECKECGKFFRYSSYLNSHMRTHTGEKPYECKECGKCFTVSSHLVEHVRIHTGEKPYQCKECGRAFAGRSGLTKHVRIHTGEKPYECNECGKAYNRFYLLTEHFKTHTEEKPFECKVCGKSFRSSSCLKNHFRIHTGIKPYKCKECGKAFTVSSSLHNHVKIHTGEKPYECKDCGKAFATSSQLIEHIRTHTGEKPYICKECGKTFRASSHLQKHVRIHTGEKPYICNECGKAYNRFYLLTKHLKTH

SEQ ID NO: 99011 - protein, 151 aa, Homo sapiens
  Payload ID: 19758
  Gene Name: zinc finger protein 121
  ENSP ID: ENSP00000467838
MAEIHNGGELCDFMENGEIFSEHSCLNAHMGTENTGDTYDCDEYGENFPMLHNSAPAGETLSVLNQCRKAFSLPPNVHQRTWIGDKSFEYSDCEEAFVDQSHLQANRITHNGETLYEQKQCGRAFTYSTSHAVSVKMHTVEKPYECKECGK

SEQ ID NO: 99012 - protein, 390 aa, Homo sapiens; identical to SEQ ID NO: 99010
  Payload ID: 19758
  Gene Name: zinc finger protein 121
  Uniprot ID: P58317
  ENSP ID: ENSP00000468643

SEQ ID NO: 99013 - protein, 289 aa, Homo sapiens
  Payload ID: 19759
  Gene Name: zinc finger protein 124
  Uniprot ID: Q15973
  ENSP ID: ENSP00000340749
MSGHPGSWEMNSVAFEDVAVNFTQEEWALLDPSQKNLYRDVMQETFRNLASIGNKGEDQSIEDQYKNSSRNLSSFQIHQRNHTGEKPYECMECGKALGFSRSLNRHKRIHTGEKRYECKQCGKAFSRSSHLRDHERTHTGEKPYECKHCGKAFRYSNCLHYHERTHTGEKPYVCMECGKAFSCLSSLQGHIKAHAGEEPYPCKQCGKAFRYASSLQKHEKTHIAQKPYVCNNCGKGFRCSSSLRDHERTHTGEKPYECQKCGKAFSRASTLWKHKKTHTGEKPYKCKKM

SEQ ID NO: 99014 - protein, 351 aa, Homo sapiens
  Payload ID: 19759
  Gene Name: zinc finger protein 124
  Uniprot ID: Q15973
  ENSP ID: ENSP00000440365
MSGHPGSWEMNSVAFEDVAVNFTQEEWALLDPSQKNLYRDVMQETFRNLASIGNKGEDQSIEDQYKNSSRNLRHIISHSGNNPYGCEECGKKPCTCKQCQKTSLSVTRVHRDTVMHTGNGHYGCTICEKVFNIPSSFQIHQRNHTGEKPYECMECGKALGFSRSLNRHKRIHTGEKRYECKQCGKAFSRSSHLRDHERTHTGEKPYECKHCGKAFRYSNCLHYHERTHTGEKPYVCMECGKAFSCLSSLQGHIKAHAGEEPYPCKQCGKAFRYASSLQKHEKTHIAQKPYVCNNCGKGFRCSSSLRDHERTHTGEKPYECQKCGKAFSRASTLWKHKKTHTGEKPYKCKKM

SEQ ID NO: 99015 - protein, 73 aa, Homo sapiens
  Payload ID: 19759
  Gene Name: zinc finger protein 124
  Uniprot ID: Q15973
  ENSP ID: ENSP00000462445
MSGHPGSWEMNSVAFEDVAVNFTQEEWALLDPSQKNLYRDVMQETFRNLASIGNKGEDQSIEDQYKNSSRNLR

SEQ ID NO: 99016 - protein, 77 aa, Homo sapiens
  Payload ID: 19759
  Gene Name: zinc finger protein 124
  ENSP ID: ENSP00000463191
MSGHPGSWEMNSVAFEDVAVNFTQEEWALLDPSQKNLYRDVMQETFRNLASIGNKGEDQSIEDQYKNSSRNLRCTGS

SEQ ID NO: 99017 - protein, 589 aa, Homo sapiens
  Payload ID: 19760
  Gene Name: zinc finger protein 131
  Uniprot ID: P52739
  ENSP ID: ENSP00000305804
MEAEETMECLQEFPEHHKMILDRLNEQREQDRFTDITLIVDGHHFKAHKAVLAACSKFFYKFFQEFTQEPLVEIEGVSKMAFRHLIEFTYTAKLMIQGEEEANDVWKAAEFLQMLEAIKALEVRNKENSAPLEENTTGKNEAKKRKIAETSNVITESLPSAESEPVEIEVEIAEGTIEVEDEGIETLEEVASAKQSVKYIQSTGSSDDSALALLADITSKYRQGDRKGQIKEDGCPSDPTSKQEHMKSHSTESFKCEICNKRYLRESAWKQHLNCYHLEEGGVSKKQRTGKKIHVCQYCEKQFDHFGHFKEHLRKHTGEKPFECPNCHERFARNSTLKCHLTACQTGVGAKKGRKKLYECQVCNSVFNSWDQFKDHLVIHTGDKPNHCTLCDLWFMQGNELRRHLSDAHNISERLVTEEVLSVETRVQTEPVTSMTIIEQVGKVHVLPLLQVQVDSAQVTVEQVHPDLLQDSQVHDSHMSELPEQVQVSYLEVGRIQTEEGTEVHVEELHVERVNQMPVEVQTELLEADLDHVTPEIMNQEERESSQADAAEAAREDHEDAEDLETKPTVDSEAEKAENEDRTALPVLE

SEQ ID NO: 99018 - protein, 589 aa, Homo sapiens; identical to SEQ ID NO: 99017
  Payload ID: 19760
  Gene Name: zinc finger protein 131
  Uniprot ID: P52739
  ENSP ID: ENSP00000421246

SEQ ID NO: 99019 - protein, 264 aa, Homo sapiens
  Payload ID: 19760
  Gene Name: zinc finger protein 131
  ENSP ID: ENSP00000422079
MEAEETMECLQEFPEHHKMILDRLNEQREQDRFTDITLIVDGHHFKAHKAVLAACSKFFYKFFQEFTQEPLVEIEGVSKMAFRHLIEFTYTAKLMIQGEEEANDVWKAAEFLQMLEAIKALEVRNKENSAPLEENTTGKNEAKKRKIAETSNVITESLPSAESEPVEIEVEIAEGTIEVEDEGIETLEEVASAKQSVKYIQSTGSSDDSALALLADITSKYRQGDRKGQIKEDGCPSDPTSKQEHMKSHSTESFKCEICNKRYL

SEQ ID NO: 99020 - protein, 151 aa, Homo sapiens
  Payload ID: 19760
  Gene Name: zinc finger protein 131
  ENSP ID: ENSP00000422659
MEAEETMECLQEFPEHHKMILDRLNEQREQDRFTDITLIVDGHHFKAHKAVLAACSKFFYKFFQEFTQEPLVEIEGVSKMAFRHLIEFTYTAKLMIQGEEEANDVWKAAEFLQMLEAIKALEVRNKENSAPLEENTTGKNEAKKRKIAETS

SEQ ID NO: 99021 - protein, 68 aa, Homo sapiens
  Payload ID: 19760
  Gene Name: zinc finger protein 131
  ENSP ID: ENSP00000423254
  MOD_RES (1)..(1): Any amino acid
XKKQRTGKKIHVCQYCEKQFDHFGHFKEHLRKHTVLDAKKFTVMRPHLVRALPVATLQSPEAMQGITW

SEQ ID NO: 99022 - protein, 589 aa, Homo sapiens; identical to SEQ ID NO: 99017
  Payload ID: 19760
  Gene Name: zinc finger protein 131
  Uniprot ID: P52739
  ENSP ID: ENSP00000423945

SEQ ID NO: 99023 - protein, 139 aa, Homo sapiens
  Payload ID: 19760
  Gene Name: zinc finger protein 131
  ENSP ID: ENSP00000424771
MEAEETMECLQEFPEHHKMILDRLNEQREQDRFTDITLIVDGHHFKAHKAVLAACSKFFYKFFQEFTQEPLVEIEGVSKMAFRHLIEFTYTAKLMIQGEEEANDVWKAAEFLQMLEAIKALEVRNKENSAPLEENTTGK

SEQ ID NO: 99024 - protein, 83 aa, Homo sapiens
  Payload ID: 19760
  Gene Name: zinc finger protein 131
  ENSP ID: ENSP00000425139
MEAEETMECLQEFPEHHKMILDRLNEQREQDRFTDITLIVDGHHFKAHKAVLAACSKFFYKFFQEFTQEPLVEIEGTKKTQLP

SEQ ID NO: 99025 - protein, 253 aa, Homo sapiens
  Payload ID: 19760
  Gene Name: zinc finger protein 131
  ENSP ID: ENSP00000425623
MEAEETMECLQEFPEHHKMILDRLNEQREQDRFTDITLIVDGHHFKAHKAVLAACSKFFYKFFQEFTQEPLVEIEGVSKMAFRHLIEFTYTAKLMIQGEEEANDVWKAAEFLQMLEAIKALEVRNKENSAPLEENTTGKNEAKKRKIAETSNVITESLPSAESEPVEIEVEIAEGTIEVEDEGIETLEEVASAKQSVKYIQSTGSSDDSALALLADITSKYRQGDRKGQIKEDGCPSDPTSKQVEGAHEITLH

SEQ ID NO: 99026 - protein, 66 aa, Homo sapiens
  Payload ID: 19760
  Gene Name: zinc finger protein 131
  ENSP ID: ENSP00000425722
MEAEETMECLQEFPEHHKMILDRLNEQREQDRFTDITLIVDGHHFKAHKAVLAACSHVLPQIFSIL

SEQ ID NO: 99027 - protein, 623 aa, Homo sapiens
  Payload ID: 19760
  Gene Name: zinc finger protein 131
  Uniprot ID: P52739
  ENSP ID: ENSP00000426504
MEAEETMECLQEFPEHHKMILDRLNEQREQDRFTDITLIVDGHHFKAHKAVLAACSKFFYKFFQEFTQEPLVEIEGVSKMAFRHLIEFTYTAKLMIQGEEEANDVWKAAEFLQMLEAIKALEVRNKENSAPLEENTTGKNEAKKRKIAETSNVITESLPSAESEPVEIEVEIAEGTIEVEDEGIETLEEVASAKQSVKYIQSTGSSDDSALALLADITSKYRQGDRKGQIKEDGCPSDPTSKQVEGIEIVELQLSHVKDLFHCEKCNRSFKLFYHFKEHMKSHSTESFKCEICNKRYLRESAWKQHLNCYHLEEGGVSKKQRTGKKIHVCQYCEKQFDHFGHFKEHLRKHTGEKPFECPNCHERFARNSTLKCHLTACQTGVGAKKGRKKLYECQVCNSVFNSWDQFKDHLVIHTGDKPNHCTLCDLWFMQGNELRRHLSDAHNISERLVTEEVLSVETRVQTEPVTSMTIIEQVGKVHVLPLLQVQVDSAQVTVEQVHPDLLQDSQVHDSHMSELPEQVQVSYLEVGRIQTEEGTEVHVEELHVERVNQMPVEVQTELLEADLDHVTPEIMNQEERESSQADAAEAAREDHEDAEDLETKPTVDSEAEKAENEDRTALPVLE

SEQ ID NO: 99028 - protein, 124 aa, Homo sapiens
  Payload ID: 19760
  Gene Name: zinc finger protein 131
  ENSP ID: ENSP00000426614
MEAEETMECLQEFPEHHKMILDRLNEQREQDRFTDITLIVDGHHFKAHKAVLAACSKFFYKFFQEFTQEPLVEIEGVSKMAFRHLIEFTYTAKLMIQGEEEANDVWKAAEFLQMLEAIKALEVR

SEQ ID NO: 99029 - protein, 79 aa, Homo sapiens
  Payload ID: 19760
  Gene Name: zinc finger protein 131
  ENSP ID: ENSP00000427003
MGSRYVPRLASNSWAELLLPNSASQSAGITSVSHRARPHLFLQSSPTAMEAEETMECLQEFPEHHKMILDRLNEQREQD

SEQ ID NO: 99030 - protein, 706 aa, Homo sapiens
  Payload ID: 19761
  Gene Name: zinc finger protein 132
  Uniprot ID: P52740
  ENSP ID: ENSP00000254166
MALPSPQVLMGLPALLMGPAQHTSWPCGSAVPTLKSMVTFEDVAVYFSQEEWELLDAAQRHLYHSVMLENLELVTSLGSWHGVEGEGAHPKQNVSVEVLQVRIPNADPSTKKANSCDMCGPFLKDILHLAEHQGTQSEEKPYTCGACGRDFWLNANLHQHQKEHSGGKPFRWYKDRDALMKSSKVHLSENPFTCREGGKVILGSCDLLQLQAVDSGQKPYSNLGQLPEVCTTQKLFECSNCGKAFLKSSTLPNHLRTHSEEIPFTCPTGGNFLEEKSILGNKKFHTGEIPHVCKECGKAFSHSSKLRKHQKFHTEVKYYECIACGKTFNHKLTFVHHQRIHSGERPYECDECGKAFSNRSHLIRHEKVHTGERPFECLKCGRAFSQSSNFLRHQKVHTQVRPYECSQCGKSFSRSSALIQHWRVHTGERPYECSECGRAFNNNSNLAQHQKVHTGERPFECSECGRDFSQSSHLLRHQKVHTGERPFECCDCGKAFSNSSTLIQHQKVHTGQRPYECSECRKSFSRSSSLIQHWRIHTGEKPYECSECGKAFAHSSTLIEHWRVHTKERPYECNECGKFFSQNSILIKHQKVHTGEKPYKCSECGKFFSRKSSLICHWRVHTGERPYECSECGRAFSSNSHLVRHQRVHTQERPYECIQCGKAFSERSTLVRHQKVHTRERTYECSQCGKLFSHLCNLAQHKKIHT

SEQ ID NO: 99031 - protein, 654 aa, Homo sapiens
  Payload ID: 19762
  Gene Name: zinc finger protein 133
  Uniprot ID: P52736
  ENSP ID: ENSP00000346090
MAFRDVAVDFTQDEWRLLSPAQRTLYREVMLENYSNLVSLGISFSKPELITQLEQGKETWREEKKCSPATCPADPEPELYLDPFCPPGFSSQKFPMQHVLCNHPPWIFTCLCAEGNIQPGDPGPGDQEKQQQASEGRPWSDQAEGPEGEGAMPLFGRTKKRTLGAFSRPPQRQPVSSRNGLRGVELEASPAQSGNPEETDKLLKRIEVLGFGTVNCGECGLSFSKMTNLLSHQRIHSGEKPYVCGVCEKGFSLKKSLARHQKAHSGEKPIVCRECGRGFNRKSTLIIHERTHSGEKPYMCSECGRGFSQKSNLIIHQRTHSGEKPYVCRECGKGFSQKSAVVRHQRTHLEEKTIVCSDCGLGFSDRSNLISHQRTHSGEKPYACKECGRCFRQRTTLVNHQRTHSKEKPYVCGVCGHSFSQNSTLISHRRTHTGEKPYVCGVCGRGFSLKSHLNRHQNIHSGEKPIVCKDCGRGFSQQSNLIRHQRTHSGEKPMVCGECGRGFSQKSNLVAHQRTHSGERPYVCRECGRGFSHQAGLIRHKRKHSREKPYMCRQCGLGFGNKSALITHKRAHSEEKPCVCRECGQGFLQKSHLTLHQMTHTGEKPYVCKTCGRGFSLKSHLSRHRKTTSVHHRLPVQPDPEPCAGQPSDSLYSL

SEQ ID NO: 99032 - protein, 99 aa, Homo sapiens
  Payload ID: 19762
  Gene Name: zinc finger protein 133
  ENSP ID: ENSP00000353105
MAFRDVAVDFTQDEWRLLSPAQRTLYREVMLENYSNLVSLGISFSKPELITQLEQGKETWREEKKCSPATCPDHQEYGNNCDLQKEADPEPELYLDPFC

SEQ ID NO: 99033 - protein, 653 aa, Homo sapiens
  Payload ID: 19762
  Gene Name: zinc finger protein 133
  Uniprot ID: P52736
  ENSP ID: ENSP00000366899
MAFRDVAVDFTQDEWRLLSPAQRTLYREVMLENYSNLVSLGISFSKPELITQLEQGKETWREEKKCSPATCPDPEPELYLDPFCPPGFSSQKFPMQHVLCNHPPWIFTCLCAEGNIQPGDPGPGDQEKQQQASEGRPWSDQAEGPEGEGAMPLFGRTKKRTLGAFSRPPQRQPVSSRNGLRGVELEASPAQSGNPEETDKLLKRIEVLGFGTVNCGECGLSFSKMTNLLSHQRIHSGEKPYVCGVCEKGFSLKKSLARHQKAHSGEKPIVCRECGRGFNRKSTLIIHERTHSGEKPYMCSECGRGFSQKSNLIIHQRTHSGEKPYVCRECGKGFSQKSAVVRHQRTHLEEKTIVCSDCGLGFSDRSNLISHQRTHSGEKPYACKECGRCFRQRTTLVNHQRTHSKEKPYVCGVCGHSFSQNSTLISHRRTHTGEKPYVCGVCGRGFSLKSHLNRHQNIHSGEKPIVCKDCGRGFSQQSNLIRHQRTHSGEKPMVCGECGRGFSQKSNLVAHQRTHSGERPYVCRECGRGFSHQAGLIRHKRKHSREKPYMCRQCGLGFGNKSALITHKRAHSEEKPCVCRECGQGFLQKSHLTLHQMTHTGEKPYVCKTCGRGFSLKSHLSRHRKTTSVHHRLPVQPDPEPCAGQPSDSLYSL

SEQ ID NO: 99034 - protein, 654 aa, Homo sapiens; identical to SEQ ID NO: 99031
  Payload ID: 19762
  Gene Name: zinc finger protein 133
  Uniprot ID: P52736
  ENSP ID: ENSP00000383945

SEQ ID NO: 99035 - protein, 591 aa, Homo sapiens
  Payload ID: 19762
  Gene Name: zinc finger protein 133
  Uniprot ID: P52736
  ENSP ID: ENSP00000385279
MCNGRKTVLADPEPELYLDPFCPPGFSSQKFPMQHVLCNHPPWIFTCLCAEGNIQPGDPGPGDQEKQQQASEGRPWSDQAEGPEGEGAMPLFGRTKKRTLGAFSRPPQRQPVSSRNGLRGVELEASPAQSGNPEETDKLLKRIEVLGFGTVNCGECGLSFSKMTNLLSHQRIHSGEKPYVCGVCEKGFSLKKSLARHQKAHSGEKPIVCRECGRGFNRKSTLIIHERTHSGEKPYMCSECGRGFSQKSNLIIHQRTHSGEKPYVCRECGKGFSQKSAVVRHQRTHLEEKTIVCSDCGLGFSDRSNLISHQRTHSGEKPYACKECGRCFRQRTTLVNHQRTHSKEKPYVCGVCGHSFSQNSTLISHRRTHTGEKPYVCGVCGRGFSLKSHLNRHQNIHSGEKPIVCKDCGRGFSQQSNLIRHQRTHSGEKPMVCGECGRGFSQKSNLVAHQRTHSGERPYVCRECGRGFSHQAGLIRHKRKHSREKPYMCRQCGLGFGNKSALITHKRAHSEEKPCVCRECGQGFLQKSHLTLHQMTHTGEKPYVCKTCGRGFSLKSHLSRHRKTTSVHHRLPVQPDPEPCAGQPSDSLYSL

SEQ ID NO: 99036 - protein, 653 aa, Homo sapiens; identical to SEQ ID NO: 99033
  Payload ID: 19762
  Gene Name: zinc finger protein 133
  Uniprot ID: P52736
  ENSP ID: ENSP00000400897

SEQ ID NO: 99037 - protein, 142 aa, Homo sapiens
  Payload ID: 19762
  Gene Name: zinc finger protein 133
  ENSP ID: ENSP00000403835
MAFRDVAVDFTQDEWRLLSPAQRTLYREVMLENYSNLVSLGISFSKPELITQLEQGKETWREEKKCSPATCPADPEPELYLDPFCPPGFSSQKFPMQHVLCNHPPWIFTCLCAEGNIQPGDPGPGDQEKQQQASEGRPWSDQ

SEQ ID NO: 99038 - protein, 179 aa, Homo sapiens
  Payload ID: 19762
  Gene Name: zinc finger protein 133
  ENSP ID: ENSP00000406638
MAFRDVAVDFTQDEWRLLSPAQRTLYREVMLENYSNLVSLGISFSKPELITQLEQGKETWREEKKCSPATCPADPEPELYLDPFCPPGFSSQKFPMQHVLCNHPPWIFTCLCAEGNIQPGDPGPGDQEKQQQASEGRPWSDQAEGPEGEGAMPLFGRTKKRTLGAFSRPPQRQPVSSRN

SEQ ID NO: 99039 - protein, 667 aa, Homo sapiens
  Payload ID: 19762
  Gene Name: zinc finger protein 133
  ENSP ID: ENSP00000439427
MGAAGLQGAPGGAEHPGRCGPGAVPRIRGSVVLAPRWRSSPAGGWSDPLFFGGAGISFSKPELITQLEQGKETWREEKKCSPATCPDPEPELYLDPFCPPGFSSQKFPMQHVLCNHPPWIFTCLCAEGNIQPGDPGPGDQEKQQQASEGRPWSDQAEGPEGEGAMPLFGRTKKRTLGAFSRPPQRQPVSSRNGLRGVELEASPAQSGNPEETDKLLKRIEVLGFGTVNCGECGLSFSKMTNLLSHQRIHSGEKPYVCGVCEKGFSLKKSLARHQKAHSGEKPIVCRECGRGFNRKSTLIIHERTHSGEKPYMCSECGRGFSQKSNLIIHQRTHSGEKPYVCRECGKGFSQKSAVVRHQRTHLEEKTIVCSDCGLGFSDRSNLISHQRTHSGEKPYACKECGRCFRQRTTLVNHQRTHSKEKPYVCGVCGHSFSQNSTLISHRRTHTGEKPYVCGVCGRGFSLKSHLNRHQNIHSGEKPIVCKDCGRGFSQQSNLIRHQRTHSGEKPMVCGECGRGFSQKSNLVAHQRTHSGERPYVCRECGRGFSHQAGLIRHKRKHSREKPYMCRQCGLGFGNKSALITHKRAHSEEKPCVCRECGQGFLQKSHLTLHQMTHTGEKPYVCKTCGRGFSLKSHLSRHRKTTSVHHRLPVQPDPEPCAGQPSDSLYSL

SEQ ID NO: 99040 - protein, 635 aa, Homo sapiens
  Payload ID: 19762
  Gene Name: zinc finger protein 133
  ENSP ID: ENSP00000442978
MGAAGLQGAPGGAEHPGRCGPGAVPRIRGSVVLAPRWRSSPAGGWSDPLFFGGADPEPELYLDPFCPPGFSSQKFPMQHVLCNHPPWIFTCLCAEGNIQPGDPGPGDQEKQQQASEGRPWSDQAEGPEGEGAMPLFGRTKKRTLGAFSRPPQRQPVSSRNGLRGVELEASPAQSGNPEETDKLLKRIEVLGFGTVNCGECGLSFSKMTNLLSHQRIHSGEKPYVCGVCEKGFSLKKSLARHQKAHSGEKPIVCRECGRGFNRKSTLIIHERTHSGEKPYMCSECGRGFSQKSNLIIHQRTHSGEKPYVCRECGKGFSQKSAVVRHQRTHLEEKTIVCSDCGLGFSDRSNLISHQRTHSGEKPYACKECGRCFRQRTTLVNHQRTHSKEKPYVCGVCGHSFSQNSTLISHRRTHTGEKPYVCGVCGRGFSLKSHLNRHQNIHSGEKPIVCKDCGRGFSQQSNLIRHQRTHSGEKPMVCGECGRGFSQKSNLVAHQRTHSGERPYVCRECGRGFSHQAGLIRHKRKHSREKPYMCRQCGLGFGNKSALITHKRAHSEEKPCVCRECGQGFLQKSHLTLHQMTHTGEKPYVCKTCGRGFSLKSHLSRHRKTTSVHHRLPVQPDPEPCAGQPSDSLYSL

SEQ ID NO: 99041 - protein, 654 aa, Homo sapiens; identical to SEQ ID NO: 99031
  Payload ID: 19762
  Gene Name: zinc finger protein 133
  Uniprot ID: P52736
  ENSP ID: ENSP00000481326

SEQ ID NO: 99042 - protein, 559 aa, Homo sapiens
  Payload ID: 19762
  Gene Name: zinc finger protein 133
  Uniprot ID: P52736
  ENSP ID: ENSP00000485741
MQHVLCNHPPWIFTCLCAEGNIQPGDPGPGDQEKQQQASEGRPWSDQAEGPEGEGAMPLFGRTKKRTLGAFSRPPQRQPVSSRNGLRGVELEASPAQSGNPEETDKLLKRIEVLGFGTVNCGECGLSFSKMTNLLSHQRIHSGEKPYVCGVCEKGFSLKKSLARHQKAHSGEKPIVCRECGRGFNRKSTLIIHERTHSGEKPYMCSECGRGFSQKSNLIIHQRTHSGEKPYVCRECGKGFSQKSAVVRHQRTHLEEKTIVCSDCGLGFSDRSNLISHQRTHSGEKPYACKECGRCFRQRTTLVNHQRTHSKEKPYVCGVCGHSFSQNSTLISHRRTHTGEKPYVCGVCGRGFSLKSHLNRHQNIHSGEKPIVCKDCGRGFSQQSNLIRHQRTHSGEKPMVCGECGRGFSQKSNLVAHQRTHSGERPYVCRECGRGFSHQAGLIRHKRKHSREKPYMCRQCGLGFGNKSALITHKRAHSEEKPCVCRECGQGFLQKSHLTLHQMTHTGEKPYVCKTCGRGFSLKSHLSRHRKTTSVHHRLPVQPDPEPCAGQPSDSLYSL

SEQ ID NO: 99043 - protein, 47 aa, Homo sapiens
  Payload ID: 19762
  Gene Name: zinc finger protein 133
  ENSP ID: ENSP00000486044
MAFRDVAVDFTQDEWRLLSPAQRTLYREVMLENYSNLVSLVTYFLFL

SEQ ID NO: 99044 - protein, 657 aa, Homo sapiens
  Payload ID: 19762
  Gene Name: zinc finger protein 133
  Uniprot ID: P52736
  ENSP ID: ENSP00000487315
MAHMAFRDVAVDFTQDEWRLLSPAQRTLYREVMLENYSNLVSLGISFSKPELITQLEQGKETWREEKKCSPATCPADPEPELYLDPFCPPGFSSQKFPMQHVLCNHPPWIFTCLCAEGNIQPGDPGPGDQEKQQQASEGRPWSDQAEGPEGEGAMPLFGRTKKRTLGAFSRPPQRQPVSSRNGLRGVELEASPAQSGNPEETDKLLKRIEVLGFGTVNCGECGLSFSKMTNLLSHQRIHSGEKPYVCGVCEKGFSLKKSLARHQKAHSGEKPIVCRECGRGFNRKSTLIIHERTHSGEKPYMCSECGRGFSQKSNLIIHQRTHSGEKPYVCRECGKGFSQKSAVVRHQRTHLEEKTIVCSDCGLGFSDRSNLISHQRTHSGEKPYACKECGRCFRQRTTLVNHQRTHSKEKPYVCGVCGHSFSQNSTLISHRRTHTGEKPYVCGVCGRGFSLKSHLNRHQNIHSGEKPIVCKDCGRGFSQQSNLIRHQRTHSGEKPMVCGECGRGFSQKSNLVAHQRTHSGERPYVCRECGRGFSHQAGLIRHKRKHSREKPYMCRQCGLGFGNKSALITHKRAHSEEKPCVCRECGQGFLQKSHLTLHQMTHTGEKPYVCKTCGRGFSLKSHLSRHRKTTSVHHRLPVQPDPEPCAGQPSDSLYSL

SEQ ID NO: 99045 - protein, 427 aa, Homo sapiens
  Payload ID: 19763
  Gene Name: zinc finger protein 134
  Uniprot ID: P52741
  ENSP ID: ENSP00000379464
MTLVTAGGAWTGPGCWHEVKDEESSSEQSISIAVSHVNTSKAGLPAQTALPCDICGPILKDILHLDEHQGTHHGLKLHTCGACGRQFWFSANLHQYQKCYSIEQPLRRDKSEASIVKNCTVSKEPHPSEKPFTCKEEQKNFQATLGGCQQKAIHSKRKTHRSTESGDAFHGEQMHYKCSECGKAFSRKDTLVQHQRIHSGEKPYECSECGKAFSRKATLVQHQRIHTGERPYECSECGKTFSRKDNLTQHKRIHTGEMPYKCNECGKYFSHHSNLIVHQRVHNGARPYKCSDCGKVFRHKSTLVQHESIHTGENPYDCSDCGKSFGHKYTLIKHQRIHTESKPFECIECGKFFSRSSDYIAHQRVHTGERPFVCSKCGKDFIRTSHLVRHQRVHTGERPYECSECGKAYSLSSHLNRHQKVHTAGRL

SEQ ID NO: 99046 - protein, 66 aa, Homo sapiens
  Payload ID: 19763
  Gene Name: zinc finger protein 134
  ENSP ID: ENSP00000469065
MTLVTAGGAWTGPGCWHEVKDEESSSEQSISIAVSHVNTSKAGLPAQTALPCDICGPILKDILHLD

SEQ ID NO: 99047 - protein, 46 aa, Homo sapiens
  Payload ID: 19763
  Gene Name: zinc finger protein 134
  ENSP ID: ENSP00000472314
MTLVTAGGAWTGPGEWELRDAITSGLGSCSSGNLCCAHHKCQGQRP

SEQ ID NO: 99048 - protein, 348 aa, Homo sapiens
  Payload ID: 19763
  Gene Name: zinc finger protein 134
  Uniprot ID: P52741
  ENSP ID: ENSP00000481521
MWGMWETILVQCNLHQYQKCYSIEQPLRRDKSEASIVKNCTVSKEPHPSEKPFTCKEEQKNFQATLGGCQQKAIHSKRKTHRSTESGDAFHGEQMHYKCSECGKAFSRKDTLVQHQRIHSGEKPYECSECGKAFSRKATLVQHQRIHTGERPYECSECGKTFSRKDNLTQHKRIHTGEMPYKCNECGKYFSHHSNLIVHQRVHNGARPYKCSDCGKVFRHKSTLVQHESIHTGENPYDCSDCGKSFGHKYTLIKHQRIHTESKPFECIECGKFFSRSSDYIAHQRVHTGERPFVCSKCGKDFIRTSHLVRHQRVHTGERPYECSECGKAYSLSSHLNRHQKVHTAGRL

SEQ ID NO: 99049 - protein, 658 aa, Homo sapiens
  Payload ID: 19764
  Gene Name: zinc finger protein 135
  Uniprot ID: P52742
  ENSP ID: ENSP00000321406
MTPGVRVSTDPEQVTFEDVVVGFSQEEWGQLKPAQRTLYRDVMLDTFRLLVSVGHWLPKPNVISLLEQEAELWAVESRLPQGVYPDLETRPKVKLSVLKQGISEEISNSVILVERFLWDGLWYCRGEDTEGHWEWSCESLESLAVPVAFTPVKTPVLEQWQRNGFGENISLNPDLPHQPMTPERQSPHTWGTRGKREKPDLNVLQKTCVKEKPYKCQECGKAFSHSSALIEHHRTHTGERPYECHECLKGFRNSSALTKHQRIHTGEKPYKCTQCGRTFNQIAPLIQHQRTHTGEKPYECSECGKSFSFRSSFSQHERTHTGEKPYECSECGKAFRQSIHLTQHLRIHTGEKPYQCGECGKAFSHSSSLTKHQRIHTGEKPYECHECGKAFTQITPLIQHQRTHTGEKPYECGECGKAFSQSTLLTEHRRIHTGEKPYGCNECGKTFSHSSSLSQHERTHTGEKPYECSQCGKAFRQSTHLTQHQRIHTGEKPYECNDCGKAFSHSSSLTKHQRIHTGEKPYECNQCGRAFSQLAPLIQHQRIHTGEKPYECNQCGRAFSQSSLLIEHQRIHTKEKPYGCNECGKSFSHSSSLSQHERTHTGEKPYECHDCGKSFRQSTHLTQHRRIHTGEKPYACRDCGKAFTHSSSLTKHQRTHTG

SEQ ID NO: 99050 - protein, 390 aa, Homo sapiens
  Payload ID: 19764
  Gene Name: zinc finger protein 135
  Uniprot ID: P52742
  ENSP ID: ENSP00000369437
MELGSRRRSVGCRCRGLCLAVRREQVTFEDVVVGFSQEEWGQLKPAQRTLYRDVMLDTFRLLVSVGHWLPKPNVISLLEQEAELWAVESRLPQGVYPDLETRPKVKLSVLKQGISEEISNSVILVERFLWDGLWYCRGEDTEGHWEWSCESLESLAVPVAFTPVKTPVLEQWQRNGFGENISLNPDLPHQPMTPERQSPHTWGTRGKREKPDLNVLQKTCVKEKPYKCQECGKAFSHSSALIEHHRTHTGERPYECHECLKGFRNSSALTKHQRIHTGEKPYKCTQCGRTFNQIAPLIQHQRTHTGEKPYECSECGKSFSFRSSFSQHERTHTGEKPYECSECGKAFRQSIHLTQHLRIHTGEKPYQCGECGKAFTHSSSLTKHQRTHTG

SEQ ID NO: 99051 - protein, 670 aa, Homo sapiens
  Payload ID: 19764
  Gene Name: zinc finger protein 135
  Uniprot ID: P52742
  ENSP ID: ENSP00000422074
MTPGVRVSTDPEQVTFEDVVVGFSQEEWGQLKPAQRTLYRDVMLDTFRLLVSVGHWLPKPNVISLLEQEAELWAVESRLPQGVYPEIKGHFQFLLLSDLETRPKVKLSVLKQGISEEISNSVILVERFLWDGLWYCRGEDTEGHWEWSCESLESLAVPVAFTPVKTPVLEQWQRNGFGENISLNPDLPHQPMTPERQSPHTWGTRGKREKPDLNVLQKTCVKEKPYKCQECGKAFSHSSALIEHHRTHTGERPYECHECLKGFRNSSALTKHQRIHTGEKPYKCTQCGRTFNQIAPLIQHQRTHTGEKPYECSECGKSFSFRSSFSQHERTHTGEKPYECSECGKAFRQSIHLTQHLRIHTGEKPYQCGECGKAFSHSSSLTKHQRIHTGEKPYECHECGKAFTQITPLIQHQRTHTGEKPYECGECGKAFSQSTLLTEHRRIHTGEKPYGCNECGKTFSHSSSLSQHERTHTGEKPYECSQCGKAFRQSTHLTQHQRIHTGEKPYECNDCGKAFSHSSSLTKHQRIHTGEKPYECNQCGRAFSQLAPLIQHQRIHTGEKPYECNQCGRAFSQSSLLIEHQRIHTKEKPYGCNECGKSFSHSSSLSQHERTHTGEKPYECHDCGKSFRQSTHLTQHRRIHTGEKPYACRDCGKAFTHSSSLTKHQRTHTG

SEQ ID NO: 99052 - protein, 616 aa, Homo sapiens
  Payload ID: 19764
  Gene Name: zinc finger protein 135
  ENSP ID: ENSP00000427691
MLDTFRLLVSVGHWLPKPNVISLLEQEAELWAVESRLPQGVYPDLETRPKVKLSVLKQGISEEISNSVILVERFLWDGLWYCRGEDTEGHWEWSCESLESLAVPVAFTPVKTPVLEQWQRNGFGENISLNPDLPHQPMTPERQSPHTWGTRGKREKPDLNVLQKTCVKEKPYKCQECGKAFSHSSALIEHHRTHTGERPYECHECLKGFRNSSALTKHQRIHTGEKPYKCTQCGRTFNQIAPLIQHQRTHTGEKPYECSECGKSFSFRSSFSQHERTHTGEKPYECSECGKAFRQSIHLTQHLRIHTGEKPYQCGECGKAFSHSSSLTKHQRIHTGEKPYECHECGKAFTQITPLIQHQRTHTGEKPYECGECGKAFSQSTLLTEHRRIHTGEKPYGCNECGKTFSHSSSLSQHERTHTGEKPYECSQCGKAFRQSTHLTQHQRIHTGEKPYECNDCGKAFSHSSSLTKHQRIHTGEKPYECNQCGRAFSQLAPLIQHQRIHTGEKPYECNQCGRAFSQSSLLIEHQRIHTKEKPYGCNECGKSFSHSSSLSQHERTHTGEKPYECHDCGKSFRQSTHLTQHRRIHTGEKPYACRDCGKAFTHSSSLTKHQRTHTG

SEQ ID NO: 99053 - protein, 682 aa, Homo sapiens
  Payload ID: 19764
  Gene Name: zinc finger protein 135
  Uniprot ID: P52742
  ENSP ID: ENSP00000441410
MELGSRRRSVGCRCRGLCLAVRREQVTFEDVVVGFSQEEWGQLKPAQRTLYRDVMLDTFRLLVSVGHWLPKPNVISLLEQEAELWAVESRLPQGVYPEIKGHFQFLLLSDLETRPKVKLSVLKQGISEEISNSVILVERFLWDGLWYCRGEDTEGHWEWSCESLESLAVPVAFTPVKTPVLEQWQRNGFGENISLNPDLPHQPMTPERQSPHTWGTRGKREKPDLNVLQKTCVKEKPYKCQECGKAFSHSSALIEHHRTHTGERPYECHECLKGFRNSSALTKHQRIHTGEKPYKCTQCGRTFNQIAPLIQHQRTHTGEKPYECSECGKSFSFRSSFSQHERTHTGEKPYECSECGKAFRQSIHLTQHLRIHTGEKPYQCGECGKAFSHSSSLTKHQRIHTGEKPYECHECGKAFTQITPLIQHQRTHTGEKPYECGECGKAFSQSTLLTEHRRIHTGEKPYGCNECGKTFSHSSSLSQHERTHTGEKPYECSQCGKAFRQSTHLTQHQRIHTGEKPYECNDCGKAFSHSSSLTKHQRIHTGEKPYECNQCGRAFSQLAPLIQHQRIHTGEKPYECNQCGRAFSQSSLLIEHQRIHTKEKPYGCNECGKSFSHSSSLSQHERTHTGEKPYECHDCGKSFRQSTHLTQHRRIHTGEKPYACRDCGKAFTHSSSLTKHQRTHTG

SEQ ID NO: 99054 - protein, 73 aa, Homo sapiens
  Payload ID: 19764
  Gene Name: zinc finger protein 135
  ENSP ID: ENSP00000471344
MTPGVRVSTDPEQVTFEDVVVGFSQEEWGQLKPAQRTLYRDVMLDTFRLLVSVGSCSVTQAGVQWLNLSSLQP

SEQ ID NO: 99055 - protein, 540 aa, Homo sapiens
  Payload ID: 19765
  Gene Name: zinc finger protein 136
  Uniprot ID: P52737
  ENSP ID: ENSP00000344162
MDSVAFEDVDVNFTQEEWALLDPSQKNLYRDVMWETMRNLASIGKKWKDQNIKDHYKHRGRNLRSHMLERLYQTKDGSQRGGIFSQFANQNLSKKIPGVKLCESIVYGEVSMGQSSLNRHIKDHSGHEPKEYQEYGEKPDTRNQCWKPFSSHHSFRTHEIIHTGEKLYDCKECGKTFFSLKRIRRHIITHSGYTPYKCKVCGKAFDYPSRFRTHERSHTGEKPYECQECGKAFTCITSVRRHMIKHTGDGPYKCKVCGKPFHSLSSFQVHERIHTGEKPFKCKQCGKAFSCSPTLRIHERTHTGEKPYECKQCGKAFSYLPSLRLHERIHTGEKPFVCKQCGKAFRSASTFQIHERTHTGEKPYECKECGEAFSCIPSMRRHMIKHTGEGPYKCKVCGKPFHSLSPFRIHERTHTGEKPYVCKHCGKAFVSSTSIRIHERTHTGEKPYECKQCGKAFSYLNSFRTHEMIHTGEKPFECKRCGKAFRSSSSFRLHERTHTGQKPYHCKECGKAYSCRASFQRHMLTHAEDGPPYKCMWESL

SEQ ID NO: 99056 - protein, 89 aa, Homo sapiens
  Payload ID: 19765
  Gene Name: zinc finger protein 136
  ENSP ID: ENSP00000388759
MLERLYQTKDGSQRGGIFSQFANQNLSKKIPGVKLCESIVYGEVSMGQSSLNRHIKDHSGHEPKEYQEYGEKPDTRNQCWKPFSSHHSF

SEQ ID NO: 99057 - protein, 26 aa, Homo sapiens
  Payload ID: 19765
  Gene Name: zinc finger protein 136
  ENSP ID: ENSP00000397176
MWETMRNLASIGKKWKDQNIKDHYKH

SEQ ID NO: 99058 - protein, 42 aa, Homo sapiens
  Payload ID: 19765
  Gene Name: zinc finger protein 136
  ENSP ID: ENSP00000403707
MWETMRNLASIGKKWKDQNIKDHYKHRGRNLRSHMLERLYQT

SEQ ID NO: 99059 - protein, 319 aa, Homo sapiens
  Payload ID: 19766
  Gene Name: zinc finger protein 138
  ENSP ID: ENSP00000303533
MGPLTFMDVAIEFSLEEWQCLDTAQRNVYRHVMLENYRNLVFLDLITCLEQGKEPWNMKRHEMVVAKHSALCSRFAQDLWLEQNIKDSFQKVTLSRYGKYGHKNLQLRKGCKSVDECKGHQGGFNGLNQCLKITTSKIFQCNKYVKVMHKFSNSNRHKIRHTENKHFRCKECDKSLCMLSRLTQHKKIHTRENFYKCEECGKTFNWSTNLSKPKKIHTGEKPYKCEVCGKAFHQSSILTKHKIIRTGEKPYKCAHCGKAFKQSSHLTRHKIIHTEEKPYKCEQCGKVFKQSPTLTKHQIIYTGEEPYKCEECGKAFNLS

SEQ ID NO: 99060 - protein, 100 aa, Homo sapiens
  Payload ID: 19766
  Gene Name: zinc finger protein 138
  ENSP ID: ENSP00000352770
MGPLTFMDVAIEFSLEEWQCLDTAQRNVYRHVMLENYRNLVFLAVAFTFDLSGLNILSFQSILPFVSALYVMGNRNQCLQKHLEARNKDLCVLVLPKTFG

SEQ ID NO: 99061 - protein, 287 aa, Homo sapiens
  Payload ID: 19766
  Gene Name: zinc finger protein 138
  ENSP ID: ENSP00000399528
MDVAIEFSLEEWQCLDTAQRNVYRHVMLENYRNLVFLALCSRFAQDLWLEQNIKDSFQKVTLSRYGKYGHKNLQLRKGCKSVDECKGHQGGFNGLNQCLKITTSKIFQCNKYVKVMHKFSNSNRHKIRHTENKHFRCKECDKSLCMLSRLTQHKKIHTRENFYKCEECGKTFNWSTNLSKPKKIHTGEKPYKCEVCGKAFHQSSILTKHKIIRTGEKPYKCAHCGKAFKQSSHLTRHKIIHTEEKPYKCEQCGKVFKQSPTLTKHQIIYTGEEPYKCEECGKAFNLS

SEQ ID NO: 99062 - protein, 293 aa, Homo sapiens
  Payload ID: 19766
  Gene Name: zinc finger protein 138
  Uniprot ID: P52744
  ENSP ID: ENSP00000407262
MGPLTFMDVAIEFSLEEWQCLDTAQRNVYRHVMLENYRNLVFLALCSRFAQDLWLEQNIKDSFQKVTLSRYGKYGHKNLQLRKGCKSVDECKGHQGGFNGLNQCLKITTSKIFQCNKYVKVMHKFSNSNRHKIRHTENKHFRCKECDKSLCMLSRLTQHKKIHTRENFYKCEECGKTFNWSTNLSKPKKIHTGEKPYKCEVCGKAFHQSSILTKHKIIRTGEKPYKCAHCGKAFKQSSHLTRHKIIHTEEKPYKCEQCGKVFKQSPTLTKHQIIYTGEEPYKCEECGKAFNLS

SEQ ID NO: 99063 - protein, 62 aa, Homo sapiens
  Payload ID: 19766
  Gene Name: zinc finger protein 138
  ENSP ID: ENSP00000415995
MGPLTFMDVAIEFSLEEWQCLDTAQRNVYRHVMLENYRNLVFLARPDYLSGTRKRALEYEET

SEQ ID NO: 99064 - protein, 126 aa, Homo sapiens
  Payload ID: 19766
  Gene Name: zinc finger protein 138
  ENSP ID: ENSP00000419197
MGPLTFMDVAIEFSLEEWQCLDTAQRNVYRHVMLENYRNLVFLDLITCLEQGKEPWNMKRHEMVVAKHSAVAFTFDLSGLNILSFQSILPFVSALYVMGNRNQCLQKHLEARNKDLCVLVLPKTFG

SEQ ID NO: 99065 - protein, 642 aa, Homo sapiens
  Payload ID: 19767
  Gene Name: zinc finger protein 14
  Uniprot ID: P17017
  ENSP ID: ENSP00000340514
MDSVSFEDVAVNFTLEEWALLDSSQKKLYEDVMQETFKNLVCLGKKWEDQDIEDDHRNQGKNRRCHMVERLCESRRGSKCGETTSQMPNVNINKETFTGAKPHECSFCGRDFIHHSSLNRHMRSHTGQKPNEYQEYEKQPCKCKAVGKTFSYHHCFRKHERTHTGVKPYECKQCGKAFIYYQPFQRHERTHAGQKPYECKQCGKTFIYYQSFQKHAHTGKKPYECKQCGKAFICYQSFQRHKRTHTGEKPYECKQCGKAFSCPTYFRTHERTHTGEKPYKCKECGKAFSFLSSFRRHKRTHSGEKPYECKECGKAFFYSASFRAHVIIHTGARPYKCKECGKAFNSSNSCRVHERTHIGEKPYECKRCGKSFSWSISLRLHERTHTGEKPYECKQCHKTFSFSSSLREHETTHTGEKPYECKQCGKTFSFSSSLQRHERTHNAEKPYECKQCGKAFRCSSYFRIHERSHTGEKPYECKQCGKVFIRSSSFRLHERTHTGEKPYECKLCGKTFSFSSSLREHEKIHTGNKPFECKQCGKAFLRSSQIRLHERTHTGEKPYQCKQCGKAFISSSKFRMHERTHTGEKPYRCKQCGKAFRFSSSVRIHERSHTGEKPYECKQCGKAFISSSHFRLHERTHMGEKV

SEQ ID NO: 99066 - protein, 457 aa, Homo sapiens
  Payload ID: 19768
  Gene Name: zinc finger protein 140
  Uniprot ID: P52738
  ENSP ID: ENSP00000347755
MSQGSVTFRDVAIDFSQEEWKWLQPAQRDLYRCVMLENYGHLVSLGLSISKPDVVSLLEQGKEPWLGKREVKRDLFSVSESSGEIKDFSPKNVIYDDSSQYLIMERILSQGPVYSSFKGGWKCKDHTEMLQENQGCIRKVTVSHQEALAQHMNISTVERPYGCHECGKTFGRRFSLVLHQRTHTGEKPYACKECGKTFSQISNLVKHQMIHTGKKPHECKDCNKTFSYLSFLIEHQRTHTGEKPYECTECGKAFSRASNLTRHQRIHIGKKQYICRKCGKAFSSGSELIRHQITHTGEKPYECIECGKAFRRFSHLTRHQSIHTTKTPYECNECRKAFRCHSFLIKHQRIHAGEKLYECDECGKVFTWHASLIQHTKSHTGEKPYACAECDKAFSRSFSLILHQRTHTGEKPYVCKVCNKSFSWSSNLAKHQRTHTLDNPYEYENSFNYHSFLTEHQ

SEQ ID NO: 99067 - protein, 77 aa, Homo sapiens
  Payload ID: 19768
  Gene Name: zinc finger protein 140
  ENSP ID: ENSP00000375895
MSQDLGRGFLSPTTTCLAEPQDPVPCSSFSGVSDIQRCGHRLLPGGVEMASACSKRFVQMCNVGELWPSGLTGSFHF

SEQ ID NO: 99068 - protein, 87 aa, Homo sapiens
  Payload ID: 19768
  Gene Name: zinc finger protein 140
  ENSP ID: ENSP00000389566
MLENYGHLVSLGLSISKPDVVSLLEQGKEPWLGKREVKRDLFSVSESSGEIKDFSPKNVIYDDSSQYLIMERILSQGPVYSSFKGGW

SEQ ID NO: 99069 - protein, 101 aa, Homo sapiens
  Payload ID: 19768
  Gene Name: zinc finger protein 140
  ENSP ID: ENSP00000415016
MSQGSVTFRDVAIDFSQEEWKWLQPAQRDLYRCVMLENYGHLVSLGLSISKPDVVSLLEQGKEPWLGKREVKRDLFSVLKEAGNARIILRCCKKIRDVLGK

SEQ ID NO: 99070 - protein, 161 aa, Homo sapiens
  Payload ID: 19768
  Gene Name: zinc finger protein 140
  ENSP ID: ENSP00000415499
MREFGGMRAGHANICPSFQGSVTFRDVAIDFSQEEWKWLQPAQRDLYRCVMLENYGHLVSLGLSISKPDVVSLLEQGKEPWLGKREVKRDLFSVSESSGEIKDFSPKNVIYDDSSQYLIMERILSQGPVYSSFKGGWKCKDHTEMLQENQGCIRKVTVSHQ

SEQ ID NO: 99071 - protein, 114 aa, Homo sapiens
  Payload ID: 19768
  Gene Name: zinc finger protein 140
  ENSP ID: ENSP00000437913
MSQGSVTFRDVAIDFSQEEWKWLQPAQRDLYRCVMLENYGHLVSLAGLSISKPDVVSLLEQGKEPWLGKREVKRDLFSGFFSANCVSFFSWAHVDGSAFLVDGNFFCKFFRVKW

SEQ ID NO: 99072 - protein, 79 aa, Homo sapiens
  Payload ID: 19768
  Gene Name: zinc finger protein 140
  ENSP ID: ENSP00000441170
MSQGSVTFRDVAIDFSQEEWKWLQPAQRDLYRCVMLENYGHLVSLGLSISKPDVVSLLEQGKEPWLGKREVKRDLFSGN

SEQ ID NO: 99073 - protein, 116 aa, Homo sapiens
  Payload ID: 19768
  Gene Name: zinc finger protein 140
  ENSP ID: ENSP00000444905
MSQGSVTFRDVAIDFSQEEWKWLQPAQRDLYRCVMLENYGHLVSLGLSISKPDVVSLLEQGKEPWLGKREVKRDLFSVSESSGEIKDFSPKNVIYDDSSQYLIMERILSQGPVYSS

SEQ ID NO: 99074 - protein, 354 aa, Homo sapiens
  Payload ID: 19768
  Gene Name: zinc finger protein 140
  Uniprot ID: P52738
  ENSP ID: ENSP00000445411
MERILSQGPVYSSFKGGWKCKDHTEMLQENQGCIRKVTVSHQEALAQHMNISTVERPYGCHECGKTFGRRFSLVLHQRTHTGEKPYACKECGKTFSQISNLVKHQMIHTGKKPHECKDCNKTFSYLSFLIEHQRTHTGEKPYECTECGKAFSRASNLTRHQRIHIGKKQYICRKCGKAFSSGSELIRHQITHTGEKPYECIECGKAFRRFSHLTRHQSIHTTKTPYECNECRKAFRCHSFLIKHQRIHAGEKLYECDECGKVFTWHASLIQHTKSHTGEKPYACAECDKAFSRSFSLILHQRTHTGEKPYVCKVCNKSFSWSSNLAKHQRTHTLDNPYEYENSFNYHSFLTEHQ

SEQ ID NO: 99075 - protein, 474 aa, Homo sapiens
  Payload ID: 19769
  Gene Name: zinc finger protein 141
  Uniprot ID: Q15928
  ENSP ID: ENSP00000240499
MELLTFRDVAIEFSPEEWKCLDPDQQNLYRDVMLENYRNLVSLGVAISNPDLVTCLEQRKEPYNVKIHKIVARPPAMCSHFTQDHWPVQGIEDSFHKLILRRYEKCGHDNLQLRKGCKSLNECKLQKGGYNEFNECLSTTQSKILQCKASVKVVSKFSNSNKRKTRHTGEKHFKECGKSFQKFSHLTQHKVIHAGEKPYTCEECGKAFKWSLIFNEHKRIHTGEKPFTCEECGSIFTTSSHFAKHKIIHTGEKPYKCEECGKAFNRFTTLTKHKRIHAGEKPITCEECRKIFTSSSNFAKHKRIHTGEKPYKCEECGKAFNRSTTLTKHKRIHTGEKPYTCEECGKAFRQSSKLNEHKKVHTGERPYKCDECGKAFGRSRVLNEHKKIHTGEKPYKCEECGKAFRRSTDRSQHKKIHSADKPYKCKECDKAFKQFSLLSQHKKIHTVDKPYKCKDCDKAFKRFSHLNKHKKIHT

SEQ ID NO: 99076 - protein, 113 aa, Homo sapiens
  Payload ID: 19769
  Gene Name: zinc finger protein 141
  ENSP ID: ENSP00000424403
MELLTFRDVAIEFSPEEWKCLDPDQQNLYRDVMLENYRNLVSLGVAISNPDLVTCLEQRKEPYNVKIHKIVARPPEFFHLYDNKPILAFWRIASEKSQSASVYRQLTHRSRAT

SEQ ID NO: 99077 - protein, 201 aa, Homo sapiens
  Payload ID: 19769
  Gene Name: zinc finger protein 141
  ENSP ID: ENSP00000425799
MELLTFRDVAIEFSPEEWKCLDPDQQNLYRDVMLENYRNLVSLGVAISNPDLVTCLEQRKEPYNVKIHKIVARPPAMCSHFTQDHWPVQGIEDSFHKLILRRYEKCGHDNLQLRKGCKSLNECKLQKGGYNEFNECLSTTQSKILQCKASVKVVSKFSNSNKRKTRHTGEKHFKECGKSFQKFSHLTQHKNSSISMTTSPF

SEQ ID NO: 99078 - protein, 14 aa, Homo sapiens
  Payload ID: 19770
  Gene Name: zinc finger protein 142
  ENSP ID: ENSP00000391599
MTDPLLDSQPASST

SEQ ID NO: 99079 - protein, 98 aa, Homo sapiens
  Payload ID: 19770
  Gene Name: zinc finger protein 142
  ENSP ID: ENSP00000397456
MTDPLLDSQPASSTGEMDGLCPELLLIPPPLSNRGILGPVQSPCPSRDPAPIPTEPGCLLVEATATEEGPGNMEIIVETVAGTLTPGAPGETPATAAS

SEQ ID NO: 99080 - protein, 1687 aa, Homo sapiens
  Payload ID: 19770
  Gene Name: zinc finger protein 142
  Uniprot ID: P52746
  ENSP ID: ENSP00000398798
MTDPLLDSQPASSTGEMDGLCPELLLIPPPLSNRGILGPVQSPCPSRDPAPIPTEPGCLLVEATATEEGPGNMEIIVETVAGTLTPGAPGETPAPKLPPGEREPSQEAGTPLPGQETAEEENVEKEEKSDTQKDSQKAVDKGQGAQRLEGDVVSGTESLFKTHMCPECKRCFKKRTHLVEHLHLHFPDPSLQCPNCQKFFTSKSKLKTHLLRELGEKAHHCPLCHYSAVERNALNRHMASMHEDISNFYSDTYACPVCREEFRLSQALKEHLKSHTAAAAAEPLPLRCFQEGCSYAAPDRKAFIKHLKETHGVRAVECRHHSCPMLFATAEAMEAHHKSHYAFHCPHCDFACSNKHLFRKHKKQGHPGSEELRCTFCPFATFNPVAYQDHVGKMHAHEKIHQCPECNFATAHKRVLIRHMLLHTGEKPHKCELCDFTCRDVSYLSKHMLTHSNTKDYMCTECGYVTKWKHYLRVHMRKHAGDLRYQCNQCSYRCHRADQLSSHKLRHQGKSLMCEVCAFACKRKYELQKHMASQHHPGTPAPLYPCHYCSYQSRHKQAVLSHENCKHTRLREFHCALCDYRTFSNTTLLFHKRKAHGYVPGDQAWQLRYASQEPEGAMQGPTPPPDSEPSNQLSARPEGPGHEPGTVVDPSLDQALPEMSEEVNTGRQEGSEAPHGGDLGGSPSPAEVEEGSCTLHLEALGVELESVTEPPLEEVTETAPMEFRPLGLEGPDGLEGPELSSFEGIGTSDLSAEENPLLEKPVSEPSTNPPSLEEAPNNWVGTFKTTPPAETAPLPPLPESESLLKALRRQDKEQAEALVLEGRVQMVVIQGEGRAFRCPHCPFITRREKALNLHSRTGCQGRREPLLCPECGASFKQQRGLSTHLLKKCPVLLRKNKGLPRPDSPIPLQPVLPGTQASEDTESGKPPPASQEAELLLPKDAPLELPREPEETEEPLATVSGSPVPPAGNSLPTEAPKKHCFDPVPPAGNSSPTEAPKKHHLDPVPPAGNSSPTEALKKHRFEQGKFHCNSCPFLCSRLSSITSHVAEGCRGGRGGGGKRGTPQTQPDVSPLSNGDSAPPKNGSTESSSGDGDTVLVQKQKGARFSCPTCPFSCQQERALRTHQIRGCPLEESGELHCSLCPFTAPAATALRLHQKRRHPTAAPARGPRPHLQCGDCGFTCKQSRCMQQHRRLKHEGVKPHQCPFCDFSTTRRYRLEAHQSRHTGIGRIPCSSCPQTFGTNSKLRLHRLRVHDKTPTHFCPLCDYSGYLRHDITRHVNSCHQGTPAFACSQCEAQFSSETALKQHALRRHPEPAQPAPGSPAETTEGPLHCSRCGLLCPSPASLRGHTRKQHPRLECGACQEAFPSRLALDEHRRQQHFSHRCQLCDFAARERVGLVKHYLEQHEETSAAVAASDGDGDAGQPPLHCPFCDFTCRHQLVLDHHVKGHGGTRLYKCTDCAYSTKNRQKITWHSRIHTGEKPYHCHLCPYACADPSRLKYHMRIHKEERKYLCPECGYKCKWVNQLKYHMTKHTGLKPYQCPECEYCTNRADALRVHQETRHREARAFMCEQCGKAFKTRFLLRTHLRKHSEAKPYVCNVCHRAFRWAAGLRHHALTHTDRHPFFCRLCNYKAKQKFQVVKHVRRHHPDQADPNQGVGKDPTTPTVHLHDVQLEDPSPPAPAAPHTGPEG

SEQ ID NO: 99081 - protein, 26 aa, Homo sapiens
  Payload ID: 19770
  Gene Name: zinc finger protein 142
  ENSP ID: ENSP00000400424
MTDPLLDSQPASSTGEMDGLCPELLL

SEQ ID NO: 99082 - protein, 98 aa, Homo sapiens; identical to SEQ ID NO: 99079
  Payload ID: 19770
  Gene Name: zinc finger protein 142
  ENSP ID: ENSP00000405477

SEQ ID NO: 99083 - protein, 1687 aa, Homo sapiens; identical to SEQ ID NO: 99080
  Payload ID: 19770
  Gene Name: zinc finger protein 142
  Uniprot ID: P52746
  ENSP ID: ENSP00000408643

SEQ ID NO: 99084 - protein, 294 aa, Homo sapiens
  Payload ID: 19770
  Gene Name: zinc finger protein 142
  ENSP ID: ENSP00000415156
  MOD_RES (1)..(1): Any amino acid
XPASSTGEMDGLCPELLLIPPPLSNRGILGPVQSPCPSRDPAPIPTEPGCLLVEATATEEGPGNMEIIVETVAGTLTPGAPGETPGVLVKVVEVYFCERCEQSFAEPTLLALHQCSETHIQPVQGLSSPPCSVELPPSNPTLPGPLQGQSPPVSPLSCPVCRQEFAQPQALKSHFKIHRGTPDTFSCPESGCVFSAEDRKGLQHHLRQTHRAVPVPCSFRGCPLLFGSQQGMELHRQAHYPFHCSHCSFIGSNVKLFRQHQRSHGAGTQGELSAVQGLPSQELLPAPKLPPGER

SEQ ID NO: 99085 - protein, 610 aa, Homo sapiens
  Payload ID: 19771
  Gene Name: zinc finger protein 143
  ENSP ID: ENSP00000299606
MLLAQINRDSQGMTEFPGGGMEAQHVTLCLTEAVTVADGDNLENMEGVSLQAVTLADGSTAYIQHNSKDAKLIDGQVIQLEDGSAAYVQHVPIPKSNSYDQSALQAVQLEDGTTAYIHHAVQVPQSDTILAIQADGTVAGLHTGDATIDPDTISALEQYAAKVSIDGSESVAGTGMIGENEQEKKMQIVLQGHATRVTAKSQQSGEKAFRCEYDGCGKLYTTAHHLKVHERSHTGDRPYQCEHAGCGKAFATGYGLKSHVRTHTGEKPYRCSEDNCTKSFKTSGDLQKHIRTHTGERPFKCPFEGCGRSFTTSNIRKVHVRTHTGERPYYCTEPGCGRAFASATNYKNHVRIHTGEKPYVCTVPGCDKRFTEYSSLYKHHVVHTHSKPYNCNHCGKTYKQISTLAMHKRTAHNDTEPIEEEQEAFFEPPPGQGEDVLKGSQITYVTGVEGDDVVSTQVATVTQSGLSQQVTLISQDGTQHVNISQADMQAIGNTITMVTQDGTPITVPAHDAVISSAGTHSVAMVTAEGTEGEQVAIVAQDLAAFHTASSEMGHQQHSHHLVTTETRPLTLVATSNGTQIAVQLGEQPSLEEAIRIASRIQQGETPGLDD

SEQ ID NO: 99086 - protein, 607 aa, Homo sapiens
  Payload ID: 19771
  Gene Name: zinc finger protein 143
  Uniprot ID: P52747
  ENSP ID: ENSP00000379843
MLLAQINRDSQGMTEFPGGGMEAQHVTLCLTEAVTVADAKLIDGQVIQLEDGSAAYVQHVPIPKSTGDSLRLEDGQAVQLEDGTTAFIHHTSKDSYDQSALQAVQLEDGTTAYIHHAVQVPQSDTILAIQADGTVAGLHTGDATIDPDTISALEQYAAKVSIDGSESVAGTGMIGENEQEKKMQIVLQGHATRVTAKSQQSGEKAFRCEYDGCGKLYTTAHHLKVHERSHTGDRPYQCEHAGCGKAFATGYGLKSHVRTHTGEKPYRCSEDNCTKSFKTSGDLQKHIRTHTGERPFKCPFEGCGRSFTTSNIRKVHVRTHTGERPYYCTEPGCGRAFASATNYKNHVRIHTGEKPYVCTVPGCDKRFTEYSSLYKHHVVHTHSKPYNCNHCGKTYKQISTLAMHKRTAHNDTEPIEEEQEAFFEPPPGQGEDVLKGSQITYVTGVEGDDVVSTQVATVTQSGLSQQVTLISQDGTQHVNISQADMQAIGNTITMVTQDGTPITVPAHDAVISSAGTHSVAMVTAEGTEGEQVAIVAQDLAAFHTASSEMGHQQHSHHLVTTETRPLTLVATSNGTQIAVQLGEQPSLEEAIRIASRIQQGETPGLDD

SEQ ID NO: 99087 - protein, 638 aa, Homo sapiens
  Payload ID: 19771
  Gene Name: zinc finger protein 143
  Uniprot ID: P52747
  ENSP ID: ENSP00000379847
MLLAQINRDSQGMTEFPGGGMEAQHVTLCLTEAVTVADGDNLENMEGVSLQAVTLADGSTAYIQHNSKDAKLIDGQVIQLEDGSAAYVQHVPIPKSTGDSLRLEDGQAVQLEDGTTAFIHHTSKDSYDQSALQAVQLEDGTTAYIHHAVQVPQSDTILAIQADGTVAGLHTGDATIDPDTISALEQYAAKVSIDGSESVAGTGMIGENEQEKKMQIVLQGHATRVTAKSQQSGEKAFRCEYDGCGKLYTTAHHLKVHERSHTGDRPYQCEHAGCGKAFATGYGLKSHVRTHTGEKPYRCSEDNCTKSFKTSGDLQKHIRTHTGERPFKCPFEGCGRSFTTSNIRKVHVRTHTGERPYYCTEPGCGRAFASATNYKNHVRIHTGEKPYVCTVPGCDKRFTEYSSLYKHHVVHTHSKPYNCNHCGKTYKQISTLAMHKRTAHNDTEPIEEEQEAFFEPPPGQGEDVLKGSQITYVTGVEGDDVVSTQVATVTQSGLSQQVTLISQDGTQHVNISQADMQAIGNTITMVTQDGTPITVPAHDAVISSAGTHSVAMVTAEGTEGEQVAIVAQDLAAFHTASSEMGHQQHSHHLVTTETRPLTLVATSNGTQIAVQLGEQPSLEEAIRIASRIQQGETPGLDD

SEQ ID NO: 99088 - protein, 637 aa, Homo sapiens
  Payload ID: 19771
  Gene Name: zinc finger protein 143
  Uniprot ID: P52747
  ENSP ID: ENSP00000379849
MLLAQINRDSQGMTEFPGGGMEAQHVTLCLTEAVTVADGDNLENMEGVSLQAVTLADGSTAYIQHNSKDAKLIDGQVIQLEDGSAAYVQHVPIPKSRDSLRLEDGQAVQLEDGTTAFIHHTSKDSYDQSALQAVQLEDGTTAYIHHAVQVPQSDTILAIQADGTVAGLHTGDATIDPDTISALEQYAAKVSIDGSESVAGTGMIGENEQEKKMQIVLQGHATRVTAKSQQSGEKAFRCEYDGCGKLYTTAHHLKVHERSHTGDRPYQCEHAGCGKAFATGYGLKSHVRTHTGEKPYRCSEDNCTKSFKTSGDLQKHIRTHTGERPFKCPFEGCGRSFTTSNIRKVHVRTHTGERPYYCTEPGCGRAFASATNYKNHVRIHTGEKPYVCTVPGCDKRFTEYSSLYKHHVVHTHSKPYNCNHCGKTYKQISTLAMHKRTAHNDTEPIEEEQEAFFEPPPGQGEDVLKGSQITYVTGVEGDDVVSTQVATVTQSGLSQQVTLISQDGTQHVNISQADMQAIGNTITMVTQDGTPITVPAHDAVISSAGTHSVAMVTAEGTEGEQVAIVAQDLAAFHTASSEMGHQQHSHHLVTTETRPLTLVATSNGTQIAVQLGEQPSLEEAIRIASRIQQGETPGLDD

SEQ ID NO: 99089 - protein, 142 aa, Homo sapiens
  Payload ID: 19771
  Gene Name: zinc finger protein 143
  ENSP ID: ENSP00000388628
MLLAQINRDSQGMTEFPGGGMEAQHVTLCLTEAVTVADGDNLENMEGVSLQAVTLADGSTAYIQHNSKDAKLIDGQVIQLEDGSAAYVQHVPIPKSRDSLRLEDGQAVQLEDGTTAFIHHTSKDSYDQSALQAVQLEDGTTA

SEQ ID NO: 99090 - protein, 73 aa, Homo sapiens
  Payload ID: 19771
  Gene Name: zinc finger protein 143
  ENSP ID: ENSP00000392323
MLLAQINRDSQGMTEFPGGGMEAQHVTLCLTEAVTVADGDNLENMEGVSLQAVTLADGSTAYIQHNSKDAKLI

SEQ ID NO: 99091 - protein, 83 aa, Homo sapiens
  Payload ID: 19771
  Gene Name: zinc finger protein 143
  ENSP ID: ENSP00000395221
MLLAQINRDSQGMTEFPGGGMEAQHVTLCLTEAVTVADGDNLENMEGVSLQAVTLADGSTAYIQHNSKDAKLIDGQVIQLEDG

SEQ ID NO: 99092 - protein, 168 aa, Homo sapiens
  Payload ID: 19771
  Gene Name: zinc finger protein 143
  ENSP ID: ENSP00000401493
  MOD_RES (1)..(1): Any amino acid
XVEGDDVVSTQVATVTQSGLSQQVTLISQDGTQHVNISQADMQAIGNTITMVTQDGTPITVPAHDAVISSAGTHSVAMVTAEGTEGEQVAIVAQDLAAFHTASSEMGHQQHSHHLVTTETRPLTLVATSNGTQIAVQVSTKAYCPQSTAVLLIAFNFVHCASCITFTG

SEQ ID NO: 99093 - protein, 190 aa, Homo sapiens
  Payload ID: 19771
  Gene Name: zinc finger protein 143
  ENSP ID: ENSP00000409432
MLLAQINRDSQGMTEFPGGGMEAQHVTLCLTEAVTVADGDNLENMEGVSLQAVTLADGSTAYIQHNSKDAKLIDGQVIQLEDGSAAYVQHVPIPKSTGDSLRLEDGQAVQLEDGTTAFIHHTSKDSYDQSALQAVQLEDGTTAYIHHAVQVPQSDTILAIQADGTVAGLHTGDATIDPDTISALEQYAAK

SEQ ID NO: 99094 - protein, 86 aa, Homo sapiens
  Payload ID: 19771
  Gene Name: zinc finger protein 143
  ENSP ID: ENSP00000431306
MLLAQINRDSQGMTEFPGGGMEAQHVTLCLTEAVTVADGDNLENMEGVSLQAVTLADGSTAYIQHNSKGSLDVLLNCLRTLREESR

SEQ ID NO: 99095 - protein, 637 aa, Homo sapiens; identical to SEQ ID NO: 99088
  Payload ID: 19771
  Gene Name: zinc finger protein 143
  Uniprot ID: P52747
  ENSP ID: ENSP00000432154

SEQ ID NO: 99096 - protein, 151 aa, Homo sapiens
  Payload ID: 19771
  Gene Name: zinc finger protein 143
  ENSP ID: ENSP00000433221
MLLAQINRDSQGMTEFPGGGMEAQHVTLCLTEAVTVADGDNLENMEGVSLQAVTLADGSTAYIQHNSKDAKLIDGQVIQLEDGSAAYVQHVPIPKSRDSLRLEDGQAVQLEDGTTAFIHHTSKDSYDQSALQAVQLEDGTTAYIHHAVQVP

SEQ ID NO: 99097 - protein, 175 aa, Homo sapiens
  Payload ID: 19771
  Gene Name: zinc finger protein 143
  ENSP ID: ENSP00000433743
MLLAQINRDSQGMTEFPGGGMEAQHVTLCLTEAVTVADGDNLENMEGVSLQAVTLADGSTAYIQHNSKDAKLIDGQVIQLEDGSAAYVQHVPIPKSTGDSLRLEDGQAVQLEDGTTAFIHHTSKDSYDQSALQAVQLEDGTTAYIHHAVQVPQSDTILAIQADGTVAGLHTGDAT

SEQ ID NO: 99098 - protein, 136 aa, Homo sapiens
  Payload ID: 19771
  Gene Name: zinc finger protein 143
  ENSP ID: ENSP00000434638
MLLAQINRDSQGMTEFPGGGMEAQHVTLCLTEAVTVADGDNLENMEGVSLQAVTLADGSTAYIQHNSKDAKLIDGQVIQLEDGSAAYVQHVPIPKSTGDSLRLEDGQAVQLEDGTTAFIHHTSKDSYDQSALQAVQ

SEQ ID NO: 99099 - protein, 175 aa, Homo sapiens
  Payload ID: 19771
  Gene Name: zinc finger protein 143
  ENSP ID: ENSP00000434922
MLLAQINRDSQGMTEFPGGGMEAQHVTLCLTEAVTVADAKLIDGQVIQLEDGSAAYVQHVPIPKSRDSLRLEDGQAVQLEDGTTAFIHHTSKDSYDQSALQAVQLEDGTTAYIHHAVQVPQSDTILAIQADGTVAGLHTGDATIDPDTISALEQYAAKVSIDGSESVAGTGMIGE

SEQ ID NO: 99100 - protein, 166 aa, Homo sapiens
  Payload ID: 19771
  Gene Name: zinc finger protein 143
  ENSP ID: ENSP00000435881
MLLAQINRDSQGMTEFPGGGMEAQHVTLCLTEAVTVADGDNLENMEGVSLQAVTLADGSTAYIQHNSKDAKLIDGQVIQLEDGSAAYVQHVPIPKSTGDSLRLEDGQAVQLEDGTTAFIHHTSKVMTRVHYRRFSWKMVPQLISTMQCKSRSLTPSWQFRLMGQWQ

SEQ ID NO: 99101 - protein, 292 aa, Homo sapiens
  Payload ID: 19772
  Gene Name: zinc finger protein 146
  Uniprot ID: Q15072
  ENSP ID: ENSP00000392095
MSHLSQQRIYSGENPFACKVCGKVFSHKSNLTEHEHFHTREKPFECNECGKAFSQKQYVIKHQNTHTGEKLFECNECGKSFSQKENLLTHQKIHTGEKPFECKDCGKAFIQKSNLIRHQRTHTGEKPFVCKECGKTFSGKSNLTEHEKIHIGEKPFKCSECGTAFGQKKYLIKHQNIHTGEKPYECNECGKAFSQRTSLIVHVRIHSGDKPYECNVCGKAFSQSSSLTVHVRSHTGEKPYGCNECGKAFSQFSTLALHLRIHTGKKPYQCSECGKAFSQKSHHIRHQKIHTH

SEQ ID NO: 99102 - protein, 292 aa, Homo sapiens; identical to SEQ ID NO: 99101
  Payload ID: 19772
  Gene Name: zinc finger protein 146
  Uniprot ID: Q15072
  ENSP ID: ENSP00000400391

SEQ ID NO: 99103 - protein, 794 aa, Homo sapiens
  Payload ID: 19773
  Gene Name: zinc finger protein 148
  Uniprot ID: Q9UQR1
  ENSP ID: ENSP00000353863
MNIDDKLEGLFLKCGGIDEMQSSRTMVVMGGVSGQSTVSGELQDSVLQDRSMPHQEILAADEVLQESEMRQQDMISHDELMVHEETVKNDEEQMETHERLPQGLQYALNVPISVKQEITFTDVSEQLMRDKKQIREPVDLQKKKKRKQRSPAKILTINEDGSLGLKTPKSHVCEHCNAAFRTNYHLQRHVFIHTGEKPFQCSQCDMRFIQKYLLQRHEKIHTGEKPFRCDECGMRFIQKYHMERHKRTHSGEKPYQCEYCLQYFSRTDRVLKHKRMCHENHDKKLNRCAIKGGLLTSEEDSGFSTSPKDNSLPKKKRQKTEKKSSGMDKESALDKSDLKKDKNDYLPLYSSSTKVKDEYMVAEYAVEMPHSSVGGSHLEDASGEIHPPKLVLKKINSKRSLKQPLEQNQTISPLSTYEESKVSKYAFELVDKQALLDSEGNADIDQVDNLQEGPSKPVHSSTNYDDAMQFLKKKRYLQAASNNSREYALNVGTIASQPSVTQAAVASVIDESTTASILESQALNVEIKSNHDKNVIPDEVLQTLLDHYSHKANGQHEISFSVADTEVTSSISINSSEVPEVTPSENVGSSSQASSSDKANMLQEYSKFLQQALDRTSQNDAYLNSPSLNFVTDNQTLPNQPAFSSIDKQVYATMPINSFRSGMNSPLRTTPDKSHFGLIVGDSQHSFPFSGDETNHASATSTQDFLDQVTSQKKAEAQPVHQAYQMSSFEQPFRAPYHGSRAGIATQFSTANGQVNLRGPGTSAEFSEFPLVNVNDNRAGMTSSPDATTGQTFG

SEQ ID NO: 99104 - protein, 83 aa, Homo sapiens
  Payload ID: 19773
  Gene Name: zinc finger protein 148
  ENSP ID: ENSP00000417847
MNIDDKLEGLFLKCGGIDEMQSSRTMVVMGGVSGQSTVSGELQDSVLQDRSMPHQEILAADEVLQESEMRQQDMISHDELMVH

SEQ ID NO: 99105 - protein, 794 aa, Homo sapiens; identical to SEQ ID NO: 99103
  Payload ID: 19773
  Gene Name: zinc finger protein 148
  Uniprot ID: Q9UQR1
  ENSP ID: ENSP00000419322

SEQ ID NO: 99106 - protein, 75 aa, Homo sapiens
  Payload ID: 19773
  Gene Name: zinc finger protein 148
  ENSP ID: ENSP00000419585
MNIDDKLEGLFLKCGGIDEMQSSRTMVVMGGVSGQSTVSGELQDSVLQDRSMPHQEILAADEVLQESEMRQQDMI

SEQ ID NO: 99107 - protein, 25 aa, Homo sapiens
  Payload ID: 19773
  Gene Name: zinc finger protein 148
  ENSP ID: ENSP00000420038
MNIDDKLEGLFLKCGGIDEMQSSRT

SEQ ID NO: 99108 - protein, 144 aa, Homo sapiens
  Payload ID: 19773
  Gene Name: zinc finger protein 148
  ENSP ID: ENSP00000420102
MKGEKPFQCSQCDMRFIQKYLLQRHEKIHTGEKPFRCDECGDETNHASATSTQDFLDQVTSQKKAEAQPVHQAYQMSSFEQPFRAPYHGSRAGIATQFSTANGQVNLRGPGTSAEFSEFPLVNVNDNRAGMTSSPDATTGQTFG

SEQ ID NO: 99109 - protein, 794 aa, Homo sapiens; identical to SEQ ID NO: 99103
  Payload ID: 19773
  Gene Name: zinc finger protein 148
  Uniprot ID: Q9UQR1
  ENSP ID: ENSP00000420335

SEQ ID NO: 99110 - protein, 794 aa, Homo sapiens; identical to SEQ ID NO: 99103
  Payload ID: 19773
  Gene Name: zinc finger protein 148
  Uniprot ID: Q9UQR1
  ENSP ID: ENSP00000420448

SEQ ID NO: 99111 - protein, 454 aa, Homo sapiens
  Payload ID: 19773
  Gene Name: zinc finger protein 148
  ENSP ID: ENSP00000437916
MNIDDKLEGLFLKCGGIDEMQSSRTMVVMGGVSGQSTVSGELQDSVLQDRSMPHQEILAADEVLQESEMRQQDMISHDELMVHEETVKNDEEQMETHERLPQGLQYALNVPISVKQEITFTDVSEQLMRDKKQIREPVDLQKKKKRKQRSPAKILTINEDGSLGLKTPKSHVCEHCNAAFRTNYHLQRHVFIHTGEKPFQCSQCDMRFIQKYLLQRHEKIHTGEKPFRCDECGMRFIQKYHMERHKRTHSGEKPYQCEYCLQYFSRTDRVLKHKRMCHENHDKKLNRCAIKGGLLTSEEDSGFSTSPKDNSLPKKKRQKTEKKSSGMDKESALDKSDLKKDKNDYLPLYSSSTKVKDEYMVAEYAVEMPHSSVGGSHLEDASGEIHPPKLVLKKINSKRSLKQPLEQNQTISPLSTYEESKFQSMLLNLWINRLYWTQKAMLTLIRLIICRRAQ

SEQ ID NO: 99112 - protein, 437 aa, Homo sapiens
  Payload ID: 19774
  Gene Name: zinc finger protein 154
  Uniprot ID: Q13106
  ENSP ID: ENSP00000421258
MAAATLRTPTQGTVTFEDVAVHFSWEEWGLLDEAQRCLYRDVMLENLALLTSLDVHHQKQHLGEKHFRSNVGRALFVKTCTFHVSGEPSTCREVGKDFLAKLGFLHQQAAHTGEQSNSKSDGGAISHRGKTHYNCGEHTKAFSGKHTLVQQQRTLTTERCYICSECGKSFSKSYSLNDHWRLHTGEKPYECRECGKSFRQSSSLIQHRRVHTAVRPHECDECGKLFSNKSNLIKHRRVHTGERPYECSECGKSFSQRSALLQHRGVHTGERPYECSECGKFFTYHSSLIKHQKVHSGSRPYECSECGKSFSQNSSLIEHHRVHTGERPYKCSECGKSFSQRSALLQHRGVHTGERPYECSECGKFFPYSSSLRKHQRVHTGSRPYECSECGKSFTQNSGLIKHRRVHTGEKPYECTECGKSFSHNSSLIKHQRIHSR

SEQ ID NO: 99113 - protein, 437 aa, Homo sapiens; identical to SEQ ID NO: 99112
  Payload ID: 19774
  Gene Name: zinc finger protein 154
  Uniprot ID: Q13106
  ENSP ID: ENSP00000469633

SEQ ID NO: 99114 - protein, 538 aa, Homo sapiens
  Payload ID: 19775
  Gene Name: zinc finger protein 155
  Uniprot ID: Q12901
  ENSP ID: ENSP00000270014
MTTFKEAVTFKDVAVVFTEEELGLLDPAQRKLYRDVMLENFRNLLSVGHQPFHQDTCHFLREEKFWMMGTATQREGNSGGKIQTELESVPEAGAHEEWSCQQIWEQIAKDLTRSQDSIINNSQFFENGDVPSQVEAGLPTIHTGQKPSQGGKCKQSISDVPIFDLPQQLYSEEKSYTCDECGKSICYISALHVHQRVHVGEKLFMCDVCGKEFSQSSHLQTHQRVHTGEKPFKCEQCGKGFSRRSALNVHRKLHTGEKPYICEACGKAFIHDSQLKEHKRIHTGEKPFKCDICGKTFYFRSRLKSHSMVHTGEKPFRCDTCDKSFHQRSALNRHCMVHTGEKPYRCEQCGKGFIGRLDFYKHQVVHTGEKPYNCKECGKSFRWSSCLLNHQRVHSGEKSFKCEECGKGFYTNSQLSSHQRSHSGEKPYKCEECGKGYVTKFNLDLHQRVHTGERPYNCKECGKNFSRASSILNHKRLHCQKKPFKCEDCGKRLVHRTYRKDQPRDYSGENPSKCEDCGRRYKRRLNLDILLSLFLNDT

SEQ ID NO: 99115 - protein, 549 aa, Homo sapiens
  Payload ID: 19775
  Gene Name: zinc finger protein 155
  Uniprot ID: Q12901
  ENSP ID: ENSP00000385163
MIKRSKVLVFCSKIMEEAVTFKDVAVVFTEEELGLLDPAQRKLYRDVMLENFRNLLSVGHQPFHQDTCHFLREEKFWMMGTATQREGNSGGKIQTELESVPEAGAHEEWSCQQIWEQIAKDLTRSQDSIINNSQFFENGDVPSQVEAGLPTIHTGQKPSQGGKCKQSISDVPIFDLPQQLYSEEKSYTCDECGKSICYISALHVHQRVHVGEKLFMCDVCGKEFSQSSHLQTHQRVHTGEKPFKCEQCGKGFSRRSALNVHRKLHTGEKPYICEACGKAFIHDSQLKEHKRIHTGEKPFKCDICGKTFYFRSRLKSHSMVHTGEKPFRCDTCDKSFHQRSALNRHCMVHTGEKPYRCEQCGKGFIGRLDFYKHQVVHTGEKPYNCKECGKSFRWSSCLLNHQRVHSGEKSFKCEECGKGFYTNSQLSSHQRSHSGEKPYKCEECGKGYVTKFNLDLHQRVHTGERPYNCKECGKNFSRASSILNHKRLHCQKKPFKCEDCGKRLVHRTYRKDQPRDYSGENPSKCEDCGRRYKRRLNLDILLSLFLNDT

SEQ ID NO: 99116 - protein, 90 aa, Homo sapiens
  Payload ID: 19775
  Gene Name: zinc finger protein 155
  ENSP ID: ENSP00000465201
MTTFKEAVTFKDVAVVFTEEELGLLDPAQRKLYRDVMLENFRNLLSVGHQPFHQDTCHFLREEKFWMMGTATQREGNSGGKIQTELESVP

SEQ ID NO: 99117 - protein, 538 aa, Homo sapiens; identical to SEQ ID NO: 99114
  Payload ID: 19775
  Gene Name: zinc finger protein 155
  Uniprot ID: Q12901
  ENSP ID: ENSP00000465691

SEQ ID NO: 99118 - protein, 115 aa, Homo sapiens
  Payload ID: 19775
  Gene Name: zinc finger protein 155
  ENSP ID: ENSP00000465981
MTTFKEAVTFKDVAVVFTEEELGLLDPAQRKLYRDVMLENFRNLLSVGHQPFHQDTCHFLREEKFWMMGTATQREGNSGGKIQTELESVPEAGAHEEWSCQQIWEQIAKDLTRSQ

SEQ ID NO: 99119 - protein, 150 aa, Homo sapiens
  Payload ID: 19775
  Gene Name: zinc finger protein 155
  ENSP ID: ENSP00000467110
MTTFKEAVTFKDVAVVFTEEELGLLDPAQRKLYRDVMLENFRNLLSVGHQPFHQDTCHFLREEKFWMMGTATQREGNSGGKIQTELESVPEAGAHEEWSCQQIWEQIAKDLTRSQDSIINNSQFFENGDVPSQVEAGLPTIHTGQKPSQG

SEQ ID NO: 99120 - protein, 538 aa, Homo sapiens; identical to SEQ ID NO: 99114
  Payload ID: 19775
  Gene Name: zinc finger protein 155
  Uniprot ID: Q12901
  ENSP ID: ENSP00000481677

SEQ ID NO: 99121 - protein, 506 aa, Homo sapiens
  Payload ID: 19776
  Gene Name: zinc finger protein 157
  Uniprot ID: P51786
  ENSP ID: ENSP00000366273
MPANGTSPQRFPALIPGEPGRSFEGSVSFEDVAVDFTRQEWHRLDPAQRTMHKDVMLETYSNLASVGLCVAKPEMIFKLERGEELWILEEESSGHGYSGSLSLLCGNGSVGDNALRHDNDLLHHQKIQTLDQNVEYNGCRKAFHEKTGFVRRKRTPRGDKNFECHECGKAYCRKSNLVEHLRIHTGERPYECGECAKTFSARSYLIAHQKTHTGERPFECNECGKSFGRKSQLILHTRTHTGERPYECTECGKTFSEKATLTIHQRTHTGEKPYECSECGKTFRVKISLTQHHRTHTGEKPYECGECGKNFRAKKSLNQHQRIHTGEKPYECGECGKFFRMKMTLNNHQRTHTGEKPYQCNECGKSFRVHSSLGIHQRIHTGEKPYECNECGNAFYVKARLIEHQRMHSGEKPYECSECGKIFSMKKSLCQHRRTHTGEKPYECSECGNAFYVKVRLIEHQRIHTGERPFECQECGKAFCRKAHLTEHQRTHIGWSWRCTMKKASH

SEQ ID NO: 99122 - protein, 682 aa, Homo sapiens
  Payload ID: 19777
  Gene Name: zinc finger protein 16
  Uniprot ID: P17020
  ENSP ID: ENSP00000276816
MPSLRTRREEAEMELSVPGPSPWTPAAQARVRDAPAVTHPGSAACGTPCCSDTELEAICPHYQQPDCDTRTEDKEFLHKEDIHEDLESQAEISENYAGDVSQVPELGDLCDDVSERDWGVPEGRRLPQSLSQEGDFTPAAMGLLRGPLGEKDLDCNGFDSRFSLSPNLMACQEIPTEERPHPYDMGGQSFQHSVDLTGHEGVPTAESPLICNECGKTFQGNPDLIQRQIVHTGEASFMCDDCGKTFSQNSVLKNRHRSHMSEKAYQCSECGKAFRGHSDFSRHQSHHSSERPYMCNECGKAFSQNSSLKKHQKSHMSEKPYECNECGKAFRRSSNLIQHQRIHSGEKPYVCSECGKAFRRSSNLIKHHRTHTGEKPFECGECGKAFSQSAHLRKHQRVHTGEKPYECNDCGKPFSRVSNLIKHHRVHTGEKPYKCSDCGKAFSQSSSLIQHRRIHTGEKPHVCNVCGKAFSYSSVLRKHQIIHTGEKPYRCSVCGKAFSHSSALIQHQGVHTGDKPYACHECGKTFGRSSNLILHQRVHTGEKPYECTECGKTFSQSSTLIQHQRIHNGLKPHECNQCGKAFNRSSNLIHHQKVHTGEKPYTCVECGKGFSQSSHLIQHQIIHTGERPYKCSECGKAFSQRSVLIQHQRIHTGVKPYDCAACGKAFSQRSKLIKHQLIHTRE

SEQ ID NO: 99123 - protein, 682 aa, Homo sapiens; identical to SEQ ID NO: 99122
  Payload ID: 19777
  Gene Name: zinc finger protein 16
  Uniprot ID: P17020
  ENSP ID: ENSP00000378369

SEQ ID NO: 99124 - protein, 124 aa, Homo sapiens
  Payload ID: 19777
  Gene Name: zinc finger protein 16
  ENSP ID: ENSP00000432755
MPSLRTRREEAEMELSVPGPSPWTPAAQARVRDAPAVTHPGSAACGTPCCSDTELEAICPHYQQPDCDTRTEDKEFLHKEDIHEDLESQAEISENYAGDVSQVPELGDLCDDVSERDWGVPEGR

SEQ ID NO: 99125 - protein, 221 aa, Homo sapiens
  Payload ID: 19777
  Gene Name: zinc finger protein 16
  ENSP ID: ENSP00000434321
MPSLRTRREEAEMELSVPGPSPWTPAAQARVRDAPAVTHPGSAACGTPCCSDTELEAICPHYQQPDCDTRTEDKEFLHKEDIHEDLESQAEISENYAGDVSQVPELGDLCDDVSERDWGVPEGRRLPQSLSQEGDFTPAAMGLLRGPLGEKDLDCNGFDSRFSLSPNLMACQEIPTEERPHPYDMGGQSFQHSVDLTGHEGVPTAESPLICNECGKTFQGN

SEQ ID NO: 99126 - protein, 682 aa, Homo sapiens; identical to SEQ ID NO: 99122
  Payload ID: 19777
  Gene Name: zinc finger protein 16
  Uniprot ID: P17020
  ENSP ID: ENSP00000484504

SEQ ID NO: 99127 - protein, 147 aa, Homo sapiens
  Payload ID: 19778
  Gene Name: zinc finger protein 160
  Uniprot ID: Q9HCG1
  ENSP ID: ENSP00000347273
MALTQVRLTFRDVAIEFSQEEWKCLDPAQRILYRDVMLENYWNLVSLGLCHFDMNIISMLEEGKEPWTVKSCVKIARKPRTPECVKGVVTDLLRRWKHWLLLLGICCPKPHGRVSSRLRLSRSLGHFFHSAFATFMGVCDKRVGSIF

SEQ ID NO: 99128 - protein, 818 aa, Homo sapiens
  Payload ID: 19778
  Gene Name: zinc finger protein 160
  Uniprot ID: Q9HCG1
  ENSP ID: ENSP00000406201
MALTQVRLTFRDVAIEFSQEEWKCLDPAQRILYRDVMLENYWNLVSLGLCHFDMNIISMLEEGKEPWTVKSCVKIARKPRTPECVKGVVTDIPPKCTIKDLLPKEKSSTEAVFHTVVLERHESPDIEDFSFKEPQKNVHDFECQWRDDTGNYKGVLMAQKEGKRDQRDRRDIENKLMNNQLGVSFHSHLPELQLFQGEGKMYECNQVEKSTNNGSSVSPLQQIPSSVQTHRSKKYHELNHFSLLTQRRKANSCGKPYKCNECGKAFTQNSNLTSHRRIHSGEKPYKCSECGKTFTVRSNLTIHQVIHTGEKPYKCHECGKVFRHNSYLATHRRIHTGEKPYKCNECGKAFRGHSNLTTHQLIHTGEKPFKCNECGKLFTQNSHLISHWRIHTGEKPYKCNECGKAFSVRSSLAIHQTIHTGEKPYKCNECGKVFRYNSYLGRHRRVHTGEKPYKCNECGKAFSMHSNLATHQVIHTGTKPFKCNECSKVFTQNSQLANHRRIHTGEKPYKCNECGKAFSVRSSLTTHQAIHSGEKPYKCIECGKSFTQKSHLRSHRGIHSGEKPYKCNECGKVFAQTSQLARHWRVHTGEKPYKCNDCGRAFSDRSSLTFHQAIHTGEKPYKCHECGKVFRHNSYLATHRRIHTGEKPYKCNECGKAFSMHSNLTTHKVIHTGEKPYKCNQCGKVFTQNSHLANHQRTHTGEKPYRCNECGKAFSVRSSLTTHQAIHTGKKPYKCNECGKVFTQNAHLANHRRIHTGEKPYRCTECGKAFRVRSSLTTHMAIHTGEKRYKCNECGKVFRQSSNLASHHRMHTGEKPYK

SEQ ID NO: 99129 - protein, 818 aa, Homo sapiens; identical to SEQ ID NO: 99128
  Payload ID: 19778
  Gene Name: zinc finger protein 160
  Uniprot ID: Q9HCG1
  ENSP ID: ENSP00000409597

SEQ ID NO: 99130 - protein, 556 aa, Homo sapiens
  Payload ID: 19778
  Gene Name: zinc finger protein 160
  ENSP ID: ENSP00000469393
MALTQVRLTFRDVAIEFSQEEWKCLDPAQRILYRDVMLENYWNLVSLGLCHFDMNIISMLEEGKEPWTVKSCVKIARKPRTPECVKGVVTDIPPKCTIKDLLPKEKSSTEAVFHTVVLERHESPDIEDFSFKEPQKNVHDFECQWRDDTGNYKGVLMAQKEGKRDQRDRRDIENKLMNNQLGVSFHSHLPELQLFQGEGKMYECNQVEKSTNNGSSVSPLQQIPSSVQTHRSKKYHELNHFSLLTQRRKANSCGKPYKCNECGKAFTQNSNLTSHRRIHSGEKPYKCSECGKTFTVRSNLTIHQVIHTGEKPYKCHECGKVFRHNSYLATHRRIHTGEKPYKCNECGKAFRGHSNLTTHQLIHTGEKPFKCNECGKLFTQNSHLISHWRIHTGEKPYKCNECGKAFSVRSSLAIHQTIHTGEKPYKCNECGKVFRYNSYLGRHRRVHTGEKPYKCNECGKAFSMHSNLATHQVIHTGTKPFKCNECSKVFTQNSQLANHRRIHTGEKPYKCNECGKAFSVRSSLTTHQAIHSGEKPYKCIECGKSFTQKSHLRSHR

SEQ ID NO: 99131 - protein, 117 aa, Homo sapiens
  Payload ID: 19778
  Gene Name: zinc finger protein 160
  ENSP ID: ENSP00000470305
MLENYWNLVSLGLCHFDMNIISMLEEGKEPWTVKSCVKIARKPRTPECVKGVVTDIPPKCTIKDLLPKEKSSTEAVFHTVVLERHESPDIEDFSFKEPQKNVHDFECQWRDDTGNYK

SEQ ID NO: 99132 - protein, 782 aa, Homo sapiens
  Payload ID: 19778
  Gene Name: zinc finger protein 160
  ENSP ID: ENSP00000470573
MLENYWNLVSLGLCHFDMNIISMLEEGKEPWTVKSCVKIARKPRTPECVKGVVTDIPPKCTIKDLLPKEKSSTEAVFHTVVLERHESPDIEDFSFKEPQKNVHDFECQWRDDTGNYKGVLMAQKEGKRDQRDRRDIENKLMNNQLGVSFHSHLPELQLFQGEGKMYECNQVEKSTNNGSSVSPLQQIPSSVQTHRSKKYHELNHFSLLTQRRKANSCGKPYKCNECGKAFTQNSNLTSHRRIHSGEKPYKCSECGKTFTVRSNLTIHQVIHTGEKPYKCHECGKVFRHNSYLATHRRIHTGEKPYKCNECGKAFRGHSNLTTHQLIHTGEKPFKCNECGKLFTQNSHLISHWRIHTGEKPYKCNECGKAFSVRSSLAIHQTIHTGEKPYKCNECGKVFRYNSYLGRHRRVHTGEKPYKCNECGKAFSMHSNLATHQVIHTGTKPFKCNECSKVFTQNSQLANHRRIHTGEKPYKCNECGKAFSVRSSLTTHQAIHSGEKPYKCIECGKSFTQKSHLRSHRGIHSGEKPYKCNECGKVFAQTSQLARHWRVHTGEKPYKCNDCGRAFSDRSSLTFHQAIHTGEKPYKCHECGKVFRHNSYLATHRRIHTGEKPYKCNECGKAFSMHSNLTTHKVIHTGEKPYKCNQCGKVFTQNSHLANHQRTHTGEKPYRCNECGKAFSVRSSLTTHQAIHTGKKPYKCNECGKVFTQNAHLANHRRIHTGEKPYRCTECGKAFRVRSSLTTHMAIHTGEKRYKCNECGKVFRQSSNLASHHRMHTGEKPYK

SEQ ID NO: 99133 - protein, 818 aa, Homo sapiens; identical to SEQ ID NO: 99128
  Payload ID: 19778
  Gene Name: zinc finger protein 160
  Uniprot ID: Q9HCG1
  ENSP ID: ENSP00000470961

SEQ ID NO: 99134 - protein, 13 aa, Homo sapiens
  Payload ID: 19778
  Gene Name: zinc finger protein 160
  ENSP ID: ENSP00000472387
MALTQVRLTFRDV

SEQ ID NO: 99135 - protein, 485 aa, Homo sapiens
  Payload ID: 19779
  Gene Name: zinc finger protein 165
  Uniprot ID: P49910
  ENSP ID: ENSP00000366542
MATEPKKAAAQNSPEDEGLLIVKIEEEEFIHGQDTCLQRSELLKQELCRQLFRQFCYQDSPGPREALSRLRELCCQWLKPEIHTKEQILELLVLEQFLTILPGDLQAWVHEHYPESGEEAVTILEDLERGTDEAVLQVQAHEHGQEIFQKKVSPPGPALNVKLQPVETKAHFDSSEPQLLWDCDNESENSRSMPKLEIFEKIESQRIISGRISGYISEASGESQDICKSAGRVKRQWEKESGESQRLSSAQDEGFGKILTHKNTVRGEIISHDGCERRLNLNSNEFTHQKSCKHGTCDQSFKWNSDFINHQIIYAGEKNHQYGKSFKSPKLAKHAAVFSGDKTHQCNECGKAFRHSSKLARHQRIHTGERCYECNECGKSFAESSDLTRHRRIHTGERPFGCKECGRAFNLNSHLIRHQRIHTREKPYECSECGKTFRVSSHLIRHFRIHTGEKPYECSECGRAFSQSSNLSQHQRIHMRENLLM

SEQ ID NO: 99136 - protein, 125 aa, Homo sapiens
  Payload ID: 19780
  Gene Name: zinc finger protein 169
  ENSP ID: ENSP00000340711
MSPGLLTTRKEALMAFRDVAVAFTQKEWKLLSSAQRTLYREVMLENYSHLVSLGIAFSKPKLIEQLEQGDEPWREENEHLLDLCPAQTPSSWLLHKQQAEQMFLRQGLIGLSWSKSKGAAPKKGR

SEQ ID NO: 99137 - protein, 603 aa, Homo sapiens
  Payload ID: 19780
  Gene Name: zinc finger protein 169
  Uniprot ID: Q14929
  ENSP ID: ENSP00000378792
MSPGLLTTRKEALMAFRDVAVAFTQKEWKLLSSAQRTLYREVMLENYSHLVSLGIAFSKPKLIEQLEQGDEPWREENEHLLDLCPEPRTEFQPSFPHLVAFSSSQLLRQYALSGHPTQIFPSSSAGGDFQLEAPRCSSEKGESGETEGPDSSLRKRPSRISRTFFSPHQGDPVEWVEGNREGGTDLRLAQRMSLGGSDTMLKGADTSESGAVIRGNYRLGLSKKSSLFSHQKHHVCPECGRGFCQRSDLIKHQRTHTGEKPYLCPECGRRFSQKASLSIHQRKHSGEKPYVCRECGRHFRYTSSLTNHKRIHSGERPFVCQECGRGFRQKIALLLHQRTHLEEKPFVCPECGRGFCQKASLLQHQSSHTGERPFLCLECGRSFRQQSLLLSHQVTHSGEKPYVCAECGHSFRQKVTLIRHQRTHTGEKPYLCPQCGRGFSQKVTLIGHQRTHTGEKPYLCPDCGRGFGQKVTLIRHQRTHTGEKPYLCPKCGRAFGFKSLLTRHQRTHSEEELYVDRVCGQGLGQKSHLISDQRTHSGEKPCICDECGRGFGFKSALIRHQRTHSGEKPYVCRECGRGFSQKSHLHRHRRTKSGHQLLPQEVF

SEQ ID NO: 99138 - protein, 126 aa, Homo sapiens
  Payload ID: 19780
  Gene Name: zinc finger protein 169
  ENSP ID: ENSP00000474608
MSPGLLTTRKEALMAFRDVAVAFTQKEWKLLSSAQRTLYREVMLENYSHLVSLGIAFSKPKLIEQLEQGDEPWREENEHLLDLCPGEWEALGKRGCRAVRSSAGKEGGAIFEVLGGSSSSGLLGHW

SEQ ID NO: 99139 - protein, 111 aa, Homo sapiens
  Payload ID: 19780
  Gene Name: zinc finger protein 169
  ENSP ID: ENSP00000475038
MSPGLLTTRKEALMAFRDVAVAFTQKEWKLLSSAQRTLYREVMLENYSHLVSLGIAFSKPKLIEQLEQGDEPWREENEHLLDLCPESRSVTQAGVQWHDLGSLQPLPPVFK

SEQ ID NO: 99140 - protein, 664 aa, Homo sapiens
  Payload ID: 19781
  Gene Name: zinc finger protein 17
  Uniprot ID: P17021
  ENSP ID: ENSP00000302455
MLMDAGQDYMVFEDVAIHFSQEEWGILNDVQRHLHSDVMLENFALLSSVGCWHGAKDEEAPSKQCVSVGVSQVTTLKPALSTQKAQPCETCSSLLKDILHLAEHDGTHPKRTAKLYLHQKEHLREKLTRSDEGRPSFVNDSVHLAKRNLTCMQGGKDFTGDSDLQQQALHSGWKPHRDTHGVEAFQSGQNNYSCTQCGKDFCHQHTLFEHQKIHTEERPYECSECGKLFRYNSDLIKHQRNHTGERPYKCSECGKAFSLKYNVVQHQKIHTGERPYECSECGKAFLRKSHLLQHQRIHTRPRPYVCSECGKAFLTQAHLVGHQKIHTGERPYGCNECGKYFMYSSALIRHQKVHTGERPFYCCECGKFFMDSCTLIIHQRVHTGEKPYECNECGKFFRYRSTLIRHQKVHTGEKPYECSECGKFFMDTSTLIIHQRVHTGEKPYECNKCGKFFRYCFTLNRHQRVHSGERPYECSECGKFFVDSCTLKSHQRVHTGERPFECSICGKSFRCRSTLDTHQRIHTGERPYECSECGKFFRHNSNHIRHRRNHFGERSFECTECGRVFSQNSHLIRHQKVHTRERTYKCSKCGKFFMDSSTLISHERVHTGEKPYECSECGKVFRYNSSLIKHRRIHTGERPYQCSECGRVFNQNSHLIQHQKVHTR

SEQ ID NO: 99141 - protein, 51 aa, Homo sapiens
  Payload ID: 19781
  Gene Name: zinc finger protein 17
  ENSP ID: ENSP00000470712
MNLTEVGAASQGAPPDPSSECRSPEEGPCRSGPCVPKRGAFLCGVPVSAVL

SEQ ID NO: 99142 - protein, 662 aa, Homo sapiens
  Payload ID: 19781
  Gene Name: zinc finger protein 17
  Uniprot ID: P17021
  ENSP ID: ENSP00000471905
MNLTEDYMVFEDVAIHFSQEEWGILNDVQRHLHSDVMLENFALLSSVGCWHGAKDEEAPSKQCVSVGVSQVTTLKPALSTQKAQPCETCSSLLKDILHLAEHDGTHPKRTAKLYLHQKEHLREKLTRSDEGRPSFVNDSVHLAKRNLTCMQGGKDFTGDSDLQQQALHSGWKPHRDTHGVEAFQSGQNNYSCTQCGKDFCHQHTLFEHQKIHTEERPYECSECGKLFRYNSDLIKHQRNHTGERPYKCSECGKAFSLKYNVVQHQKIHTGERPYECSECGKAFLRKSHLLQHQRIHTRPRPYVCSECGKAFLTQAHLVGHQKIHTGERPYGCNECGKYFMYSSALIRHQKVHTGERPFYCCECGKFFMDSCTLIIHQRVHTGEKPYECNECGKFFRYRSTLIRHQKVHTGEKPYECSECGKFFMDTSTLIIHQRVHTGEKPYECNKCGKFFRYCFTLNRHQRVHSGERPYECSECGKFFVDSCTLKSHQRVHTGERPFECSICGKSFRCRSTLDTHQRIHTGERPYECSECGKFFRHNSNHIRHRRNHFGERSFECTECGRVFSQNSHLIRHQKVHTRERTYKCSKCGKFFMDSSTLISHERVHTGEKPYECSECGKVFRYNSSLIKHRRIHTGERPYQCSECGRVFNQNSHLIQHQKVHTR

SEQ ID NO: 99143 - protein, 49 aa, Homo sapiens
  Payload ID: 19781
  Gene Name: zinc finger protein 17
  ENSP ID: ENSP00000472791
MLMDAGQDYMVFEDVAIHFSQEEWGILNDVQRHLHSDVMLENFALLSSV

SEQ ID NO: 99144 - protein, 407 aa, Homo sapiens
  Payload ID: 19782
  Gene Name: zinc finger protein 174
  Uniprot ID: Q15697
  ENSP ID: ENSP00000268655
MAAKMEITLSSNTEASSKQERHIIAKLEEKRGPPLQKNCPDPELCRQSFRRFCYQEVSGPQEALSQLRQLCRQWLQPELHTKEQILELLVMEQFLTILPPEIQARVRHRCPMSSKEIVTLVEDFHRASKKPKQWVAVCMQGQKVLLEKTGSQLGEQELPDFQPQTPRRDLRESSPAEPSQAGAYDRLSPHHWEKSPLLQEPTPKLAGTEAPRMRSDNKENPQQEGAKGAKPCAVSAGRSKGNGLQNPEPRGANMSEPRLSRRQVSSPNAQKPFAHYQRHCRVEYISSPLKSHPLRELKKSKGGKRSLSNRLQHLGHQPTRSAKKPYKCDDCGKSFTWNSELKRHKRVHTGERPYTCGECGNCFGRQSTLKLHQRIHTGEKPYQCGQCGKSFRQSSNLHQHHRLHHGD

SEQ ID NO: 99145 - protein, 234 aa, Homo sapiens
  Payload ID: 19782
  Gene Name: zinc finger protein 174
  Uniprot ID: Q15697
  ENSP ID: ENSP00000339781
MAAKMEITLSSNTEASSKQERHIIAKLEEKRGPPLQKNCPDPELCRQSFRRFCYQEVSGPQEALSQLRQLCRQWLQPELHTKEQILELLVMEQFLTILPPEIQARVRHRCPMSSKEIVTLVEDFHRASKKPKQWVAVCMQGQKVLLEKTGSQLGEQELPDFQPQTPRRDLRESSPAEPSQAGAYDRLSPHHWEKSPLLQEPTPKLAGTELLIEKTDPNMATDELPCKLWLSFIA

SEQ ID NO: 99146 - protein, 249 aa, Homo sapiens
  Payload ID: 19782
  Gene Name: zinc finger protein 174
  ENSP ID: ENSP00000459681
MAAKMEITLSSNTEASSKQERHIIAKLEEKRGPPLQKNCPDPELCRQSFRRFCYQEVSGPQEALSQLRQLCRQWLQPELHTKEQILELLVMEQFLTILPPEIQARVRHRCPMSSKEIVTLVEDFHRASKKPKQWVAVCMQGQKVLLEKTGSQLGEQELPDFQPQTPRRDLRESSPAEPSQAGAYDRLSPHHWEKSPLLQEPTPKLAGTGKHSAFSLPLISPLSPSMYLMVLQRHRPHVCVFLNVIYNSR

SEQ ID NO: 99147 - protein, 407 aa, Homo sapiens; identical to SEQ ID NO: 99144
  Payload ID: 19782
  Gene Name: zinc finger protein 174
  Uniprot ID: Q15697
  ENSP ID: ENSP00000460397

SEQ ID NO: 99148 - protein, 234 aa, Homo sapiens; identical to SEQ ID NO: 99145
  Payload ID: 19782
  Gene Name: zinc finger protein 174
  Uniprot ID: Q15697
  ENSP ID: ENSP00000461502

SEQ ID NO: 99149 - protein, 711 aa, Homo sapiens
  Payload ID: 19783
  Gene Name: zinc finger protein 175
  Uniprot ID: Q9Y473
  ENSP ID: ENSP00000262259
MPADVNLSQKPQVLGPEKQDGSCEASVSFEDVTVDFSREEWQQLDPAQRCLYRDVMLELYSHLFAVGYHIPNPEVIFRMLKEKEPRVEEAEVSHQRCQEREFGLEIPQKEISKKASFQKDMVGEFTRDGSWCSILEELRLDADRTKKDEQNQIQPMSHSAFFNKKTLNTESNCEYKDPGKMIRTRPHLASSQKQPQKCCLFTESLKLNLEVNGQNESNDTEQLDDVVGSGQLFSHSSSDACSKNIHTGETFCKGNQCRKVCGHKQSLKQHQIHTQKKPDGCSECGGSFTQKSHLFAQQRIHSVGNLHECGKCGKAFMPQLKLSVYLTDHTGDIPCICKECGKVFIQRSELLTHQKTHTRKKPYKCHDCGKAFFQMLSLFRHQRTHSREKLYECSECGKGFSQNSTLIIHQKIHTGERQYACSECGKAFTQKSTLSLHQRIHSGQKSYVCIECGQAFIQKAHLIVHQRSHTGEKPYQCHNCGKSFISKSQLDIHHRIHTGEKPYECSDCGKTFTQKSHLNIHQKIHTGERHHVCSECGKAFNQKSILSMHQRIHTGEKPYKCSECGKAFTSKSQFKEHQRIHTGEKPYVCTECGKAFNGRSNFHKHQITHTRERPFVCYKCGKAFVQKSELITHQRTHMGEKPYECLDCGKSFSKKPQLKVHQRIHTGERPYVCSECGKAFNNRSNFNKHQTTHTRDKSYKCSYSVKGFTKQ

SEQ ID NO: 99150 - protein, 112 aa, Homo sapiens
  Payload ID: 19783
  Gene Name: zinc finger protein 175
  ENSP ID: ENSP00000440578
MPADVNLSQKPQVLGPEKQDGSCEASVSFEDVTVDFSREEWQQLDPAQRCLYRDVMLELYSHLFAVGYHIPNPEVIFRMLKEKEPRVEEAEVSHQRCQGLAQLAPPFHLHHL

SEQ ID NO: 99151 - protein, 51 aa, Homo sapiens
  Payload ID: 19783
  Gene Name: zinc finger protein 175
  ENSP ID: ENSP00000444424
MPADVNLSQKPQVLGPEKQDGSCEVNRGSPGDSSPEREGRHRMQQVWAPCS

SEQ ID NO: 99152 - protein, 70 aa, Homo sapiens
  Payload ID: 19783
  Gene Name: zinc finger protein 175
  ENSP ID: ENSP00000470922
MPADVNLSQKPQVLGPEKQDGSCEASVSFEDVTVDFSREEWQQLDPAQRCLYRDVMLELYSHLFAVGEHN

SEQ ID NO: 99153 - protein, 321 aa, Homo sapiens
  Payload ID: 19784
  Gene Name: zinc finger protein 177
  Uniprot ID: Q13360
  ENSP ID: ENSP00000341497
MAAGWLTTWSQNSVTFQEVAVDFSQEEWALLDPAQKNLYKDVMLENFRNLASVGYQLCRHSLISKVDQEQLKTDERGILQGDCADWETQLKPKDTIAMQNIPGGKTSNGINTNCVRTHSGEMPYECSDCGKAFIFQSSLKKHMRSHTGEKPYECDHCGKSFSQSSHLNVHKRTHTGEKPYDCKECGKAFTVPSSLQKHVRTHTGEKPYECSDCGKAFIDQSSLKKHTRSHTGEKPYECNQCGKSFSTGSYLIVHKRTHTGEKTYECKECGKAFRNSSCLRVHVRTHTGEKPYKCIQCEKAFSTSTNLIMHKRIHNGQKLHE

SEQ ID NO: 99154 - protein, 126 aa, Homo sapiens
  Payload ID: 19784
  Gene Name: zinc finger protein 177
  ENSP ID: ENSP00000465438
MAAGWLTTWSQNSVTFQEVAVDFSQEEWALLDPAQKNLYKDVMLENFRNLASVGYQLCRHSLISKVDQEQLKTDERGILQGDCADWETQLKPKDTIAMQNIPGGKTSNGINTKIYTPRGGQRKDTK

SEQ ID NO: 99155 - protein, 17 aa, Homo sapiens
  Payload ID: 19784
  Gene Name: zinc finger protein 177
  ENSP ID: ENSP00000467978
MAAGWLTTWSQNSVTFQ

SEQ ID NO: 99156 - protein, 481 aa, Homo sapiens
  Payload ID: 19784
  Gene Name: zinc finger protein 177
  Uniprot ID: Q13360
  ENSP ID: ENSP00000468531
MAAGWLTTWSQNSVTFQEVAVDFSQEEWALLDPAQKNLYKDVMLENFRNLASVGYQLCRHSLISKVDQEQLKTDERGILQGDCADWETQLKPKDTIAMQNIPGGKTSNGINTAENQPGEHSLECNHCGKFRKNTRFICTRYCKGEKCYKYIKYSKVFNHPSTLRSHVSIHIGEKTLEFTDCRKAFNQESSLRKHLRTPTGQKFQEYEQCDMSFSLHSSCSVREQIPTGEKGDECSDYGKISPLSVHTKTGSVEEGLECNEHEKTFTDPLSLQNCVRTHSGEMPYECSDCGKAFIFQSSLKKHMRSHTGEKPYECDHCGKSFSQSSHLNVHKRTHTGEKPYDCKECGKAFTVPSSLQKHVRTHTGEKPYECSDCGKAFIDQSSLKKHTRSHTGEKPYECNQCGKSFSTGSYLIVHKRTHTGEKTYECKECGKAFRNSSCLRVHVRTHTGEKPYKCIQCEKAFSTSTNLIMHKRIHNGQKLHE

SEQ ID NO: 99157 - protein, 549 aa, Homo sapiens
  Payload ID: 19785
  Gene Name: zinc finger protein 18
  Uniprot ID: P17022
  ENSP ID: ENSP00000315664
MPVDLGQALGLLPSLAKAEDSQFSESDAALQEELSSPETARQLFRQFRYQVMSGPHETLKQLRKLCFQWLQPEVHTKEQILEILMLEQFLTILPGEIQMWVRKQCPGSGEEAVTLVESLKGDPQRLWQWISIQVLGQDILSEKMESPSCQVGEVEPHLEVVPQELGLENSSSGPGELLSHIVKEESDTEAELALAASQPARLEERLIRDQDLGASLLPAAPQEQWRQLDSTQKEQYWDLMLETYGKMVSGAGISHPKSDLTNSIEFGEELAGIYLHVNEKIPRPTCIGDRQENDKENLNLENHRDQELLHASCQASGEVPSQASLRGFFTEDEPGCFGEGENLPEALQNIQDEGTGEQLSPQERISEKQLGQHLPNPHSGEMSTMWLEEKRETSQKGQPRAPMAQKLPTCRECGKTFYRNSQLIFHQRTHTGETYFQCTICKKAFLRSSDFVKHQRTHTGEKPCKCDYCGKGFSDFSGLRHHEKIHTGEKPYKCPICEKSFIQRSNFNRHQRVHTGEKPYKCSHCGKSFSWSSSLDKHQRSHLGKKPFQ

SEQ ID NO: 99158 - protein, 548 aa, Homo sapiens
  Payload ID: 19785
  Gene Name: zinc finger protein 18
  Uniprot ID: P17022
  ENSP ID: ENSP00000391376
MPVDLGQALGLLPSLAKAEDSQFSESDAALQEELSSPETARQLFRQFRYQVMSGPHETLKQLRKLCFQWLQPEVHTKEQILEILMLEQFLTILPGEIQMWVRKQCPGSGEEAVTLVESLKGDPQRLWQWISIQVLGQDILSEKMESPSCQVGEVEPHLEVVPQELGLENSSSGPGELLSHIVKEESDTEAELALAASQPARLEERLIRDQDLGASLLPAAPQEQWRQLDSTQKEQYWDLMLETYGKMVSGGISHPKSDLTNSIEFGEELAGIYLHVNEKIPRPTCIGDRQENDKENLNLENHRDQELLHASCQASGEVPSQASLRGFFTEDEPGCFGEGENLPEALQNIQDEGTGEQLSPQERISEKQLGQHLPNPHSGEMSTMWLEEKRETSQKGQPRAPMAQKLPTCRECGKTFYRNSQLIFHQRTHTGETYFQCTICKKAFLRSSDFVKHQRTHTGEKPCKCDYCGKGFSDFSGLRHHEKIHTGEKPYKCPICEKSFIQRSNFNRHQRVHTGEKPYKCSHCGKSFSWSSSLDKHQRSHLGKKPFQ

SEQ ID NO: 99159 - protein, 549 aa, Homo sapiens; identical to SEQ ID NO: 99157
  Payload ID: 19785
  Gene Name: zinc finger protein 18
  Uniprot ID: P17022
  ENSP ID: ENSP00000462296

SEQ ID NO: 99160 - protein, 232 aa, Homo sapiens
  Payload ID: 19785
  Gene Name: zinc finger protein 18
  ENSP ID: ENSP00000462383
HIVKEESDTEAELALAASQPARLEERLIRDQDLGASLLPAAPQEQWRQLDSTQKEQYWDLMLETYGKMVSGGDRQENDKENLNLENHRDQELLHASCQASGEVPSQASLRGFFTEDEPGCFGEGENLPEALQNIQDEGTGEQLSPQERISEKQLGQHLPNPHSGEMSTMWLEEKRETSQKGQPRAPMAQKLPTCRECGKTFYRNSQLIFHQRTHTGETYFQCTICKKAFLRS

SEQ ID NO: 99161 - protein, 96 aa, Homo sapiens
  Payload ID: 19785
  Gene Name: zinc finger protein 18
  ENSP ID: ENSP00000462416
MPVDLGQALGLLPSLAKAEDSQFSESDAALQEELSSPETARQLFRQFRYQVMSGPHETLKQLRKLCFQWLQPEVHTKEQILEILMLEQFLTILPGE

SEQ ID NO: 99162 - protein, 243 aa, Homo sapiens
  Payload ID: 19785
  Gene Name: zinc finger protein 18
  ENSP ID: ENSP00000462877
  MOD_RES (1)..(1): Any amino acid
XLSHIVKEESDTEAELALAASQPARLEERLIRDQDLGASLLPAAPQWRQLDSTQKEQYWDLMLETYGKMVSGGISHPKSDLTNSIEFGEELAGIYLHVNEKIPRPTCIGDRQENDKENLNLENHRDQELLHASCQASGEVPSQASLRGFFTEDEPGCFGEGENLPEALQNIQDEGTGEQLSPQERISEKQLGQHLPNPHSGEMSTMWLEEKRETSQKGQPRAPMAQKLPTCRECGKTFYRNSQ

SEQ ID NO: 99163 - protein, 549 aa, Homo sapiens; identical to SEQ ID NO: 99157
  Payload ID: 19785
  Gene Name: zinc finger protein 18
  Uniprot ID: P17022
  ENSP ID: ENSP00000463471

SEQ ID NO: 99164 - protein, 692 aa, Homo sapiens
  Payload ID: 19786
  Gene Name: zinc finger protein 180
  Uniprot ID: Q9UJW8
  ENSP ID: ENSP00000221327
MRACAGSTREAGSGAQDLSTLLCLEESMEEQDEKPPEPPKVCAQDSFLPQEIIIKVEGEDTGSLTIPSQEGVNFKIVTVDFTREEQGTCNPAQRTLDRDVILENHRDLVSWDLATAVGKKDSTSKQRIFDEEPANGVKIERFTRDDPWLSSCEEVDDCKDQLEKQQEKQEILLQEVAFTQRKAVIHERVCKSDETGEKSGLNSSLFSSPVIPIRNHFHKHVSHAKKWHLNAAVNSHQKINENETLYENNECGKPPQSIHLIQFTRTQTKDKSYGFSDRIQSFCHGTPLHIHEKIHGGGKTFDFKECGQVLNPKISHNEQQRIPFEESQYKCSETSHSSSLTQNMRNNSEEKPFECNQCGKSFSWSSHLVAHQRTHTGEKPYECSECGKSFSRSSHLVSHQRTHTGEKPYRCNQCGKSFSQSYVLVVHQRTHTGEKPYECNQCGKSFRQSYKLIAHQRTHTGEKPYECNQCGKSFIQSYKLIAHQRIHTGEKPYECNQCGKSFSQSYKLVAHQRTHTGEKPFECNQCGKSFSWSSQLVAHQRTHTGEKPYECSECGKSFNRSSHLVMHQRIHTGEKPYECNQCGKSFSQSYVLVVHQRTHTGEKPYECSQCGKSFRQSSCLTQHQRTHTGEKPFECNQCGKTFSLSARLIVHQRTHTGEKPFTCIQCGKAFINSYKLIRHQATHTEEKLYECN

SEQ ID NO: 99165 - protein, 667 aa, Homo sapiens
  Payload ID: 19786
  Gene Name: zinc finger protein 180
  ENSP ID: ENSP00000375818
MRACAGSTREAGSGAQDLSTLLCLEESMEEQDEKPPEPPKVCAQEGVNFKIVTVDFTREEQGTCNPAQRTLDRDVILENHRDLVSWDLATAVGKKDSTSKQRIFDEEPANGVKIERFTRDDPWLSSCEEVDDCKDQLEKQQEKQEILLQEVAFTQRKAVIHERVCKSDETGEKSGLNSSLFSSPVIPIRNHFHKHVSHAKKWHLNAAVNSHQKINENETLYENNECGKPPQSIHLIQFTRTQTKDKSYGFSDRIQSFCHGTPLHIHEKIHGGGKTFDFKECGQVLNPKISHNEQQRIPFEESQYKCSETSHSSSLTQNMRNNSEEKPFECNQCGKSFSWSSHLVAHQRTHTGEKPYECSECGKSFSRSSHLVSHQRTHTGEKPYRCNQCGKSFSQSYVLVVHQRTHTGEKPYECNQCGKSFRQSYKLIAHQRTHTGEKPYECNQCGKSFIQSYKLIAHQRIHTGEKPYECNQCGKSFSQSYKLVAHQRTHTGEKPFECNQCGKSFSWSSQLVAHQRTHTGEKPYECSECGKSFNRSSHLVMHQRIHTGEKPYECNQCGKSFSQSYVLVVHQRTHTGEKPYECSQCGKSFRQSSCLTQHQRTHTGEKPFECNQCGKTFSLSARLIVHQRTHTGEKPFTCIQCGKAFINSYKLIRHQATHTEEKLYECN

SEQ ID NO: 99166 - protein, 65 aa, Homo sapiens
  Payload ID: 19786
  Gene Name: zinc finger protein 180
  ENSP ID: ENSP00000465426
MRACAGSTREAGSGVQLRTSAPCCAWRRAWKSRMRSPQSPRRSVHRILSFLKRLSSKSREKTLGL

SEQ ID NO: 99167 - protein, 50 aa, Homo sapiens
  Payload ID: 19786
  Gene Name: zinc finger protein 180
  ENSP ID: ENSP00000466516
MEEQDEKPPEPPKVCAQSLALSSRLECSDTILAHCRLKLLGSSHPPASAA

SEQ ID NO: 99168 - protein, 138 aa, Homo sapiens
  Payload ID: 19786
  Gene Name: zinc finger protein 180
  ENSP ID: ENSP00000466726
MRSPQSPRRSVHRWSLALLPRLEYSGMILDHCNLHLLCSSDSPASASQVAGTTGFFPSSRDYHQSRGRRHWVSDHPISGRSELQNCDCGLHTGGTGYLQPCSEDPGQRCDPGEPQGPSLLGLGNCSWKKRFNFKAEDF

SEQ ID NO: 99169 - protein, 183 aa, Homo sapiens
  Payload ID: 19786
  Gene Name: zinc finger protein 180
  ENSP ID: ENSP00000467916
MEEQDEKPPEPPKVCAQDSFLPQEIIIKVEGEDTGSLTIPSQEGVNFKIVTVDFTREEQGTCNPAQRTLDRDVILENHRDLVSWDLATAVGKKDSTSKQRIFDEEPANGVKIERFTRDDPWLSSCEEVDDCKDQLEKQQEKQEILLQEVAFTQRKAVIHERVCKSDETGEKSGLNSSLFSSPV

SEQ ID NO: 99170 - protein, 665 aa, Homo sapiens
  Payload ID: 19786
  Gene Name: zinc finger protein 180
  ENSP ID: ENSP00000468021
MEEQDEKPPEPPKVCAQDSFLPQEIIIKVEGEDTGSLTIPSQEGVNFKIVTVDFTREEQGTCNPAQRTLDRDVILENHRDLVSWDLATAVGKKDSTSKQRIFDEEPANGVKIERFTRDDPWLSSCEEVDDCKDQLEKQQEKQEILLQEVAFTQRKAVIHERVCKSDETGEKSGLNSSLFSSPVIPIRNHFHKHVSHAKKWHLNAAVNSHQKINENETLYENNECGKPPQSIHLIQFTRTQTKDKSYGFSDRIQSFCHGTPLHIHEKIHGGGKTFDFKECGQVLNPKISHNEQQRIPFEESQYKCSETSHSSSLTQNMRNNSEEKPFECNQCGKSFSWSSHLVAHQRTHTGEKPYECSECGKSFSRSSHLVSHQRTHTGEKPYRCNQCGKSFSQSYVLVVHQRTHTGEKPYECNQCGKSFRQSYKLIAHQRTHTGEKPYECNQCGKSFIQSYKLIAHQRIHTGEKPYECNQCGKSFSQSYKLVAHQRTHTGEKPFECNQCGKSFSWSSQLVAHQRTHTGEKPYECSECGKSFNRSSHLVMHQRIHTGEKPYECNQCGKSFSQSYVLVVHQRTHTGEKPYECSQCGKSFRQSSCLTQHQRTHTGEKPFECNQCGKTFSLSARLIVHQRTHTGEKPFTCIQCGKAFINSYKLIRHQATHTEEKLYECN

SEQ ID NO: 99171 - protein, 65 aa, Homo sapiens; identical to SEQ ID NO: 99166
  Payload ID: 19786
  Gene Name: zinc finger protein 180
  ENSP ID: ENSP00000468523

SEQ ID NO: 99172 - protein, 615 aa, Homo sapiens
  Payload ID: 19787
  Gene Name: zinc finger protein 181
  ENSP ID: ENSP00000376065
MPQLQYPEGYLAPNRCLVSNCGVNKMSNDELVGQNHGMEGEACIGGDVTFNDVAIDFTHEEWGWLSSAQRDLYKDVMVQNYENLVSVAGLSVTKPYVITLLEDGKEPWMMEKKLSKGMIPDWESRWENKELSTKKDNYDEDSPQTVIIEKVVKQSYEFSNSKKNLEYIEKLEGKHGSQVDHFRPAILTSRESPTADSVYKYNIFRSTFHSKSTLSEPQKISAEGNSHKYDILKKNLPKKSVIKNEKVNGGKKLLNSNKSGAAFSQGKSLTLPQTCNREKIYTCSECGKAFGKQSILNRHWRIHTGEKPYECRECGKTFSHGSSLTRHLISHSGEKPYKCIECGKAFSHVSSLTNHQSTHTGEKPYECMNCGKSFSRVSHLIEHLRIHTQEKLYECRICGKAFIHRSSLIHHQKIHTGEKPYECRECGKAFCCSSHLTRHQRIHTMEKQYECNKCLKVFSSLSFLVQHQSIHTEEKPFECQKCRKSFNQLESLNMHLRNHIRLKPYECSICGKAFSHRSSLLQHHRIHTGEKPYECIKCGKTFSCSSNLTVHQRIHTGEKPYKCNECGKAFSKGSNLTAHQRVHNGEKPNSVVSVEKPLDYMNHYTCEKSYRRETV

SEQ ID NO: 99173 - protein, 570 aa, Homo sapiens
  Payload ID: 19787
  Gene Name: zinc finger protein 181
  Uniprot ID: Q2M3W8
  ENSP ID: ENSP00000419435
MPQVTFNDVAIDFTHEEWGWLSSAQRDLYKDVMVQNYENLVSVGLSVTKPYVITLLEDGKEPWMMEKKLSKGMIPDWESRWENKELSTKKDNYDEDSPQTVIIEKVVKQSYEFSNSKKNLEYIEKLEGKHGSQVDHFRPAILTSRESPTADSVYKYNIFRSTFHSKSTLSEPQKISAEGNSHKYDILKKNLPKKSVIKNEKVNGGKKLLNSNKSGAAFSQGKSLTLPQTCNREKIYTCSECGKAFGKQSILNRHWRIHTGEKPYECRECGKTFSHGSSLTRHLISHSGEKPYKCIECGKAFSHVSSLTNHQSTHTGEKPYECMNCGKSFSRVSHLIEHLRIHTQEKLYECRICGKAFIHRSSLIHHQKIHTGEKPYECRECGKAFCCSSHLTRHQRIHTMEKQYECNKCLKVFSSLSFLVQHQSIHTEEKPFECQKCRKSFNQLESLNMHLRNHIRLKPYECSICGKAFSHRSSLLQHHRIHTGEKPYECIKCGKTFSCSSNLTVHQRIHTGEKPYKCNECGKAFSKGSNLTAHQRVHNGEKPNSVVSVEKPLDYMNHYTCEKSYRRETV

SEQ ID NO: 99174 - protein, 571 aa, Homo sapiens
  Payload ID: 19787
  Gene Name: zinc finger protein 181
  Uniprot ID: Q2M3W8
  ENSP ID: ENSP00000420727
MPQVTFNDVAIDFTHEEWGWLSSAQRDLYKDVMVQNYENLVSVAGLSVTKPYVITLLEDGKEPWMMEKKLSKGMIPDWESRWENKELSTKKDNYDEDSPQTVIIEKVVKQSYEFSNSKKNLEYIEKLEGKHGSQVDHFRPAILTSRESPTADSVYKYNIFRSTFHSKSTLSEPQKISAEGNSHKYDILKKNLPKKSVIKNEKVNGGKKLLNSNKSGAAFSQGKSLTLPQTCNREKIYTCSECGKAFGKQSILNRHWRIHTGEKPYECRECGKTFSHGSSLTRHLISHSGEKPYKCIECGKAFSHVSSLTNHQSTHTGEKPYECMNCGKSFSRVSHLIEHLRIHTQEKLYECRICGKAFIHRSSLIHHQKIHTGEKPYECRECGKAFCCSSHLTRHQRIHTMEKQYECNKCLKVFSSLSFLVQHQSIHTEEKPFECQKCRKSFNQLESLNMHLRNHIRLKPYECSICGKAFSHRSSLLQHHRIHTGEKPYECIKCGKTFSCSSNLTVHQRIHTGEKPYKCNECGKAFSKGSNLTAHQRVHNGEKPNSVVSVEKPLDYMNHYTCEKSYRRETV

SEQ ID NO: 99175 - protein, 110 aa, Homo sapiens
  Payload ID: 19787
  Gene Name: zinc finger protein 181
  ENSP ID: ENSP00000471063
MPQVTFNDVAIDFTHEEWGWLSSAQRDLYKDVMVQNYENLVSVAGLSVTKPYVITLLEDGKEPWMMEKKLSKDWESRWENKELSTKKDNYDEDSPQTVIIEKVVKQSYEF

SEQ ID NO: 99176 - protein, 75 aa, Homo sapiens
  Payload ID: 19787
  Gene Name: zinc finger protein 181
  ENSP ID: ENSP00000472046
MPQVTFNDVAIDFTHEEWGWLSSAQRDLYKDVMVQNYENLVSVGLSVTKPYVITLLEDGKEPWMMEKKLSKGMIP

SEQ ID NO: 99177 - protein, 144 aa, Homo sapiens
  Payload ID: 19787
  Gene Name: zinc finger protein 181
  ENSP ID: ENSP00000473016
MPQVTFNDVAIDFTHEEWGWLSSAQRDLYKDVMVQNYENLVSVGLSVTKPYVITLLEDGKEPWMMEKKLSKGMIPDWESRWENKELSTKKDNYDEDSPQTVIIEKVVKQSYEFSNSKKNLEYIEKLEGKHGSQVDHFRPAILTS

SEQ ID NO: 99178 - protein, 639 aa, Homo sapiens
  Payload ID: 19788
  Gene Name: zinc finger protein 182
  Uniprot ID: P17025
  ENSP ID: ENSP00000306351
MTPASASGEDSGSFYSWQKAKREQGLVTFEDVAVDFTQEEWQYLNPPQRTLYRDVMLETYSNLVFVGQQVTKPNLILKLEVEECPAEGKIPFWNFPEVCQVDEQIERQHQDDQDKCLLMQVGFSDKKTIITKSARDCHEFGNILHLSTNLVASIQRPDKHESFGNNMVDNLDLFSRSSAENKYDNGCAKLFFHTEYEKTNPGMKPYGYKECGKGLRRKKGLSLHQRIKNGEKPFECTACRKTFSKKSHLIVHWRTHTGEKPFGCTECGKAFSQKSQLIIHLRTHTGERPFECPECGKAFREKSTVIIHYRTHTGEKPYECNECGKAFTQKSNLIVHQKTHTGEKTYECTKCGESFIQKLDLIIHHSTHTGKKPHECNECKKTFSDKSTLIIHQRTHTGEKPHKCTECGKSFNEKSTLIVHQRTHTGEKPYECDVCGKTFTQKSNLGVHQRTHSGEKPFECNECEKAFSQKSYLMLHQRGHTGEKPYECNECEKAFSQKSYLIIHQRTHTEEKPYKCNECGKAFREKSKLIIHQRIHTGEKPYECPVCWKAFSQKSQLIIHQRTHTGEKPYACTECGKAFREKSTFTVHQRTHTGEKPYKCTECGKAFTQKSNLIVHQRTHAGKKAHGRGHTRKSKFMAH

SEQ ID NO: 99179 - protein, 620 aa, Homo sapiens
  Payload ID: 19788
  Gene Name: zinc finger protein 182
  Uniprot ID: P17025
  ENSP ID: ENSP00000366142
MAKPQGLVTFEDVAVDFTQEEWQYLNPPQRTLYRDVMLETYSNLVFVGQQVTKPNLILKLEVEECPAEGKIPFWNFPEVCQVDEQIERQHQDDQDKCLLMQVGFSDKKTIITKSARDCHEFGNILHLSTNLVASIQRPDKHESFGNNMVDNLDLFSRSSAENKYDNGCAKLFFHTEYEKTNPGMKPYGYKECGKGLRRKKGLSLHQRIKNGEKPFECTACRKTFSKKSHLIVHWRTHTGEKPFGCTECGKAFSQKSQLIIHLRTHTGERPFECPECGKAFREKSTVIIHYRTHTGEKPYECNECGKAFTQKSNLIVHQKTHTGEKTYECTKCGESFIQKLDLIIHHSTHTGKKPHECNECKKTFSDKSTLIIHQRTHTGEKPHKCTECGKSFNEKSTLIVHQRTHTGEKPYECDVCGKTFTQKSNLGVHQRTHSGEKPFECNECEKAFSQKSYLMLHQRGHTGEKPYECNECEKAFSQKSYLIIHQRTHTEEKPYKCNECGKAFREKSKLIIHQRIHTGEKPYECPVCWKAFSQKSQLIIHQRTHTGEKPYACTECGKAFREKSTFTVHQRTHTGEKPYKCTECGKAFTQKSNLIVHQRTHAGKKAHGRGHTRKSKFMAH

SEQ ID NO: 99180 - protein, 639 aa, Homo sapiens; identical to SEQ ID NO: 99178
  Payload ID: 19788
  Gene Name: zinc finger protein 182
  Uniprot ID: P17025
  ENSP ID: ENSP00000380165

SEQ ID NO: 99181 - protein, 751 aa, Homo sapiens
  Payload ID: 19789
  Gene Name: zinc finger protein 184
  Uniprot ID: Q99676
  ENSP ID: ENSP00000211936
MEDLSSPDSTLLQGGHNLLSSASFQEAVTFKDVIVDFTQEEWKQLDPGQRDLFRDVTLENYTHLVSIGLQVSKPDVISQLEQGTEPWIMEPSIPVGTCADWETRLENSVSAPEPDISEEELSPEVIVEKHKRDDSWSSNLLESWEYEGSLERQQANQQTLPKEIKVTEKTIPSWEKGPVNNEFGKSVNVSSNLVTQEPSPEETSTKRSIKQNSNPVKKEKSCKCNECGKAFSYCSALIRHQRTHTGEKPYKCNECEKAFSRSENLINHQRIHTGDKPYKCDQCGKGFIEGPSLTQHQRIHTGEKPYKCDECGKAFSQRTHLVQHQRIHTGEKPYTCNECGKAFSQRGHFMEHQKIHTGEKPFKCDECDKTFTRSTHLTQHQKIHTGEKTYKCNECGKAFNGPSTFIRHHMIHTGEKPYECNECGKAFSQHSNLTQHQKTHTGEKPYDCAECGKSFSYWSSLAQHLKIHTGEKPYKCNECGKAFSYCSSLTQHRRIHTREKPFECSECGKAFSYLSNLNQHQKTHTQEKAYECKECGKAFIRSSSLAKHERIHTGEKPYQCHECGKTFSYGSSLIQHRKIHTGERPYKCNECGRAFNQNIHLTQHKRIHTGAKPYECAECGKAFRHCSSLAQHQKTHTEEKPYQCNKCEKTFSQSSHLTQHQRIHTGEKPYKCNECDKAFSRSTHLTEHQNTHTGEKPYNCNECRKTFSQSTYLIQHQRIHSGEKPFGCNDCGKSFRYRSALNKHQRLHPGI

SEQ ID NO: 99182 - protein, 751 aa, Homo sapiens; identical to SEQ ID NO: 99181
  Payload ID: 19789
  Gene Name: zinc finger protein 184
  Uniprot ID: Q99676
  ENSP ID: ENSP00000366636

SEQ ID NO: 99183 - protein, 630 aa, Homo sapiens
  Payload ID: 19790
  Gene Name: zinc finger protein 185 (LIM domain)
  Uniprot ID: O15231
  ENSP ID: ENSP00000312782
MSISALGGRTKGKPLPPGEEERNNVLKQMKVRTTLKGDKSWITKQDESEGRTIELPSGRSRATSFSSAGEVPKPRPPSTRAPTGYIIRGVFTKPIDSSSQPQQQFPKANGTPKSAASLVRTANAGPPRPSSSGYKMTTEDYKKLAPYNIRRSSTSGDTEEEEEEEVVPFSSDEQKRRSEAASGVLRRTAPREHSYVLSAAKKSTGPTQETQAPFIAKRVEVVEEDGPSEKSQDPPALARSTPGSNRSSPGNKDKEAPCSRELQRDLAGEEAFRAPNTDAARSSAQLSDGNVGSGATGSRPEGLAAVDIGSERGSSSATSVSAVPADRKSNSTAAQEDAKADPKGALADYEGKDVATRVGEAWQERPGAPRGGQGDPAVPAQQPADPSTPERQSSPSGSEQLVRRESCGSSVLTDFEGKDVATKVGEAWQDRPGAPRGGQGDPAVPTQQPADPSTPEQQNSPSGSEQFVRRESCTSRVRSPSSCMVTVTVTATSEQPHIYIPAPASELDSSSTTKGILFVKEYVNASEVSSGKPVSARYSNVSSIEDSFAMEKKPPCGSTPYSERTTGGICTYCNREIRDCPKITLEHLGICCHEYCFKCGICSKPMGDLLDQIFIHRDTIHCGKCYEKLF

SEQ ID NO: 99184 - protein, 468 aa, Homo sapiens
  Payload ID: 19790
  Gene Name: zinc finger protein 185 (LIM domain)
  Uniprot ID: O15231
  ENSP ID: ENSP00000313919
MTTEDYKKLAPYNIRRSSTSGDTEEEEEEEVVPFSSDEQKRSSPTQETQAPFIAKRVEVVEEDGPSEKSQDPPALARSTPGSNRSSPGNKDKEAPCSRELQRDLAGEEAFRAPNTDAARSSAQLSDGNVGSGATGSRPEGLAAVDIGSERGSSSATSVSAVPADRKSNSTAAQEDAKADPKGALADYEGKDVATRVGEAWQERPGAPRGGQGDPAVPAQQPADPSTPERQSSPSGSEQLVRRESCGSSVLTDFEGKDVATKVGEAWQDRPGAPRGGQGDPAVPTQQPADPSTPEQQNSPSGSEQFVRRESCTSRVRSPSSCMVTVTVTATSEQPHIYIPAPASELDSSSTTKGILFVKEYVNASEVSSGKPVSARYSNVSSIEDSFAMEKKPPCGSTPYSERTTGGICTYCNREIRDCPKITLEHLGICCHEYCFKCGICSKPMGDLLDQIFIHRDTIHCGKCYEKLF

SEQ ID NO: 99185 - protein, 452 aa, Homo sapiens
  Payload ID: 19790
  Gene Name: zinc finger protein 185 (LIM domain)
  Uniprot ID: O15231
  ENSP ID: ENSP00000325307
MQRQAPYNIRRSSTSGDTEEEEEEEVVPFSSDEQKRRSEAASGVLRRTAPREHSYVLSAAKKSTGSPTQETQAPFIAKRVEVVEEDGPSEKSQDPPALARSTPGSNSSRGEEIVRLQILTPRAGLRLVAPDVEGMSSSATSVSAVPADRKSNSTAAQEDAKADPKGALADYEGKDVATRVGEAWQERPGAPRGGQGDPAVPAQQPADPSTPERQSSPSGSEQLVRRESCGSSVLTDFEGKDVATKVGEAWQDRPGAPRGGQGDPAVPTQQPADPSTPEQQNSPSGSEQFVRRESCTSRVRSPSSCMVTVTVTATSEQPHIYIPAPASELDSSSTTKGILFVKEYVNASEVSSGKPVSARYSNVSSIEDSFAMEKKPPCGSTPYSERTTGGICTYCNREIRDCPKITLEHLGICCHEYCFKCGICSKPMGDLLDQIFIHRDTIHCGKCYEKLF

SEQ ID NO: 99186 - protein, 689 aa, Homo sapiens
  Payload ID: 19790
  Gene Name: zinc finger protein 185 (LIM domain)
  Uniprot ID: O15231
  ENSP ID: ENSP00000359291
MSISALGGRTKGKPLPPGEEERNNVLKQMKVRTTLKGDKSWITKQDESEGRTIELPSGRSRATSFSSAGEVPKPRPPSTRAPTGYIIRGVFTKPIDSSSQPQQQFPKANGTPKSAASLVRTANAGPPRPSSSGYKMTTEDYKKLAPYNIRRSSTSGDTEEEEEEEVVPFSSDEQKRRSEAASGVLRRTAPREHSYVLSAAKKSTGPTQETQAPFIAKRVEVVEEDGPSEKSQDPPALARSTPGSNSADGGRTKASRAIWIECLPSMPSPAGSQELSSRGEEIVRLQILTPRAGLRLVAPDVEGMRSSPGNKDKEAPCSRELQRDLAGEEAFRAPNTDAARSSAQLSDGNVGSGATGSRPEGLAAVDIGSERGSSSATSVSAVPADRKSNSTAAQEDAKADPKGALADYEGKDVATRVGEAWQERPGAPRGGQGDPAVPAQQPADPSTPERQSSPSGSEQLVRRESCGSSVLTDFEGKDVATKVGEAWQDRPGAPRGGQGDPAVPTQQPADPSTPEQQNSPSGSEQFVRRESCTSRVRSPSSCMVTVTVTATSEQPHIYIPAPASELDSSSTTKGILFVKEYVNASEVSSGKPVSARYSNVSSIEDSFAMEKKPPCGSTPYSERTTGGICTYCNREIRDCPKITLEHLGICCHEYCFKCGICSKPMGDLLDQIFIHRDTIHCGKCYEKLF

SEQ ID NO: 99187 - protein, 721 aa, Homo sapiens
  Payload ID: 19790
  Gene Name: zinc finger protein 185 (LIM domain)
  Uniprot ID: O15231
  ENSP ID: ENSP00000359293
MSISALGGRTKGKPLPPGEEERNNVLKQMKVRTTLKGDKSWITKQDESEGRTIELPSGRSRATSFSSAGEVPKPRPPSTRAPTGYIIRGVFTKPIDSSSQPQQQFPKANGTPKSAASLVRTANAGPPRPSSSGYKMTTEDYKKLAPYNIRRSSTSGDTEEEEEEEVVPFSSDEQKRRSEAASGVLRRTAPREHSYVLSAAKKSTGPTQETQAPFIAKRVEVVEEDGPSEKSQDPPALARSTPGSNSADGGRTKASRAIWIECLPSMPSPAGSQELSSRGEEIVRLQILTPRAGLRLVAPDVEGMRSSPGNKDKEAPCSRELQRDLAGEEAFRAPNTDAARSSAQLSDGNVGSGATGSRPEGLAAVDIGSERGRLCAAASFASFLEDQDGHSANSQSCKPRPAAISSSATSVSAVPADRKSNSTAAQEDAKADPKGALADYEGKDVATRVGEAWQERPGAPRGGQGDPAVPAQQPADPSTPERQSSPSGSEQLVRRESCGSSVLTDFEGKDVATKVGEAWQDRPGAPRGGQGDPAVPTQQPADPSTPEQQNSPSGSEQFVRRESCTSRVRSPSSCMVTVTVTATSEQPHIYIPAPASELDSSSTTKGILFVKEYVNASEVSSGKPVSARYSNVSSIEDSFAMEKKPPCGSTPYSERTTGGICTYCNREIRDCPKITLEHLGICCHEYCFKCGICSKPMGDLLDQIFIHRDTIHCGKCYEKLF

SEQ ID NO: 99188 - protein, 552 aa, Homo sapiens
  Payload ID: 19790
  Gene Name: zinc finger protein 185 (LIM domain)
  ENSP ID: ENSP00000391272
MSISALGGRTKGKPLPPGEEERNNVLKQMKVRTTLKGDKSWITKQDESEGRTIELPSGRSRATSFSSAGEVPKPRPPSTRAPTGYIIRGVFTKPIDSSSQPQQQFPKANGTPKSAASLVRTANAGPPRPSSSGYKMTTEDYKKLAPYNIRRSSTSGDTEEEEEEEVVPFSSDEQKRRSEAASGVLRRTAPREHSYVLSAAKKSTGPTQETQAPFIAKRVEVVEEDGPSEKSQDPPALARSTPGSNSADGGRTKASRAIWIECLPSMPSPAGSQELRSSPGNKDKEAPCSRELQRDLAGEEAFRAPNTDAARSSAQLSDGNVGSGATGSRPEGLAAVDIGSERGRLCAAASFASFLEDQDGHSANSQSCKPRPAAISSSATSVSAVPADRKSNSTAAQEDAKADPKGALADYEGKDVATRVGEAWQERPGAPRGGQGDPAVPAQQPADPSTPERQSSPSGSEQLVRRESCGSSVLTDFEGKDVATKVGEAWQDRPGAPRGGQGDPAVPTQQPADPSTPEQQNSPSGSEQFVRRESCTSRYEPNCTGTLPARAR

SEQ ID NO: 99189 - protein, 327 aa, Homo sapiens
  Payload ID: 19790
  Gene Name: zinc finger protein 185 (LIM domain)
  Uniprot ID: O15231
  ENSP ID: ENSP00000392984
MAARDELGLGGDSLEAMPVPAARGRPRITNGPEELAAPSPAALADYEGKDVATRVGEAWQERPGAPRGGQGDPAVPAQQPADPSTPERQSSPSGSEQLVRRESCGSSVLTDFEGKDVATKVGEAWQDRPGAPRGGQGDPAVPTQQPADPSTPEQQNSPSGSEQFVRRESCTSRVRSPSSCMVTVTVTATSEQPHIYIPAPASELDSSSTTKGILFVKEYVNASEVSSGKPVSARYSNVSSIEDSFAMEKKPPCGSTPYSERTTGGICTYCNREIRDCPKITLEHLGICCHEYCFKCGICSKPMGDLLDQIFIHRDTIHCGKCYEKLF

SEQ ID NO: 99190 - protein, 690 aa, Homo sapiens
  Payload ID: 19790
  Gene Name: zinc finger protein 185 (LIM domain)
  Uniprot ID: O15231
  ENSP ID: ENSP00000395228
MSISALGGRTKGKPLPPGEEERNNVLKQMKVRTTLKGDKSWITKQDESEGRTIELPSGRSRATSFSSAGEVPKPRPPSTRAPTGYIIRGVFTKPIDSSSQPQQQFPKANGTPKSAASLVRTANAGPPRPSSSGYKMTTEDYKKLAPYNIRRSSTSGDTEEEEEEEVVPFSSDEQKRRSEAASGVLRRTAPREHSYVLSAAKKSTGSPTQETQAPFIAKRVEVVEEDGPSEKSQDPPALARSTPGSNSADGGRTKASRAIWIECLPSMPSPAGSQELSSRGEEIVRLQILTPRAGLRLVAPDVEGMRSSPGNKDKEAPCSRELQRDLAGEEAFRAPNTDAARSSAQLSDGNVGSGATGSRPEGLAAVDIGSERGSSSATSVSAVPADRKSNSTAAQEDAKADPKGALADYEGKDVATRVGEAWQERPGAPRGGQGDPAVPAQQPADPSTPERQSSPSGSEQLVRRESCGSSVLTDFEGKDVATKVGEAWQDRPGAPRGGQGDPAVPTQQPADPSTPEQQNSPSGSEQFVRRESCTSRVRSPSSCMVTVTVTATSEQPHIYIPAPASELDSSSTTKGILFVKEYVNASEVSSGKPVSARYSNVSSIEDSFAMEKKPPCGSTPYSERTTGGICTYCNREIRDCPKITLEHLGICCHEYCFKCGICSKPMGDLLDQIFIHRDTIHCGKCYEKLF

SEQ ID NO: 99191 - protein, 185 aa, Homo sapiens
  Payload ID: 19790
  Gene Name: zinc finger protein 185 (LIM domain)
  ENSP ID: ENSP00000401766
  MOD_RES (1)..(1): Any amino acid
XSPTQETQAPFIAKRVEVVEEDGPSEKSQDPPALARSTPGSNSADGGRTKASRAIWIECLPSMPSPAGSQELRSSPGNKDKEAPCSRELQRDLAGEEAFRAPNTDAASSSATSVSAVPADRKSNSTAAQEDAKADPKGVLTDFEGKDVATKVGEAWQDRPGAPRGGQGDPAVPTQQPADPSTPEQ

SEQ ID NO: 99192 - protein, 448 aa, Homo sapiens
  Payload ID: 19790
  Gene Name: zinc finger protein 185 (LIM domain)
  ENSP ID: ENSP00000409121
  MOD_RES (1)..(1): Any amino acid
XLRRTAPREHSYVLSAAKKSTGSPTQETQAPFIAKRVEVVEEDGPSEKSQDPPALARSTPGSNRSSPGNKDKEAPCSRELQRDLAGEEAFRAPNTDAARSSAQLSDGNVGSGATGSRPEGLAAVDIGSERGSSSATSVSAVPADRKSNSTAAQEDAKADPKGALADYEGKDVATRVGEAWQERPGAPRGGQGDPAVPAQQPADPSTPERQSSPSGSEQLVRRESCGSSVLTDFEGKDVATKVGEAWQDRPGAPRGGQGDPAVPTQQPADPSTPEQQNSPSGSEQFVRRESCTSRVRSPSSCMVTVTVTATSEQPHIYIPAPASELDSSSTTKGILFVKEYVNASEVSSGKPVSARYSNVSSIEDSFAMEKKPPCGSTPYSERTTGGICTYCNREIRDCPKITLEHLGICCHEYCFKCGICSKPMGDLLDQIFIHRDTIHCGKCYEKLF

SEQ ID NO: 99193 - protein, 721 aa, Homo sapiens; identical to SEQ ID NO: 99187
  Payload ID: 19790
  Gene Name: zinc finger protein 185 (LIM domain)
  Uniprot ID: O15231
  ENSP ID: ENSP00000440847

SEQ ID NO: 99194 - protein, 692 aa, Homo sapiens
  Payload ID: 19790
  Gene Name: zinc finger protein 185 (LIM domain)
  Uniprot ID: O15231
  ENSP ID: ENSP00000444367
MSISALGGRTKGKPLPPGEEERNNVLKQMKVRTTLKGDKSWITKQDESEGRTIELPSGRSRATSFSSAGEVPKPRPPSTRAPTGYIIRGVFTKPIDSSSQPQQQFPKANGTPKSAASLVRTANAGPPRPSSSGYKMTTEDYKKLAPYNIRRSSTSGDTEEEEEEEVVPFSSDEQKRRSEAASGVLRRTAPREHSYVLSAAKKSTGPTQETQAPFIAKRVEVVEEDGPSEKSQDPPALARSTPGSNSADGGRTKASRAIWIECLPSMPSPAGSQELRSSPGNKDKEAPCSRELQRDLAGEEAFRAPNTDAARSSAQLSDGNVGSGATGSRPEGLAAVDIGSERGRLCAAASFASFLEDQDGHSANSQSCKPRPAAISSSATSVSAVPADRKSNSTAAQEDAKADPKGALADYEGKDVATRVGEAWQERPGAPRGGQGDPAVPAQQPADPSTPERQSSPSGSEQLVRRESCGSSVLTDFEGKDVATKVGEAWQDRPGAPRGGQGDPAVPTQQPADPSTPEQQNSPSGSEQFVRRESCTSRVRSPSSCMVTVTVTATSEQPHIYIPAPASELDSSSTTKGILFVKEYVNASEVSSGKPVSARYSNVSSIEDSFAMEKKPPCGSTPYSERTTGGICTYCNREIRDCPKITLEHLGICCHEYCFKCGICSKPMGDLLDQIFIHRDTIHCGKCYEKLF

SEQ ID NO: 99195 - protein, 584 aa, Homo sapiens
  Payload ID: 19791
  Gene Name: zinc finger protein 189
  Uniprot ID: O75820
  ENSP ID: ENSP00000259395
MMENYGNLVSLDVLNRDKDEEPTVKQEIEEIEEEVEPQGVIVTRIKSEIDQDPMGRETFELVGRLDKQRGIFLWEIPRESLTQEQRMFRENTNIIRKRPNSEEKCHKCEECGKGFVRKAHFIQHQRVHTGEKPFQCNECGKSFSRSSFVIEHQRIHTGERPYECNYCGKTFSVSSTLIRHQRIHTGERPYQCNQCKQSFSQRRSLVKHQRIHTGEKPHKCSDCGKAFSWKSHLIEHQRTHTGEKPYHCTKCKKSFSRNSLLVEHQRIHTGERPHKCGECGKAFRLSTYLIQHQKIHTGEKPFLCIECGKSFSRSSFLIEHQRIHTGERPYQCKECGKSFSQLCNLTRHQRIHTGDKPHKCEECGKAFSRSSGLIQHQRIHTREKTYPYNETKESFDPNCSLVIQQEVYPKEKSYKCDECGKTFSVSAHLVQHQRIHTGEKPYLCTVCGKSFSRSSFLIEHQRIHTGERPYLCRQCGKSFSQLCNLIRHQGVHTGNKPHKCDECGKAFSRNSGLIQHQRIHTGEKPYKCEKCDKSFSQQRSLVNHQKIHAEVKTQETHECDACGEAFNCRISLIQHQKLHTAWMQ

SEQ ID NO: 99196 - protein, 626 aa, Homo sapiens
  Payload ID: 19791
  Gene Name: zinc finger protein 189
  Uniprot ID: O75820
  ENSP ID: ENSP00000342019
MASPSPPPESKGLLTFEDVAVFFTQEEWDYLDPAQRSLYKDVMMENYGNLVSLDVLNRDKDEEPTVKQEIEEIEEEVEPQGVIVTRIKSEIDQDPMGRETFELVGRLDKQRGIFLWEIPRESLTQEQRMFRENTNIIRKRPNSEEKCHKCEECGKGFVRKAHFIQHQRVHTGEKPFQCNECGKSFSRSSFVIEHQRIHTGERPYECNYCGKTFSVSSTLIRHQRIHTGERPYQCNQCKQSFSQRRSLVKHQRIHTGEKPHKCSDCGKAFSWKSHLIEHQRTHTGEKPYHCTKCKKSFSRNSLLVEHQRIHTGERPHKCGECGKAFRLSTYLIQHQKIHTGEKPFLCIECGKSFSRSSFLIEHQRIHTGERPYQCKECGKSFSQLCNLTRHQRIHTGDKPHKCEECGKAFSRSSGLIQHQRIHTREKTYPYNETKESFDPNCSLVIQQEVYPKEKSYKCDECGKTFSVSAHLVQHQRIHTGEKPYLCTVCGKSFSRSSFLIEHQRIHTGERPYLCRQCGKSFSQLCNLIRHQGVHTGNKPHKCDECGKAFSRNSGLIQHQRIHTGEKPYKCEKCDKSFSQQRSLVNHQKIHAEVKTQETHECDACGEAFNCRISLIQHQKLHTAWMQ

SEQ ID NO: 99197 - protein, 612 aa, Homo sapiens
  Payload ID: 19791
  Gene Name: zinc finger protein 189
  Uniprot ID: O75820
  ENSP ID: ENSP00000363995
MASPSPPPESKEEWDYLDPAQRSLYKDVMMENYGNLVSLDVLNRDKDEEPTVKQEIEEIEEEVEPQGVIVTRIKSEIDQDPMGRETFELVGRLDKQRGIFLWEIPRESLTQEQRMFRENTNIIRKRPNSEEKCHKCEECGKGFVRKAHFIQHQRVHTGEKPFQCNECGKSFSRSSFVIEHQRIHTGERPYECNYCGKTFSVSSTLIRHQRIHTGERPYQCNQCKQSFSQRRSLVKHQRIHTGEKPHKCSDCGKAFSWKSHLIEHQRTHTGEKPYHCTKCKKSFSRNSLLVEHQRIHTGERPHKCGECGKAFRLSTYLIQHQKIHTGEKPFLCIECGKSFSRSSFLIEHQRIHTGERPYQCKECGKSFSQLCNLTRHQRIHTGDKPHKCEECGKAFSRSSGLIQHQRIHTREKTYPYNETKESFDPNCSLVIQQEVYPKEKSYKCDECGKTFSVSAHLVQHQRIHTGEKPYLCTVCGKSFSRSSFLIEHQRIHTGERPYLCRQCGKSFSQLCNLIRHQGVHTGNKPHKCDECGKAFSRNSGLIQHQRIHTGEKPYKCEKCDKSFSQQRSLVNHQKIHAEVKTQETHECDACGEAFNCRISLIQHQKLHTAWMQ

SEQ ID NO: 99198 - protein, 85 aa, Homo sapiens
  Payload ID: 19791
  Gene Name: zinc finger protein 189
  ENSP ID: ENSP00000483461
MASPSPPPESKEEWDYLDPAQRSLYKDVMMENYGNLVSLGLTLLPRLVCSDANTACCSLNLLGLSDQSSHLSYLSSWDYRCFEQR

SEQ ID NO: 99199 - protein, 458 aa, Homo sapiens
  Payload ID: 19792
  Gene Name: zinc finger protein 19
  Uniprot ID: P17023
  ENSP ID: ENSP00000288177
MAAMPLKAQYQEMVTFEDVAVHFTKTEWTGLSPAQRALYRSVMLENFGNLTALGYPVPKPALISLLERGDMAWGLEAQDDPPAERTKNVCKDVETNIDSESTLIQGISEERDGMMSHGQLKSVPQRTDFPETRNVEKHQDIPTVKNIQGKVPRIPCARKPFICEECGKSFSYFSYYARHQRIHTGEKPFECSECGKAFNGNSSLIRHQRIHTGERPYQCEECGRAFNDNANLIRHQRIHSGDRPYYCTECGNSFTSSSEFVIHQRIHTGEKPYECNECGKAFVGNSPLLRHQKIHTGEKPYECNECGKSFGRTSHLSQHQRIHTGEKPYSCKVCGQAFNFHTKLTRHQRIHSEEKPFDCVDCGKAFSAQEQLKRHLRIHTQESSYVCDECGKALTSKRNLHQHQRIHTGEKPYECSKYEKAFGTSSQLGHLEHVYSGEKPVLDICRFGLPEFFTPFYW

SEQ ID NO: 99200 - protein, 63 aa, Homo sapiens
  Payload ID: 19792
  Gene Name: zinc finger protein 19
  ENSP ID: ENSP00000454549
MAAMPLKAQYQEMVTFEDVAVHFTKTEWTGLSPAQRALYRSVMLENFGNLTALGRSHKCSVSC

SEQ ID NO: 99201 - protein, 23 aa, Homo sapiens
  Payload ID: 19792
  Gene Name: zinc finger protein 19
  ENSP ID: ENSP00000454862
MAAMPLKAQYQEMVTFEDVAVHF

SEQ ID NO: 99202 - protein, 416 aa, Homo sapiens
  Payload ID: 19792
  Gene Name: zinc finger protein 19
  ENSP ID: ENSP00000454864
MLENFGNLTALGYPVPKPALISLLERGDMAWGLEAQDDPPAERTKNVCKDVETNIDSESTLIQGISEERDGMMSHGQLKSVPQRTDFPETRNVEKHQDIPTVKNIQGKVPRIPCARKPFICEECGKSFSYFSYYARHQRIHTGEKPFECSECGKAFNGNSSLIRHQRIHTGERPYQCEECGRAFNDNANLIRHQRIHSGDRPYYCTECGNSFTSSSEFVIHQRIHTGEKPYECNECGKAFVGNSPLLRHQKIHTGEKPYECNECGKSFGRTSHLSQHQRIHTGEKPYSCKVCGQAFNFHTKLTRHQRIHSEEKPFDCVDCGKAFSAQEQLKRHLRIHTQESSYVCDECGKALTSKRNLHQHQRIHTGEKPYECSKYEKAFGTSSQLGHLEHVYSGEKPVLDICRFGLPEFFTPFYW

SEQ ID NO: 99203 - protein, 73 aa, Homo sapiens
  Payload ID: 19792
  Gene Name: zinc finger protein 19
  ENSP ID: ENSP00000455575
MAAMPLKAQYQEMVTFEDVAVHFTKTEWTGLSPAQRALYRSVMLENFGNLTALGYPVPKPALISLLERGDMAW

SEQ ID NO: 99204 - protein, 117 aa, Homo sapiens
  Payload ID: 19792
  Gene Name: zinc finger protein 19
  ENSP ID: ENSP00000455796
MAAMPLKAQYQEMVTFEDVAVHFTKTEWTGLSPAQRALYRSVMLENFGNLTALGYPVPKPALISLLERGDMAWGLEAQDDPPAERTKNVCKDVETNIDSESTLIQGISEERDGMMSH

SEQ ID NO: 99205 - protein, 45 aa, Homo sapiens
  Payload ID: 19792
  Gene Name: zinc finger protein 19
  ENSP ID: ENSP00000456143
MAAMPLKAQYQDFPSSPYLSPLPHTLARSQRIGSGAAGTCCFRRW

SEQ ID NO: 99206 - protein, 5 aa, Homo sapiens
  Payload ID: 19792
  Gene Name: zinc finger protein 19
  ENSP ID: ENSP00000457992
MAAMP

SEQ ID NO: 99207 - protein, 458 aa, Homo sapiens; identical to SEQ ID NO: 99199
  Payload ID: 19792
  Gene Name: zinc finger protein 19
  Uniprot ID: P17023
  ENSP ID: ENSP00000458105

SEQ ID NO: 99208 - protein, 80 aa, Homo sapiens
  Payload ID: 19792
  Gene Name: zinc finger protein 19
  ENSP ID: ENSP00000462021
VTFEDVAVHFTKTEWTGLSPAQRALYRSVMLENFGNLTALGYPVPKPALISLLERGDMAWGLEAQDDPPAERTKNVCKGR

SEQ ID NO: 99209 - protein, 100 aa, Homo sapiens
  Payload ID: 19792
  Gene Name: zinc finger protein 19
  ENSP ID: ENSP00000462566
MAAMPLKAQYQEMVTFEDVAVHFTKTEWTGLSPAQRALYRSVMLENFGNLTALGYPVPKPALISLLERGDMAWGLEAQDDPPAERTKNVCKDESLEFQKS

SEQ ID NO: 99210 - protein, 388 aa, Homo sapiens
  Payload ID: 19792
  Gene Name: zinc finger protein 19
  ENSP ID: ENSP00000462810
MAWGLEAQDDPPAERTKNVCKDVETNIDSESTLIQGISEERDGMMSHGQLKSVPQRTDFPETRNVEKHQDIPTVKNIQGKVPRIPCARKPFICEECGKSFSYFSYYARHQRIHTGEKPFECSECGKAFNGNSSLIRHQRIHTGERPYQCEECGRAFNDNANLIRHQRIHSGDRPYYCTECGNSFTSSSEFVIHQRIHTGEKPYECNECGKAFVGNSPLLRHQKIHTGEKPYECNECGKSFGRTSHLSQHQRIHTGEKPYSCKVCGQAFNFHTKLTRHQRIHSEEKPFDCVDCGKAFSAQEQLKRHLRIHTQESSYVCDECGKALTSKRNLHQHQRIHTGEKPYECSKYEKAFGTSSQLGHLEHVYSGEKPVLDICRFGLPEFFTPFYW

SEQ ID NO: 99211 - protein, 606 aa, Homo sapiens
  Payload ID: 19793
  Gene Name: zinc finger protein 195
  Uniprot ID: O14628
  ENSP ID: ENSP00000005082
MTLLTFRDVAIEFSLEEWKCLDLAQQNLYRDVMLENYRNLFSVGLTVCKPGLITCLEQRKEPWNVKRQEAADGHPEMGFHHATQACLELLGSSDLPASASQSAGITGVNHRAQPGLNVSVDKFTAMSSHFTQDLLPEQGIQDAFPKRILRGYGNCGLDNLYLRKDWESLDECKLQKDYNGLNQCSSTTHSKIFQYNKYVKIFDNFSNLHRRNISNTGEKPFKCQECGKSFQMLSFLTEHQKIHTGKKFQKCGECGKTFIQCSHFTEPENIDTGEKPYKCQECNNVIKTCSVLTKNRIYAGGEHYRCEEFGKVFNQCSHLTEHEHGTEEKPCKYEECSSVFISCSSLSNQQMILAGEKLSKCETWYKGFNHSPNPSKHQRNEIGGKPFKCEECDSIFKWFSDLTKHKRIHTGEKPYKCDECGKAYTQSSHLSEHRRIHTGEKPYQCEECGKVFRTCSSLSNHKRTHSEEKPYTCEECGNIFKQLSDLTKHKKTHTGEKPYKCDECGKNFTQSSNLIVHKRIHTGEKPYKCEECGRVFMWFSDITKHKKTHTGEKPYKCDECGKNFTQSSNLIVHKRIHTGEKPYKCEKCGKAFTQFSHLTVHESIHT

SEQ ID NO: 99212 - protein, 561 aa, Homo sapiens
  Payload ID: 19793
  Gene Name: zinc finger protein 195
  Uniprot ID: O14628
  ENSP ID: ENSP00000344483
MAGAQTLLTFRDVAIEFSLEEWKCLDLAQQNLYRDVMLENYRNLFSVGLTVCKPGLITCLEQRKEPWNVKRQEAADGHPAMSSHFTQDLLPEQGIQDAFPKRILRGYGNCGLDNLYLRKDWESLDECKLQKDYNGLNQCSSTTHSKIFQYNKYVKIFDNFSNLHRRNISNTGEKPFKCQECGKSFQMLSFLTEHQKIHTGKKFQKCGECGKTFIQCSHFTEPENIDTGEKPYKCQECNNVIKTCSVLTKNRIYAGGEHYRCEEFGKVFNQCSHLTEHEHGTEEKPCKYEECSSVFISCSSLSNQQMILAGEKLSKCETWYKGFNHSPNPSKHQRNEIGGKPFKCEECDSIFKWFSDLTKHKRIHTGEKPYKCDECGKAYTQSSHLSEHRRIHTGEKPYQCEECGKVFRTCSSLSNHKRTHSEEKPYTCEECGNIFKQLSDLTKHKKTHTGEKPYKCDECGKNFTQSSNLIVHKRIHTGEKPYKCEECGRVFMWFSDITKHKKTHTGEKPYKCDECGKNFTQSSNLIVHKRIHTGEKPYKCEKCGKAFTQFSHLTVHESIHT

SEQ ID NO: 99213 - protein, 557 aa, Homo sapiens
  Payload ID: 19793
  Gene Name: zinc finger protein 195
  Uniprot ID: O14628
  ENSP ID: ENSP00000346613
MTLLTFRDVAIEFSLEEWKCLDLAQQNLYRDVMLENYRNLFSVGLTVCKPGLITCLEQRKEPWNVKRQEAADGHPAMSSHFTQDLLPEQGIQDAFPKRILRGYGNCGLDNLYLRKDWESLDECKLQKDYNGLNQCSSTTHSKIFQYNKYVKIFDNFSNLHRRNISNTGEKPFKCQECGKSFQMLSFLTEHQKIHTGKKFQKCGECGKTFIQCSHFTEPENIDTGEKPYKCQECNNVIKTCSVLTKNRIYAGGEHYRCEEFGKVFNQCSHLTEHEHGTEEKPCKYEECSSVFISCSSLSNQQMILAGEKLSKCETWYKGFNHSPNPSKHQRNEIGGKPFKCEECDSIFKWFSDLTKHKRIHTGEKPYKCDECGKAYTQSSHLSEHRRIHTGEKPYQCEECGKVFRTCSSLSNHKRTHSEEKPYTCEECGNIFKQLSDLTKHKKTHTGEKPYKCDECGKNFTQSSNLIVHKRIHTGEKPYKCEECGRVFMWFSDITKHKKTHTGEKPYKCDECGKNFTQSSNLIVHKRIHTGEKPYKCEKCGKAFTQFSHLTVHESIHT

SEQ ID NO: 99214 - protein, 629 aa, Homo sapiens
  Payload ID: 19793
  Gene Name: zinc finger protein 195
  Uniprot ID: O14628
  ENSP ID: ENSP00000382511
MTLLTFRDVAIEFSLEEWKCLDLAQQNLYRDVMLENYRNLFSVGLTVCKPGLITCLEQRKEPWNVKRQEAADGHPEMGFHHATQACLELLGSSDLPASASQSAGITGVNHRAQPGLNVSVDKFTALCSPGVLQTVKWFLEFRCIFSLAMSSHFTQDLLPEQGIQDAFPKRILRGYGNCGLDNLYLRKDWESLDECKLQKDYNGLNQCSSTTHSKIFQYNKYVKIFDNFSNLHRRNISNTGEKPFKCQECGKSFQMLSFLTEHQKIHTGKKFQKCGECGKTFIQCSHFTEPENIDTGEKPYKCQECNNVIKTCSVLTKNRIYAGGEHYRCEEFGKVFNQCSHLTEHEHGTEEKPCKYEECSSVFISCSSLSNQQMILAGEKLSKCETWYKGFNHSPNPSKHQRNEIGGKPFKCEECDSIFKWFSDLTKHKRIHTGEKPYKCDECGKAYTQSSHLSEHRRIHTGEKPYQCEECGKVFRTCSSLSNHKRTHSEEKPYTCEECGNIFKQLSDLTKHKKTHTGEKPYKCDECGKNFTQSSNLIVHKRIHTGEKPYKCEECGRVFMWFSDITKHKKTHTGEKPYKCDECGKNFTQSSNLIVHKRIHTGEKPYKCEKCGKAFTQFSHLTVHESIHT

SEQ ID NO: 99215 - protein, 561 aa, Homo sapiens; identical to SEQ ID NO: 99212
  Payload ID: 19793
  Gene Name: zinc finger protein 195
  Uniprot ID: O14628
  ENSP ID: ENSP00000387998

SEQ ID NO: 99216 - protein, 119 aa, Homo sapiens
  Payload ID: 19793
  Gene Name: zinc finger protein 195
  ENSP ID: ENSP00000390663
MPWAERNLLVYSSSKETLLTFRDVAIEFSLEEWKCLDLAQQNLYRDVMLENYRNLFSVGLTVCKPGLITCLEQRKEPWNVKRQEAADGHPAMSSHFTQDLLPEQGIQDAFPKRILRGYG

SEQ ID NO: 99217 - protein, 90 aa, Homo sapiens
  Payload ID: 19793
  Gene Name: zinc finger protein 195
  Uniprot ID: O14628
  ENSP ID: ENSP00000414353
MAGAQTLLTFRDVAIEFSLEEWKCLDLAQQNLYRDVMLENYRNLFSVGLTVCKPGLITCLEQRKEPWNVKRQEAADGHPGIFFVVTMEII

SEQ ID NO: 99218 - protein, 278 aa, Homo sapiens
  Payload ID: 19793
  Gene Name: zinc finger protein 195
  ENSP ID: ENSP00000431937
MAGAQTLLTFRDVAIEFSLEEWKCLDLAQQNLYRDVMLENYRNLFSVGLTVCKPGLITCLEQRKEPWNVKRQEAADGHPALCSPGVLQTVKWFLEFRCIFSLAMSSHFTQDLLPEQGIQDAFPKRILRGYGNCGLDNLYLRKDWESLDECKLQKDYNGLNQCSSTTHSKIFQYNKYVKIFDNFSNLHRRNISNTGEKPFKCQECGKSFQMLSFLTEHQKIHTGKKFQKCGECGKTFIQCSHFTEPENIDTGEKPYKCQECNNVIKTCSVLTKNRIYAG

SEQ ID NO: 99219 - protein, 80 aa, Homo sapiens
  Payload ID: 19793
  Gene Name: zinc finger protein 195
  ENSP ID: ENSP00000432552
MTLLTFRDVAIEFSLEEWKCLDLAQQNLYRDVMLENYRNLFSVGLTVCKPGLITCLEQRKEPWNVKRQEAADGHPASANV

SEQ ID NO: 99220 - protein, 79 aa, Homo sapiens
  Payload ID: 19793
  Gene Name: zinc finger protein 195
  ENSP ID: ENSP00000432720
MTLLTFRDVAIEFSLEEWKCLDLAQQNLYRDVMLENYRNLFSVGLTVCKPGLITCLEQRKEPWNVKRQEAADGHPGQHG

SEQ ID NO: 99221 - protein, 217 aa, Homo sapiens
  Payload ID: 19793
  Gene Name: zinc finger protein 195
  ENSP ID: ENSP00000433911
MTLLTFRDVAIEFSLEEWKCLDLAQQNLYRDVMLENYRNLFSVGLTVCKPGLITCLEQRKEPWNVKRQEAADGHPGWKCSGVIVAHCGLHFPGSEMGFHHATQACLELLGSSDLPASASQSAGITGVNHRAQPGLNVSVDKFTAMSSHFTQDLLPEQGIQDAFPKRILRGYGNCGLDNLYLRKDWESLDECKLQKDYNGLNQCSSTTHSKIFQYNKY

SEQ ID NO: 99222 - protein, 146 aa, Homo sapiens
  Payload ID: 19793
  Gene Name: zinc finger protein 195
  ENSP ID: ENSP00000434006
MTLLTFRDVAIEFSLEEWKCLDLAQQNLYRDVMLENYRNLFSVGLTVCKPGLITCLEQRKEPWNVKRQEAADGHPEFHSITQAVVQWCHLSSLQPLLPGLEPSSHFSLLRTWNYRGTPPHPANFCVFNRDRVLPCCPGWSRTPGLK

SEQ ID NO: 99223 - protein, 52 aa, Homo sapiens
  Payload ID: 19793
  Gene Name: zinc finger protein 195
  ENSP ID: ENSP00000434361
GLTVCKPGLITCLEQRKEPWNVKRQEAADGHPGCTFFETGIYSVTQAGSAVV

SEQ ID NO: 99224 - protein, 131 aa, Homo sapiens
  Payload ID: 19793
  Gene Name: zinc finger protein 195
  ENSP ID: ENSP00000434715
MAGAQTLLTFRDVAIEFSLEEWKCLDLAQQNLYRDVMLENYRNLFSVGLTVCKPGLITCLEQRKEPWNVKRQEAADGHPAMSSHFTQDLLPEQGIQDAFPKRILRGYGNCGLDNLYLRKDWESLDECKLQK

SEQ ID NO: 99225 - protein, 80 aa, Homo sapiens; identical to SEQ ID NO: 99219
  Payload ID: 19793
  Gene Name: zinc finger protein 195
  ENSP ID: ENSP00000435093

SEQ ID NO: 99226 - protein, 91 aa, Homo sapiens
  Payload ID: 19793
  Gene Name: zinc finger protein 195
  ENSP ID: ENSP00000435153
MAGAQTLLTFRDVAIEFSLEEWKCLDLAQQNLYRDVMLENYRNLFSVGLTVCKPGLITCLEQRKEPWNVKRQEAADGHPGPSVEETILSVL

SEQ ID NO: 99227 - protein, 79 aa, Homo sapiens
  Payload ID: 19793
  Gene Name: zinc finger protein 195
  ENSP ID: ENSP00000435741
MTLLTFRDVAIEFSLEEWKCLDLAQQNLYRDVMLENYRNLFSVGLTVCKPGLITCLEQRKEPWNVKRQEAADGHPGGWE

SEQ ID NO: 99228 - protein, 610 aa, Homo sapiens
  Payload ID: 19793
  Gene Name: zinc finger protein 195
  Uniprot ID: O14628
  ENSP ID: ENSP00000435828
MAGAQTLLTFRDVAIEFSLEEWKCLDLAQQNLYRDVMLENYRNLFSVGLTVCKPGLITCLEQRKEPWNVKRQEAADGHPEMGFHHATQACLELLGSSDLPASASQSAGITGVNHRAQPGLNVSVDKFTAMSSHFTQDLLPEQGIQDAFPKRILRGYGNCGLDNLYLRKDWESLDECKLQKDYNGLNQCSSTTHSKIFQYNKYVKIFDNFSNLHRRNISNTGEKPFKCQECGKSFQMLSFLTEHQKIHTGKKFQKCGECGKTFIQCSHFTEPENIDTGEKPYKCQECNNVIKTCSVLTKNRIYAGGEHYRCEEFGKVFNQCSHLTEHEHGTEEKPCKYEECSSVFISCSSLSNQQMILAGEKLSKCETWYKGFNHSPNPSKHQRNEIGGKPFKCEECDSIFKWFSDLTKHKRIHTGEKPYKCDECGKAYTQSSHLSEHRRIHTGEKPYQCEECGKVFRTCSSLSNHKRTHSEEKPYTCEECGNIFKQLSDLTKHKKTHTGEKPYKCDECGKNFTQSSNLIVHKRIHTGEKPYKCEECGRVFMWFSDITKHKKTHTGEKPYKCDECGKNFTQSSNLIVHKRIHTGEKPYKCEKCGKAFTQFSHLTVHESIHT

SEQ ID NO: 99229 - protein, 90 aa, Homo sapiens; identical to SEQ ID NO: 99217
  Payload ID: 19793
  Gene Name: zinc finger protein 195
  Uniprot ID: O14628
  ENSP ID: ENSP00000436384

SEQ ID NO: 99230 - protein, 115 aa, Homo sapiens
  Payload ID: 19793
  Gene Name: zinc finger protein 195
  ENSP ID: ENSP00000437265
MAGAQTLLTFRDVAIEFSLEEWKCLDLAQQNLYRDVMLENYRNLFSVGLTVCKPGLITCLEQRKEPWNVKRQEAADGHPEMGFHHATQACLELLGSSDLPASASQSAGITGVNHR

SEQ ID NO: 99231 - protein, 633 aa, Homo sapiens
  Payload ID: 19793
  Gene Name: zinc finger protein 195
  ENSP ID: ENSP00000477630
MAGAQTLLTFRDVAIEFSLEEWKCLDLAQQNLYRDVMLENYRNLFSVGLTVCKPGLITCLEQRKEPWNVKRQEAADGHPEMGFHHATQACLELLGSSDLPASASQSAGITGVNHRAQPGLNVSVDKFTALCSPGVLQTVKWFLEFRCIFSLAMSSHFTQDLLPEQGIQDAFPKRILRGYGNCGLDNLYLRKDWESLDECKLQKDYNGLNQCSSTTHSKIFQYNKYVKIFDNFSNLHRRNISNTGEKPFKCQECGKSFQMLSFLTEHQKIHTGKKFQKCGECGKTFIQCSHFTEPENIDTGEKPYKCQECNNVIKTCSVLTKNRIYAGGEHYRCEEFGKVFNQCSHLTEHEHGTEEKPCKYEECSSVFISCSSLSNQQMILAGEKLSKCETWYKGFNHSPNPSKHQRNEIGGKPFKCEECDSIFKWFSDLTKHKRIHTGEKPYKCDECGKAYTQSSHLSEHRRIHTGEKPYQCEECGKVFRTCSSLSNHKRTHSEEKPYTCEECGNIFKQLSDLTKHKKTHTGEKPYKCDECGKNFTQSSNLIVHKRIHTGEKPYKCEECGRVFMWFSDITKHKKTHTGEKPYKCDECGKNFTQSSNLIVHKRIHTGEKPYKCEKCGKAFTQFSHLTVHESIHT

SEQ ID NO: 99232 - protein, 90 aa, Homo sapiens; identical to SEQ ID NO: 99217
  Payload ID: 19793
  Gene Name: zinc finger protein 195
  Uniprot ID: O14628
  ENSP ID: ENSP00000482411

SEQ ID NO: 99233 - protein, 173 aa, Homo sapiens
  Payload ID: 19794
  Gene Name: zinc finger protein 197
  ENSP ID: ENSP00000334616
MTRENVAHNALRQEGLVKGKDDTWKWGTSFQGSSSSVWETSHLHFRQLRYHETSGPQEALSRLRELCRRWLRPEARTKAQILELLVLEQFLSILPGEIRTWVQLHHPGSGEEAVALVEELQKDLDGPAIQVWLLFPPLCTVSSGRGHQCHEWGSRAAPLFSMQSFTAVLMLHT

SEQ ID NO: 99234 - protein, 1029 aa, Homo sapiens
  Payload ID: 19794
  Gene Name: zinc finger protein 197
  Uniprot ID: O14709
  ENSP ID: ENSP00000345809
MTRENVAHNALRQEGLVKGKDDTWKWGTSFQGSSSSVWETSHLHFRQLRYHETSGPQEALSRLRELCRRWLRPEARTKAQILELLVLEQFLSILPGEIRTWVQLHHPGSGEEAVALVEELQKDLDGPAIQVPVLVKDQDTLQKVVSAPGTTLPPVLPGSHIAAEICPHPPTDLVAFNLQDPQHDSPAPEASALSQEENPRNQLMALMLLTAQPQELVMFEEVSVCFTSEEWACLGPIQRALYWDVMLENYGNVTSLEWETMTENEEVTSKPSSSQRADSHKGTSKRLQGSVPQVLDFEEECEWQVLASQWGNETDERADTVKKVSLCERDKKKRTPPEKQGQKWKELGDSLTFGSAISESLIGTEGKKFYKCDMCCKHFNKISHLINHRRIHTGEKPHKCKECGKGFIQRSSLLMHLRNHSGEKPYKCNECGKAFSQSAYLLNHQRIHTGEKPYKCKECGKGFYRHSGLIIHLRRHSGERPYKCNECGKVFSQNAYLIDHQRLHKGEEPYKCNKCQKAFILKKSLILHQRIHSGEKPYKCDECGKTFAQTTYLIDHQRLHSAENPYKCKECGKVFIRSKSLLLHQRVHTEKKTFGCKKCGKIFSSKSNFIDHKRMHSREKPYKCTECGKAFTQSAYLFDHQRLHNGEKPYECNECGKVFILKKSLILHQRFHTGENLYECKDCGKVFGSNRNLIDHERLHNGEKPYECRECGKTFIMSKSFMVHQKLHTQEKAYKCEDCGKAFSYNSSLLVHRRIHTGEKPFECSECGRAFSSNRNLIEHKRIHSGEKPYECDECGKCFILKKSLIGHQRIHTREKSYKCNDCGKVFSYRSNLIAHQRIHTGEKPYACSECGKGFTYNRNLIEHQRIHSGEKTYECHVCRKVLTSSRNLMVHQRIHTGEKPYKCNECGKDFSQNKNLVVHQRMHTGEKPYECDKCRKSFTSKRNLVGHQRIHTGEKPYGCNDCSKVFRQRKNLTVHQKIHTDEKPCECDVSEKEFSQTSNLHLQQKIHTIEEFSWLQNTNESKIEIQKI

SEQ ID NO: 99235 - protein, 267 aa, Homo sapiens
  Payload ID: 19794
  Gene Name: zinc finger protein 197
  Uniprot ID: O14709
  ENSP ID: ENSP00000373250
MTRENVAHNALRQEGLVKGKDDTWKWGTSFQGSSSSVWETSHLHFRQLRYHETSGPQEALSRLRELCRRWLRPEARTKAQILELLVLEQFLSILPGEIRTWVQLHHPGSGEEAVALVEELQKDLDGPAIQVPVLVKDQDTLQKVVSAPGTTLPPVLPGSHIAAEICPHPPTDLVAFNLQDPQHDSPAPEASALSQEENPRNQLMALMLLTAQPQELVMFEEVSVCFTSEEWACLGPIQRALYWDVMLENYGNVTSLGYRKYRRQRNK

SEQ ID NO: 99236 - protein, 267 aa, Homo sapiens; identical to SEQ ID NO: 99235
  Payload ID: 19794
  Gene Name: zinc finger protein 197
  Uniprot ID: O14709
  ENSP ID: ENSP00000373251

SEQ ID NO: 99237 - protein, 1029 aa, Homo sapiens; identical to SEQ ID NO: 99234
  Payload ID: 19794
  Gene Name: zinc finger protein 197
  Uniprot ID: O14709
  ENSP ID: ENSP00000379370

SEQ ID NO: 99238 - protein, 78 aa, Homo sapiens
  Payload ID: 19794
  Gene Name: zinc finger protein 197
  ENSP ID: ENSP00000394713
MTRENVAHNALRQEGLVKGKDDTWKWGTSFQGSSSSVWETSHLHFRQLRYHETSGPQEALSRLRELCRRWLRPEARTK

SEQ ID NO: 99239 - protein, 1029 aa, Homo sapiens; identical to SEQ ID NO: 99234
  Payload ID: 19794
  Gene Name: zinc finger protein 197
  Uniprot ID: O14709
  ENSP ID: ENSP00000485709

SEQ ID NO: 99240 - protein, 173 aa, Homo sapiens; identical to SEQ ID NO: 99233
  Payload ID: 19794
  Gene Name: zinc finger protein 197
  ENSP ID: ENSP00000486661

SEQ ID NO: 99241 - protein, 1029 aa, Homo sapiens; identical to SEQ ID NO: 99234
  Payload ID: 19794
  Gene Name: zinc finger protein 197
  Uniprot ID: O14709
  ENSP ID: ENSP00000486739

SEQ ID NO: 99242 - protein, 267 aa, Homo sapiens; identical to SEQ ID NO: 99235
  Payload ID: 19794
  Gene Name: zinc finger protein 197
  Uniprot ID: O14709
  ENSP ID: ENSP00000486777

SEQ ID NO: 99243 - protein, 78 aa, Homo sapiens; identical to SEQ ID NO: 99238
  Payload ID: 19794
  Gene Name: zinc finger protein 197
  ENSP ID: ENSP00000487051

SEQ ID NO: 99244 - protein, 267 aa, Homo sapiens; identical to SEQ ID NO: 99235
  Payload ID: 19794
  Gene Name: zinc finger protein 197
  Uniprot ID: O14709
  ENSP ID: ENSP00000487305

SEQ ID NO: 99245 - protein, 345 aa, Homo sapiens
  Payload ID: 19795
  Gene Name: zinc finger protein 2
  ENSP ID: ENSP00000477960
MLENYNSIVSLDWETKPEIHDASDKKSEGSLRECLGRQSPLCPKFEVHTPNGRMGTEKQSPSGETRKKSLSRDKGLRRRSALSREILTKERHQECSDCGKTFFDHSSLTRHQRTHTGEKPYDCRECGKAFSHRSSLSRHLMSHTGESPYECSVCSKAFFDRSSLTVHQRIHTGEKPFQCNECGKAFFDRSSLTRHQRIHTGESPYECHQCGKAFSQKSILTRHQLIHTGRKPYECNECGKAFYGVSSLNRHQKAHAGDPRYQCNECGKAFFDRSSLTQHQKIHTGDKPYECSECGKAFSQRCRLTRHQRVHTGEKPFECTVCGKVFSSKSSVIQHQRRYAKQGID

SEQ ID NO: 99246 - protein, 383 aa, Homo sapiens
  Payload ID: 19795
  Gene Name: zinc finger protein 2
  ENSP ID: ENSP00000480057
MLENYNSIVSLGLPVPQPDVIFQLKRGDKPWMVDLHGSEEREWPESVSLDWETKPEIHDASDKKSEGSLRECLGRQSPLCPKFEVHTPNGRMGTEKQSPSGETRKKSLSRDKGLRRRSALSREILTKERHQECSDCGKTFFDHSSLTRHQRTHTGEKPYDCRECGKAFSHRSSLSRHLMSHTGESPYECSVCSKAFFDRSSLTVHQRIHTGEKPFQCNECGKAFFDRSSLTRHQRIHTGESPYECHQCGKAFSQKSILTRHQLIHTGRKPYECNECGKAFYGVSSLNRHQKAHAGDPRYQCNECGKAFFDRSSLTQHQKIHTGDKPYECSECGKAFSQRCRLTRHQRVHTGEKPFECTVCGKVFSSKSSVIQHQRRYAKQGID

SEQ ID NO: 99247 - protein, 425 aa, Homo sapiens
  Payload ID: 19795
  Gene Name: zinc finger protein 2
  Uniprot ID: Q9BSG1
  ENSP ID: ENSP00000480297
MAAVSPTTRCQESVTFEDVAVVFTDEEWSRLVPIQRDLYKEVMLENYNSIVSLGLPVPQPDVIFQLKRGDKPWMVDLHGSEEREWPESVSLDWETKPEIHDASDKKSEGSLRECLGRQSPLCPKFEVHTPNGRMGTEKQSPSGETRKKSLSRDKGLRRRSALSREILTKERHQECSDCGKTFFDHSSLTRHQRTHTGEKPYDCRECGKAFSHRSSLSRHLMSHTGESPYECSVCSKAFFDRSSLTVHQRIHTGEKPFQCNECGKAFFDRSSLTRHQRIHTGESPYECHQCGKAFSQKSILTRHQLIHTGRKPYECNECGKAFYGVSSLNRHQKAHAGDPRYQCNECGKAFFDRSSLTQHQKIHTGDKPYECSECGKAFSQRCRLTRHQRVHTGEKPFECTVCGKVFSSKSSVIQHQRRYAKQGID

SEQ ID NO: 99248 - protein, 438 aa, Homo sapiens
  Payload ID: 19795
  Gene Name: zinc finger protein 2
  ENSP ID: ENSP00000482030
MAAVSPTTRCQESVTFEDVAVVFTDEEWSRLVPIQRDLYKEVMLENYNSIVSLGLPVPQPDVIFQLKRGDKPWMVDLHGSEEREWPESVSLAQEKNCICFLFVPDWETKPEIHDASDKKSEGSLRECLGRQSPLCPKFEVHTPNGRMGTEKQSPSGETRKKSLSRDKGLRRRSALSREILTKERHQECSDCGKTFFDHSSLTRHQRTHTGEKPYDCRECGKAFSHRSSLSRHLMSHTGESPYECSVCSKAFFDRSSLTVHQRIHTGEKPFQCNECGKAFFDRSSLTRHQRIHTGESPYECHQCGKAFSQKSILTRHQLIHTGRKPYECNECGKAFYGVSSLNRHQKAHAGDPRYQCNECGKAFFDRSSLTQHQKIHTGDKPYECSECGKAFSQRCRLTRHQRVHTGEKPFECTVCGKVFSSKSSVIQHQRRYAKQGID

SEQ ID NO: 99249 - protein, 387 aa, Homo sapiens
  Payload ID: 19795
  Gene Name: zinc finger protein 2
  ENSP ID: ENSP00000483131
MAAVSPTTRCQESVTFEDVAVVFTDEEWSRLVPIQRDLYKEVMLENYNSIVSLDWETKPEIHDASDKKSEGSLRECLGRQSPLCPKFEVHTPNGRMGTEKQSPSGETRKKSLSRDKGLRRRSALSREILTKERHQECSDCGKTFFDHSSLTRHQRTHTGEKPYDCRECGKAFSHRSSLSRHLMSHTGESPYECSVCSKAFFDRSSLTVHQRIHTGEKPFQCNECGKAFFDRSSLTRHQRIHTGESPYECHQCGKAFSQKSILTRHQLIHTGRKPYECNECGKAFYGVSSLNRHQKAHAGDPRYQCNECGKAFFDRSSLTQHQKIHTGDKPYECSECGKAFSQRCRLTRHQRVHTGEKPFECTVCGKVFSSKSSVIQHQRRYAKQGID

SEQ ID NO: 99250 - protein, 532 aa, Homo sapiens
  Payload ID: 19796
  Gene Name: zinc finger protein 20
  Uniprot ID: P17024
  ENSP ID: ENSP00000335437
MMFQDSVAFEDVAVSFTQEEWALLDPSQKNLYRDVMQETFKNLTSVGKTWKVQNIEDEYKNPRRNLSLMREKLCESKESHHCGESFNQIADDMLNRKTLPGITPCESSVCGEVGTGHSSLNTHIRADTGHKSSEYQEYGENPYRNKECKKAFSYLDSFQSHDKACTKEKPYDGKECTETFISHSCIQRHRVMHSGDGPYKCKFCGKAFYFLNLCLIHERIHTGVKPYKCKQCGKAFTRSTTLPVHERTHTGVNADECKECGNAFSFPSEIRRHKRSHTGEKPYECKQCGKVFISFSSIQYHKMTHTGEKPYECKQCGKAFRCGSHLQKHGRTHTGEKPYECRQCGKAFRCTSDLQRHEKTHTEDKPYGCKQCGKGFRCASQLQIHERTHSGEKPHECKECGKVFKYFSSLRIHERTHTGEKPHECKQCGKAFRYFSSLHIHERTHTGDKPYECKVCGKAFTCSSSIRYHERTHTGEKPYECKHCGKAFISNYIRYHERTHTGEKPYQCKQCGKAFIRASSCREHERTHTINR

SEQ ID NO: 99251 - protein, 169 aa, Homo sapiens
  Payload ID: 19796
  Gene Name: zinc finger protein 20
  ENSP ID: ENSP00000390115
MDSVAFEDVAVSFTQEEWALLDPSQKNLYRDVMQETFKNLTSVGKTWKVQNIEDEYKNPRRNLSLMREKLCESKESHHCGESFNQIADDMLNRKTLPGITPCESSVCGEVGTGHSSLNTHIRADTGHKSSEYQEYGENPYRNKECKKAFSYLDSFQSHDKACTKEKPYD

SEQ ID NO: 99252 - protein, 40 aa, Homo sapiens
  Payload ID: 19796
  Gene Name: zinc finger protein 20
  ENSP ID: ENSP00000402483
MVTICPCSFWIQWPLRMWLSASPRRSGLCWILPRRISTGM

SEQ ID NO: 99253 - protein, 131 aa, Homo sapiens
  Payload ID: 19796
  Gene Name: zinc finger protein 20
  ENSP ID: ENSP00000470025
MDSVAFEDVAVSFTQEEWALLDPSQKNLYRDVMQETFKNLTSVGKTWKVQNIEDEYKNPRRNLRRSFTLVAQAGVQRRDLGSPQPPPPGFKRFSCLSLPSSWDYKHAPPRQANFVFLVETGFLHVRLVSNS

SEQ ID NO: 99254 - protein, 394 aa, Homo sapiens
  Payload ID: 19797
  Gene Name: zinc finger protein 200
  Uniprot ID: P98182
  ENSP ID: ENSP00000380077
MMAAKVVPMPPKPKQSFILRVPPDSKLGQDLLRDATNGPKTIHQLVLEHFLTFLPKPSLVQPSQKVKETLVIMKDVSSSLQNRVHPRPLVKLLPKGVQKEQETVSLYLKANPELVVFEDLNVFHCQEECVSLDPTQQLTSEKEDDSSVGEMMLLAVNGSNPEGEDPEREPVENEDYREKSSDDDEMDSSLVSQQPPDNQEKERLNTSIPQKRKMRNLLVTIENDTPLEELSKYVDISIIALTRNRRTRRWYTCPLCGKQFNESSYLISHQRTHTGEKPYDCNHCGKSFNHKTNLNKHERIHTGEKPYSCSQCGKNFRQNSHRSRHEGIHIREKIFKCPECGKTFPKNEEFVLHLQSHEAERPYGCKKCGRRFGRLSNCTRHEKTHSACKTRKQK

SEQ ID NO: 99255 - protein, 394 aa, Homo sapiens
  Payload ID: 19797
  Gene Name: zinc finger protein 200
  Uniprot ID: P98182
  ENSP ID: ENSP00000380079
MMAAKVVPMPPKPKQSFILRVPPDSKLGQDLLRDATNGPKTIHQLVLEHFLTFLPKPSLVQPSQKVKETLVIMKDVSSSLQNRVHPRPLVKLLPKGVQKEQETVSLYLKANPEELVVFEDLNVFHCQEECVSLDPTQQLTSEKEDDSSVGEMMLLVNGSNPEGEDPEREPVENEDYREKSSDDDEMDSSLVSQQPPDNQEKERLNTSIPQKRKMRNLLVTIENDTPLEELSKYVDISIIALTRNRRTRRWYTCPLCGKQFNESSYLISHQRTHTGEKPYDCNHCGKSFNHKTNLNKHERIHTGEKPYSCSQCGKNFRQNSHRSRHEGIHIREKIFKCPECGKTFPKNEEFVLHLQSHEAERPYGCKKCGRRFGRLSNCTRHEKTHSACKTRKQK

SEQ ID NO: 99256 - protein, 394 aa, Homo sapiens; identical to SEQ ID NO: 99255
  Payload ID: 19797
  Gene Name: zinc finger protein 200
  Uniprot ID: P98182
  ENSP ID: ENSP00000380080

SEQ ID NO: 99257 - protein, 395 aa, Homo sapiens
  Payload ID: 19797
  Gene Name: zinc finger protein 200
  Uniprot ID: P98182
  ENSP ID: ENSP00000395723
MMAAKVVPMPPKPKQSFILRVPPDSKLGQDLLRDATNGPKTIHQLVLEHFLTFLPKPSLVQPSQKVKETLVIMKDVSSSLQNRVHPRPLVKLLPKGVQKEQETVSLYLKANPEELVVFEDLNVFHCQEECVSLDPTQQLTSEKEDDSSVGEMMLLAVNGSNPEGEDPEREPVENEDYREKSSDDDEMDSSLVSQQPPDNQEKERLNTSIPQKRKMRNLLVTIENDTPLEELSKYVDISIIALTRNRRTRRWYTCPLCGKQFNESSYLISHQRTHTGEKPYDCNHCGKSFNHKTNLNKHERIHTGEKPYSCSQCGKNFRQNSHRSRHEGIHIREKIFKCPECGKTFPKNEEFVLHLQSHEAERPYGCKKCGRRFGRLSNCTRHEKTHSACKTRKQK

SEQ ID NO: 99258 - protein, 395 aa, Homo sapiens; identical to SEQ ID NO: 99257
  Payload ID: 19797
  Gene Name: zinc finger protein 200
  Uniprot ID: P98182
  ENSP ID: ENSP00000405786

SEQ ID NO: 99259 - protein, 394 aa, Homo sapiens; identical to SEQ ID NO: 99255
  Payload ID: 19797
  Gene Name: zinc finger protein 200
  Uniprot ID: P98182
  ENSP ID: ENSP00000458508

SEQ ID NO: 99260 - protein, 43 aa, Homo sapiens
  Payload ID: 19797
  Gene Name: zinc finger protein 200
  ENSP ID: ENSP00000458777
MMAAKVVPMPPKPKQSFILRVPPDSKLGQDLLRDATNGPKTIH

SEQ ID NO: 99261 - protein, 648 aa, Homo sapiens
  Payload ID: 19798
  Gene Name: zinc finger protein 202
  Uniprot ID: O95125
  ENSP ID: ENSP00000337724
MATAVEPEDQDLWEEEGILMVKLEDDFTCRPESVLQRDDPVLETSHQNFRRFRYQEAASPREALIRLRELCHQWLRPERRTKEQILELLVLEQFLTVLPGELQSWVRGQRPESGEEAVTLVEGLQKQPRRPRRWVTVHVHGQEVLSEETVHLGVEPESPNELQDPVQSSTPEQSPEETTQSPDLGAPAEQRPHQEEELQTLQESEVPVPEDPDLPAERSSGDSEMVALLTALSQGLVTFKDVAVCFSQDQWSDLDPTQKEFYGEYVLEEDCGIVVSLSFPIPRPDEISQVREEEPWVPDIQEPQETQEPEILSFTYTGDRSKDEEECLEQEDLSLEDIHRPVLGEPEIHQTPDWEIVFEDNPGRLNERRFGTNISQVNSFVNLRETTPVHPLLGRHHDCSVCGKSFTCNSHLVRHLRTHTGEKPYKCMECGKSYTRSSHLARHQKVHKMNAPYKYPLNRKNLEETSPVTQAERTPSVEKPYRCDDCGKHFRWTSDLVRHQRTHTGEKPFFCTICGKSFSQKSVLTTHQRIHLGGKPYLCGECGEDFSEHRRYLAHRKTHAAEELYLCSECGRCFTHSAAFAKHLRGHASVRPCRCNECGKSFSRRDHLVRHQRTHTGEKPFTCPTCGKSFSRGYHLIRHQRTHSEKTS

SEQ ID NO: 99262 - protein, 126 aa, Homo sapiens
  Payload ID: 19798
  Gene Name: zinc finger protein 202
  ENSP ID: ENSP00000431223
MATAVEPEDQDLWEEEGILMVKLEDDFTCRPESVLQRDDPVLETSHQNFRRFRYQEAASPREALIRLRELCHQWLRPERRTKEQILELLVLEQFLTVLPGELQSWVRGQRPESGEEAVTLVEGLQK

SEQ ID NO: 99263 - protein, 45 aa, Homo sapiens
  Payload ID: 19798
  Gene Name: zinc finger protein 202
  ENSP ID: ENSP00000431761
MATAVEPEDQDLWEEEGILMVKLEDDFTCRPESVLQRDDPVLETS

SEQ ID NO: 99264 - protein, 648 aa, Homo sapiens; identical to SEQ ID NO: 99261
  Payload ID: 19798
  Gene Name: zinc finger protein 202
  Uniprot ID: O95125
  ENSP ID: ENSP00000432504

SEQ ID NO: 99265 - protein, 648 aa, Homo sapiens; identical to SEQ ID NO: 99261
  Payload ID: 19798
  Gene Name: zinc finger protein 202
  Uniprot ID: O95125
  ENSP ID: ENSP00000433881

SEQ ID NO: 99266 - protein, 10 aa, Homo sapiens
  Payload ID: 19798
  Gene Name: zinc finger protein 202
  ENSP ID: ENSP00000434338
MATAVEPEDQ

SEQ ID NO: 99267 - protein, 554 aa, Homo sapiens
  Payload ID: 19799
  Gene Name: zinc finger protein 205
  Uniprot ID: O95201
  ENSP ID: ENSP00000219091
MSADGGGIQDTQDKETPPEVPDRGHPHQEMPSKLGEAVPSGDTQESLHIKMEPEEPHSEGASQEDGAQGAWGWAPLSHGSKEKALFLPGGALPSPRIPVLSREGRTRDRQMAAALLTAWSQMPVTFEDVALYLSREEWGRLDHTQQNFYRDVLQKKNGLSLGFPFSRPFWAPQAHGKGEASGSSRQAGDEKEWRGACTGAVEVGQRVQTSSVAALGNVKPFRTRAGRVQWGVPQCAQEAACGRSSGPAKDSGQPAEPDRTPDAAPPDPSPTEPQEYRVPEKPNEEEKGAPESGEEGLAPDSEVGRKSYRCEQCGKGFSWHSHLVTHRRTHTGEKPYACTDCGKRFGRSSHLIQHQIIHTGEKPYTCPACRKSFSHHSTLIQHQRIHTGEKPYVCDRCAKRFTRRSDLVTHQGTHTGAKPHKCPICAKCFTQSSALVTHQRTHTGVKPYPCPECGKCFSQRSNLIAHNRTHTGEKPYHCLDCGKSFSHSSHLTAHQRTHRGVRPYACPLCGKSFSRRSNLHRHEKIHTTGPKALAMLMLGAAAAGALATPPPAPT

SEQ ID NO: 99268 - protein, 554 aa, Homo sapiens; identical to SEQ ID NO: 99267
  Payload ID: 19799
  Gene Name: zinc finger protein 205
  Uniprot ID: O95201
  ENSP ID: ENSP00000371627

SEQ ID NO: 99269 - protein, 118 aa, Homo sapiens
  Payload ID: 19799
  Gene Name: zinc finger protein 205
  ENSP ID: ENSP00000394360
MSADGGGIQDTQDKETPPEVPDRGHPHQEMPSKLGEAVPSGDTQESLHIKMEPEEPHSEGASQEDGAQGAWGWAPLSHGSKEKALFLPGGALPSPRIPVLSREGRTRDRQMAAALLTA

SEQ ID NO: 99270 - protein, 278 aa, Homo sapiens
  Payload ID: 19799
  Gene Name: zinc finger protein 205
  ENSP ID: ENSP00000403306
MSADGGGIQDTQDKETPPEVPDRGHPHQEMPSKLGEAVPSGDTQESLHIKMEPEEPHSEGASQEDGAQGAWGWAPLSHGSKEKALFLPGGALPSPRIPVLSREGRTRDRQMAAALLTAWSQMPVTFEDVALYLSREEWGRLDHTQQNFYRDVLQKKNGLSLGFPFSRPFWAPQAHGKGEASGSSRQAGDEKEWRGACTGAVEVGQRVQTSSVAALGNVKPFRTRAGRVQWGVPQCAQEAACGRSSGPAKDSGQPAEPDRTPDAAPPDPSPTEPQEYRV

SEQ ID NO: 99271 - protein, 255 aa, Homo sapiens
  Payload ID: 19799
  Gene Name: zinc finger protein 205
  ENSP ID: ENSP00000460890
  MOD_RES (1)..(1): Any amino acid
XLSHGSKEKALFLPGGALPSPRIPVLSREGRTRDRQMAAALLTAWSQMPVTFEDVALYLSREEWGRLDHTQQNFYRDVLQKKNGLSLGAVEVGQRVQTSSVAALGNVKPFRTRAGRVQWGVPQCAQEAACGRSSGPAKDSGQPAEPDRTPDAAPPDPSPTEPQEYRVPEKPNEEEKGAPESGEEGLAPDSEVGRKSYRCEQCGKGFSWHSHLVTHRRTHTGEKPYACTDCGKRFGRSSHLIQHQIIHTGEKPYTC

SEQ ID NO: 99272 - protein, 554 aa, Homo sapiens; identical to SEQ ID NO: 99267
  Payload ID: 19799
  Gene Name: zinc finger protein 205
  Uniprot ID: O95201
  ENSP ID: ENSP00000480401

SEQ ID NO: 99273 - protein, 478 aa, Homo sapiens
  Payload ID: 19800
  Gene Name: zinc finger protein 207
  Uniprot ID: O43670
  ENSP ID: ENSP00000322777
MGRKKKKQLKPWCWYCNRDFDDEKILIQHQKAKHFKCHICHKKLYTGPGLAIHCMQVHKETIDAVPNAIPGRTDIELEIYGMEGIPEKDMDERRRLLEQKTQESQKKKQQDDSDEYDDDDSAASTSFQPQPVQPQQGYIPPMAQPGLPPVPGAPGMPPGIPPLMPGVPPLMPGMPPVMPGMPPGMMPMGGMMPPGPGIPPLMPGMPPGMPPPVPRPGIPPMTQAQAVSAPGILNRPPAPTATVPAPQPPVTKPLFPSAGQMGTPVTSSSTASSNSESLSASSKALFPSTAQAQAAVQGPVGTDFKPLNSTPATTTEPPKPTFPAYTQSTASTTSTTNSTAAKPAASITSKPATLTTTSATSKLIHPDEDISLEERRAQLPKYQRNLPRPGQAPIGNPPVGPIGGMMPPQPGIPQQQGMRPPMPPHGQYGGHHQGMPGYLPGAMPPYGQGPPMVPPYQGGPPRPPMGMRPPVMSQGGRY

SEQ ID NO: 99274 - protein, 497 aa, Homo sapiens
  Payload ID: 19800
  Gene Name: zinc finger protein 207
  ENSP ID: ENSP00000340029
MAMSSLGCLCALTVLIRYCNRDFDDEKILIQHQKAKHFKCHICHKKLYTGPGLAIHCMQVHKETIDAVPNAIPGRTDIELEIYGMEGIPEKDMDERRRLLEQKTQESQKKKQQDDSDEYDDDDSAASTSFQPQPVQPQQGYIPPMAQPGLPPVPGAPGMPPGIPPLMPGVPPLMPGMPPVMPGMPPGLHHQRKYTQSFCGENIMMPMGGMMPPGPGIPPLMPGMPPGMPPPVPRPGIPPMTQAQAVSAPGILNRPPAPTATVPAPQPPVTKPLFPSAGQMGTPVTSSSTASSNSESLSASSKALFPSTAQAQAAVQGPVGTDFKPLNSTPATTTEPPKPTFPAYTQSTASTTSTTNSTAAKPAASITSKPATLTTTSATSKLIHPDEDISLEERRAQLPKYQRNLPRPGQAPIGNPPVGPIGGMMPPQPGIPQQQGMRPPMPPHGQYGGHHQGMPGYLPGAMPPYGQGPPMVPPYQGGPPRPPMGMRPPVMSQGGRY

SEQ ID NO: 99275 - protein, 494 aa, Homo sapiens
  Payload ID: 19800
  Gene Name: zinc finger protein 207
  Uniprot ID: O43670
  ENSP ID: ENSP00000378165
MGRKKKKQLKPWCWYCNRDFDDEKILIQHQKAKHFKCHICHKKLYTGPGLAIHCMQVHKETIDAVPNAIPGRTDIELEIYGMEGIPEKDMDERRRLLEQKTQESQKKKQQDDSDEYDDDDSAASTSFQPQPVQPQQGYIPPMAQPGLPPVPGAPGMPPGIPPLMPGVPPLMPGMPPVMPGMPPGLHHQRKYTQSFCGENIMMPMGGMMPPGPGIPPLMPGMPPGMPPPVPRPGIPPMTQAQAVSAPGILNRPPAPTATVPAPQPPVTKPLFPSAGQMGTPVTSSSTASSNSESLSASSKALFPSTAQAQAAVQGPVGTDFKPLNSTPATTTEPPKPTFPAYTQSTASTTSTTNSTAAKPAASITSKPATLTTTSATSKLIHPDEDISLEERRAQLPKYQRNLPRPGQAPIGNPPVGPIGGMMPPQPGIPQQQGMRPPMPPHGQYGGHHQGMPGYLPGAMPPYGQGPPMVPPYQGGPPRPPMGMRPPVMSQGGRY

SEQ ID NO: 99276 - protein, 463 aa, Homo sapiens
  Payload ID: 19800
  Gene Name: zinc finger protein 207
  Uniprot ID: O43670
  ENSP ID: ENSP00000378168
MGRKKKKQLKPWCWYCNRDFDDEKILIQHQKAKHFKCHICHKKLYTGPGLAIHCMQVHKETIDAVPNAIPGRTDIELEIYGMEGIPEKDMDERRRLLEQKTQESQKKKQQDDSDEYDDDDSAASTSFQPQPVQPQQGYIPPMAQPGLPPVPGAPGMPPGIPPLMPGVPPLMPGMPPVMPGMPPGLHHQRKYTQSFCGENIMMPMGGMMPPGPGIPPLMPGMPPGMPPPVPRPGIPPMTQAQAVSAPGILNRPPAPTATVPAPQPPVTKPLFPSAGQAQAAVQGPVGTDFKPLNSTPATTTEPPKPTFPAYTQSTASTTSTTNSTAAKPAASITSKPATLTTTSATSKLIHPDEDISLEERRAQLPKYQRNLPRPGQAPIGNPPVGPIGGMMPPQPGIPQQQGMRPPMPPHGQYGGHHQGMPGYLPGAMPPYGQGPPMVPPYQGGPPRPPMGMRPPVMSQGGRY

SEQ ID NO: 99277 - protein, 198 aa, Homo sapiens
  Payload ID: 19800
  Gene Name: zinc finger protein 207
  ENSP ID: ENSP00000378172
MQVHKETIDAVPNAIPGRTDIELEIYGMEGIPEKDMDERRRLLEQKTQESQKKKQQDDSDEYDDDDSAASTSFQPQPVQPQQGYIPPMAQPGLPPVPGAPGMPPGIPPLMPGVPPLMPGMPPVMPGMPPGLHHQRKYTQSFCGENIMMPMGGMMPPGPGIPPLMPGMPPGMPPPVPRPGIPPMTQAQAVSAPGILNRP

SEQ ID NO: 99278 - protein, 93 aa, Homo sapiens
  Payload ID: 19800
  Gene Name: zinc finger protein 207
  ENSP ID: ENSP00000461914
MQVHKETIDAVPNAIPGRTDIELEIYGMEGIPEKDMDERRRLLEQKTQESQKKKQQDDSDEYDDDDSAASTSFQPQPVQPQQGYIPPMAQPGL

SEQ ID NO: 99279 - protein, 95 aa, Homo sapiens
  Payload ID: 19800
  Gene Name: zinc finger protein 207
  ENSP ID: ENSP00000462193
MQVHKETIDAVPNAIPGRTDIELEIYGMEGIPEKDMDERRRLLEQKTQESQKKKQQDDSDEYDDDDSAASTSFQPQPVQPQQGYIPPMAQPGLPP

SEQ ID NO: 99280 - protein, 341 aa, Homo sapiens
  Payload ID: 19800
  Gene Name: zinc finger protein 207
  ENSP ID: ENSP00000462284
  MOD_RES (1)..(1): Any amino acid
XGMPPGIPPLMPGVPPLMPGMPPVMPGMPPGLHHQRKYTQSFCGENIMMPMGGMMPPGPGIPPLMPGMPPGMPPPVPRPGIPPMTQAQAVSAPGILNRPPAPTATVPAPQPPVTKPLFPSAGQMGTPVTSSSTASSNSESLSASSKALFPSTAQAQAAVQGPVGTDFKPLNSTPATTTEPPKPTFPAYTQSTASTTSTTNSTAAKPAASITSKPATLTTTSATSKLIHPDEDISLEERRAQLPKYQRNLPRPGQAPIGNPPVGPIGGMMPPQPGIPQQQGMRPPMPPHGQYGGHHQGMPGYLPGAMPPYGQGPPMVPPYQGGPPRPPMGMRPPVMSQGGRY

SEQ ID NO: 99281 - protein, 74 aa, Homo sapiens
  Payload ID: 19800
  Gene Name: zinc finger protein 207
  ENSP ID: ENSP00000463040
MQVHKETIDAVPNAIPGRTDIELEIYGMEGIPEKDMDERRRLLEQKTQESQKKKQQDDSDEYDDDDSAASTSFQ

SEQ ID NO: 99282 - protein, 493 aa, Homo sapiens
  Payload ID: 19800
  Gene Name: zinc finger protein 207
  ENSP ID: ENSP00000464366
MGRKKKKQLKPWCWYCNRDFDDEKILIQHQKAKHFKCHICHKKLYTGPGLAIHCMQVHKETIDAVPNAIPGRTDIELEIYGMEGIPEKDMDERRRLLEQKTQESQKKKQQDDSDEYDDDDSAASTSFQPQPVQPQQGYIPPMAQPGLPPVPGAPGMPPGIPPLMPGVPPLMPGMPPVMPGMPPGLHHQRKYTQSFCGENIMMPMGGMMPPGPGIPPLMPGMPPGMPPPVPRPGIPPMTQAQAVSAPGILNRPPAPTATVPAPQPPVTKPLFPSAGQMGTPVTSSSTASSNSESLSASSKALFPSTAQAQAAVQGPVGTDFKPLNSTPATTTEPPKPTFPAYTQSTASTTSTTNSTAAKPAASITSKPATLTTTSATSKLIHPDEDISLEERRAQLPKYQRNLPRPGQAPIGNPPVGPIGGMMPPQPGIPQQQGMRPPMPPHGQYGGHHQGMPGYLPGAMPPYGQGPPMVPPYQGGPPRPPMGMRPPVMSQALP

SEQ ID NO: 99283 - protein, 46 aa, Homo sapiens
  Payload ID: 19800
  Gene Name: zinc finger protein 207
  ENSP ID: ENSP00000464495
MQVHKETIDAVPNAIPGRTDIELEIYGMEGIPEKDMDERRRLLEQK

SEQ ID NO: 99284 - protein, 1280 aa, Homo sapiens
  Payload ID: 19801
  Gene Name: zinc finger protein 208
  Uniprot ID: O43345
  ENSP ID: ENSP00000380315
MGSLTFRDVAIEFSLEEWQCLDTAQQNLYRNVMLENYRNLVFLGIAAFKPDLIIFLEEGKESWNMKRHEMVEESPVICSHFAQDLWPEQGIEDSFQKVILRRYEKCGHENLHLKIGYTNVDECKVHKEGYNKLNQSLTTTQSKVFQRGKYANVFHKCSNSNRHKIRHTGKKHLQCKEYVRSFCMLSHLSQHKRIYTRENSYKCEEGGKAFNWSSTLTYYKSAHTGEKPYRCKECGKAFSKFSILTKHKVIHTGEKSYKCEECGKAFNQSAILTKHKIIHTGEKPNKCEECGKAFSKVSTLTTHKAIHAGEKPYKCKECGKAFSKVSTLITHKAIHAGEKPYKCKECGKAFSKFSILTKHKVIHTGEKPYKCEECGKAYKWPSTLSYHKKIHTGEKPYKCEECGKGFSMFSILTKHEVIHTGEKPYKCEECGKAFNWSSNLMEHKKIHTGETPYKCEECGKGFSMFSILTKHKVIHNGEKPYKCEECDKATHAGEKPYKCEECGKAFNWSSNLMEHKRIHTGEKPYKCEECGKSFSTFSILTKHKVIHTGEKPYKCEECGKAYKWSSTLSYHKKIHTVEKPYKCEECGKAFNQSAILIKHKRIHTGEKPYKCEECGKTFSKVSTLTTHKAIHAGEKPYKCKECGKTFIKVSTLTTHKAIHAGEKPYKCKECGKAFSKFSILTKHKVIHTGEKPYKCEECGKAFNWSSNLMEHKRIHTGEKPYKCEECGKSFSTFSVLTKHKVIHTGEKPYKCEECGKAYKWSSTLSYHKKIHTVEKPYKCEECGKAFNRSAILIKHKRIHTDEKPYKCEECGKTFSKVSTLTTHKAIHAGEKPYKCKECGKAFSKFSILTKHKVIHTGEKPYKCEECGKAYKWPSTLSYHKKIHTGEKPYKCEECGKGFSMFSILTKHEVIHTGEKPYKCEECGKAFSWLSVFSKHKKTHAGEKFYKCEACGKAYKSSSTLSYHKKIHTEEKPYKYEECGKGFSTFSILTKHKVIHTGEKPYKCEECGKAFNWSSNLMEHKKIHTGETPYKCEECDKAFSWPSSLTEHKATHAGEKPYKCEECGKAFSWPSRLTEHKATHAGEEPYKCEECGKAFNWSSNLMEHKRIHTGEKPYKCEECGKSFSTFSILTKHKVIHTGEKPYKCEECGKAYKWSSTLSYHKKIHTVEKPYKCEECGKGFVMFSILAKHKVIHTGEKLYKCEECGKAYKWPSTLRYHKKIHTGEKPYKCEECGKAFSTFSILTKHKVIHTGEKPYKCEECGKAFSWLSVFSKHKKIHTGEKL

SEQ ID NO: 99285 - protein, 127 aa, Homo sapiens
  Payload ID: 19801
  Gene Name: zinc finger protein 208
  ENSP ID: ENSP00000469254
MGSLTFRDVAIEFSLEEWQCLDTAQQNLYRNVMLENYRNLVFLGIAAFKPDLIIFLEEGKESWNMKRHEMVEESPVICSHFAQDLWPEQGIEDSFQKVILRRYKIHHHACELGPIMNHHPTCGQMHI

SEQ ID NO: 99286 - protein, 112 aa, Homo sapiens
  Payload ID: 19801
  Gene Name: zinc finger protein 208
  ENSP ID: ENSP00000469887
MGSLTFRDVAIEFSLEEWQCLDTAQQNLYRNVMLENYRNLVFLGIAAFKPDLIIFLEEGKESWNMKRHEMVEESPGMVGSSGPESSAPYHVHCCPFVLSLRLVSETHQLFLS

SEQ ID NO: 99287 - protein, 38 aa, Homo sapiens
  Payload ID: 19801
  Gene Name: zinc finger protein 208
  ENSP ID: ENSP00000471831
MPGTQLILYDGSLTFRDVAIEFSLEEWQCLDTAQQNLY

SEQ ID NO: 99288 - protein, 51 aa, Homo sapiens
  Payload ID: 19801
  Gene Name: zinc finger protein 208
  ENSP ID: ENSP00000472406
MLENYRNLVFLGIAAFKPDLIIFLEEGKESWNMKRHEMVEESPGASSVLHF

SEQ ID NO: 99289 - protein, 76 aa, Homo sapiens
  Payload ID: 19801
  Gene Name: zinc finger protein 208
  ENSP ID: ENSP00000473026
  MOD_RES (1)..(1): Any amino acid
XSLTFRDVAIEFSLEEWQCLDTAQQNLYRNVMLENYRNLVFLGIAAFKPDLIIFLEEGKESWNMKRHEMVEESPGR

SEQ ID NO: 99290 - protein, 1167 aa, Homo sapiens [sequence omitted]

SEQ ID NO: 99291 - protein, 577 aa, Homo sapiens
  Payload ID: 19802
  Gene Name: zinc finger protein 211
  Uniprot ID: Q13398
  ENSP ID: ENSP00000240731
MLGFPPGRPQLPVQLRPQTRMATALRDPASVPIATEVLFKLTQGSVTFEDVAVYFSWEEWDLLDEAQKHLYFDVMLENFALTSSLGCWCGVEHEETPSEQRISGERVPQFRTSKEGSSSQNADSCEICCLVLRDILHLAEHQGTNCGQKLHTCGKQFYISANLQQHQRQHITEAPFRSYVDTASFTQSCIVHVSEKPFTCREIRKDFLANMRFLHQDATQTGEKPNNSNKCAVAFYSGKSHHNWGKCSKAFSHIDTLVQDQRILTREGLFECSKCGKACTRRCNLIQHQKVHSEERPYECNECGKFFTYYSSFIIHQRVHTGERPYACPECGKSFSQIYSLNSHRKVHTGERPYECGECGKSFSQRSNLMQHRRVHTGERPYECSECGKSFSQNFSLIYHQRVHTGERPHECNECGKSFSRSSSLIHHRRLHTGERPYECSKCGKSFKQSSSFSSHRKVHTGERPYVCGECGKSFSHSSNLKNHQRVHTGERPVECSECSKSFSCKSNLIKHLRVHTGERPYECSECGKSFSQSSSLIQHRRVHTGKRPYQCSQCGKSFGCKSVLIQHQRVHIGEKP

SEQ ID NO: 99292 - protein, 555 aa, Homo sapiens
  Payload ID: 19802
  Gene Name: zinc finger protein 211
  Uniprot ID: Q13398
  ENSP ID: ENSP00000254182
MLENFALTSSLGLISSWSHVVAQLGLGEVPSVLHRMFMTPASARWDQRGPGLHEWHLGKGMSSGCWCGVEHEETPSEQRISGERVPQFRTSKEGSSSQNADSCEICCLVLRDILHLAEHQGTNCGQKLHTCGKQFYISANLQQHQRQHITEAPFRSYVDTASFTQSCIVHVSEKPFTCREIRKDFLANMRFLHQDATQTGEKPNNSNKCAVAFYSGKSHHNWGKCSKAFSHIDTLVQDQRILTREGLFECSKCGKACTRRCNLIQHQKVHSEERPYECNECGKFFTYYSSFIIHQRVHTGERPYACPECGKSFSQIYSLNSHRKVHTGERPYECGECGKSFSQRSNLMQHRRVHTGERPYECSECGKSFSQNFSLIYHQRVHTGERPHECNECGKSFSRSSSLIHHRRLHTGERPYECSKCGKSFKQSSSFSSHRKVHTGERPYVCGECGKSFSHSSNLKNHQRVHTGERPVECSECSKSFSCKSNLIKHLRVHTGERPYECSECGKSFSQSSSLIQHRRVHTGKRPYQCSQCGKSFGCKSVLIQHQRVHIGEKP

SEQ ID NO: 99293 - protein, 629 aa, Homo sapiens
  Payload ID: 19802
  Gene Name: zinc finger protein 211
  Uniprot ID: Q13398
  ENSP ID: ENSP00000299871
MLGFPPGRPQLPVQLRPQTRMATALRDPASVPIATEVLFKLTQGSVTFEDVAVYFSWEEWDLLDEAQKHLYFDVMLENFALTSSLGLISSWSHVVAQLGLGEVPSVLHRMFMTPASARWDQRGPGLHEWHLGKGMSSGCWCGVEHEETPSEQRISGERVPQFRTSKEGSSSQNADSCEICCLVLRDILHLAEHQGTNCGQKLHTCGKQFYISANLQQHQRQHITEAPFRSYVDTASFTQSCIVHVSEKPFTCREIRKDFLANMRFLHQDATQTGEKPNNSNKCAVAFYSGKSHHNWGKCSKAFSHIDTLVQDQRILTREGLFECSKCGKACTRRCNLIQHQKVHSEERPYECNECGKFFTYYSSFIIHQRVHTGERPYACPECGKSFSQIYSLNSHRKVHTGERPYECGECGKSFSQRSNLMQHRRVHTGERPYECSECGKSFSQNFSLIYHQRVHTGERPHECNECGKSFSRSSSLIHHRRLHTGERPYECSKCGKSFKQSSSFSSHRKVHTGERPYVCGECGKSFSHSSNLKNHQRVHTGERPVECSECSKSFSCKSNLIKHLRVHTGERPYECSECGKSFSQSSSLIQHRRVHTGKRPYQCSQCGKSFGCKSVLIQHQRVHIGEKP

SEQ ID NO: 99294 - protein, 564 aa, Homo sapiens
  Payload ID: 19802
  Gene Name: zinc finger protein 211
  Uniprot ID: Q13398
  ENSP ID: ENSP00000339562
MLGFPPGRPQLPVQLRPQTRMATALRDPASGSVTFEDVAVYFSWEEWDLLDEAQKHLYFDVMLENFALTSSLGCWCGVEHEETPSEQRISGERVPQFRTSKEGSSSQNADSCEICCLVLRDILHLAEHQGTNCGQKLHTCGKQFYISANLQQHQRQHITEAPFRSYVDTASFTQSCIVHVSEKPFTCREIRKDFLANMRFLHQDATQTGEKPNNSNKCAVAFYSGKSHHNWGKCSKAFSHIDTLVQDQRILTREGLFECSKCGKACTRRCNLIQHQKVHSEERPYECNECGKFFTYYSSFIIHQRVHTGERPYACPECGKSFSQIYSLNSHRKVHTGERPYECGECGKSFSQRSNLMQHRRVHTGERPYECSECGKSFSQNFSLIYHQRVHTGERPHECNECGKSFSRSSSLIHHRRLHTGERPYECSKCGKSFKQSSSFSSHRKVHTGERPYVCGECGKSFSHSSNLKNHQRVHTGERPVECSECSKSFSCKSNLIKHLRVHTGERPYECSECGKSFSQSSSLIQHRRVHTGKRPYQCSQCGKSFGCKSVLIQHQRVHIGEKP

SEQ ID NO: 99295 - protein, 503 aa, Homo sapiens
  Payload ID: 19802
  Gene Name: zinc finger protein 211
  Uniprot ID: Q13398
  ENSP ID: ENSP00000375584
MLENFALTSSLGCWCGVEHEETPSEQRISGERVPQFRTSKEGSSSQNADSCEICCLVLRDILHLAEHQGTNCGQKLHTCGKQFYISANLQQHQRQHITEAPFRSYVDTASFTQSCIVHVSEKPFTCREIRKDFLANMRFLHQDATQTGEKPNNSNKCAVAFYSGKSHHNWGKCSKAFSHIDTLVQDQRILTREGLFECSKCGKACTRRCNLIQHQKVHSEERPYECNECGKFFTYYSSFIIHQRVHTGERPYACPECGKSFSQIYSLNSHRKVHTGERPYECGECGKSFSQRSNLMQHRRVHTGERPYECSECGKSFSQNFSLIYHQRVHTGERPHECNECGKSFSRSSSLIHHRRLHTGERPYECSKCGKSFKQSSSFSSHRKVHTGERPYVCGECGKSFSHSSNLKNHQRVHTGERPVECSECSKSFSCKSNLIKHLRVHTGERPYECSECGKSFSQSSSLIQHRRVHTGKRPYQCSQCGKSFGCKSVLIQHQRVHIGEKP

SEQ ID NO: 99296 - protein, 568 aa, Homo sapiens
  Payload ID: 19802
  Gene Name: zinc finger protein 211
  ENSP ID: ENSP00000384436
  MOD_RES (1)..(1): Any amino acid
XISAYCNLHLLGSSDSPASASQVAGTTGMRHHAQGSVTFEDVAVYFSWEEWDLLDEAQKHLYFDVMLENFALTSSLGCWCGVEHEETPSEQRISGERVPQFRTSKEGSSSQNADSCEICCLVLRDILHLAEHQGTNCGQKLHTCGKQFYISANLQQHQRQHITEAPFRSYVDTASFTQSCIVHVSEKPFTCREIRKDFLANMRFLHQDATQTGEKPNNSNKCAVAFYSGKSHHNWGKCSKAFSHIDTLVQDQRILTREGLFECSKCGKACTRRCNLIQHQKVHSEERPYECNECGKFFTYYSSFIIHQRVHTGERPYACPECGKSFSQIYSLNSHRKVHTGERPYECGECGKSFSQRSNLMQHRRVHTGERPYECSECGKSFSQNFSLIYHQRVHTGERPHECNECGKSFSRSSSLIHHRRLHTGERPYECSKCGKSFKQSSSFSSHRKVHTGERPYVCGECGKSFSHSSNLKNHQRVHTGERPVECSECSKSFSCKSNLIKHLRVHTGERPYECSECGKSFSQSSSLIQHRRVHTGKRPYQCSQCGKSFGCKSVLIQHQRVHIGEKP

SEQ ID NO: 99297 - protein, 38 aa, Homo sapiens
  Payload ID: 19802
  Gene Name: zinc finger protein 211
  ENSP ID: ENSP00000440793
MLGFPPGRPQLPVQLRPQTRMATALRDPASAVQWKKRL

SEQ ID NO: 99298 - protein, 616 aa, Homo sapiens
  Payload ID: 19802
  Gene Name: zinc finger protein 211
  ENSP ID: ENSP00000442601
MLGFPPGRPQLPVQLRPQTRMATALRDPASGSVTFEDVAVYFSWEEWDLLDEAQKHLYFDVMLENFALTSSLGLISSWSHVVAQLGLGEVPSVLHRMFMTPASARWDQRGPGLHEWHLGKGMSSGCWCGVEHEETPSEQRISGERVPQFRTSKEGSSSQNADSCEICCLVLRDILHLAEHQGTNCGQKLHTCGKQFYISANLQQHQRQHITEAPFRSYVDTASFTQSCIVHVSEKPFTCREIRKDFLANMRFLHQDATQTGEKPNNSNKCAVAFYSGKSHHNWGKCSKAFSHIDTLVQDQRILTREGLFECSKCGKACTRRCNLIQHQKVHSEERPYECNECGKFFTYYSSFIIHQRVHTGERPYACPECGKSFSQIYSLNSHRKVHTGERPYECGECGKSFSQRSNLMQHRRVHTGERPYECSECGKSFSQNFSLIYHQRVHTGERPHECNECGKSFSRSSSLIHHRRLHTGERPYECSKCGKSFKQSSSFSSHRKVHTGERPYVCGECGKSFSHSSNLKNHQRVHTGERPVECSECSKSFSCKSNLIKHLRVHTGERPYECSECGKSFSQSSSLIQHRRVHTGKRPYQCSQCGKSFGCKSVLIQHQRVHIGEKP

SEQ ID NO: 99299 - protein, 45 aa, Homo sapiens
  Payload ID: 19802
  Gene Name: zinc finger protein 211
  ENSP ID: ENSP00000442740
MLGFPPGRPQLPVQLRPQTRMATALRDPASGRGSHRELAQTRDTI

SEQ ID NO: 99300 - protein, 495 aa, Homo sapiens
  Payload ID: 19803
  Gene Name: zinc finger protein 212
  Uniprot ID: Q9UDV6
  ENSP ID: ENSP00000338572
MAESAPARHRRKRRSTPLTSSTLPSQATEKSSYFQTTEISLWTVVAAIQAVEKKMESQAARLQSLEGRTGTAEKKLADCEKMAVEFGNQLEGKWAVLGTLLQEYGLLQRRLENVENLLRNRNFWILRLPPGSKGEAPKVSRSLENDGVCFTEQEWENLEDWQKELYRNVMESNYETLVSLKVLGQTEGEAELGTEMLGDLEEEGPGGAHPAGGVMIKQELQYTQEGPADLPGEFSCIAEEQAFLSPEQTELWGGQGSSVLLETGPGDSTLEEPVGSRVPSSSRTVGCPKQKSHRQVQLDQECGQGLKLKKDTSRPYECSECEITFRYKQQLATHLRSHSGWGSCTPEEPEESLRPRPRLKPQTKKAKLHQCDVCLRSFSCKVSLVTHQRCHLQEGPSAGQHVQERFSPNSLVALPGHIPWRKSRSSLICGYCGKSFSHPSDLVRHQRIHTGERPYSCTECEKSFVQKQHLLQHQKIHQRERGGLALEPGRPNGLL

SEQ ID NO: 99301 - protein, 50 aa, Homo sapiens
  Payload ID: 19803
  Gene Name: zinc finger protein 212
  ENSP ID: ENSP00000418167
MAESAPARVKRHRRAGSRARWGWRSPLPGAGLRGLDAAGVLVSRGCRWRG

SEQ ID NO: 99302 - protein, 50 aa, Homo sapiens; identical to SEQ ID NO: 99301
  Payload ID: 19803
  Gene Name: zinc finger protein 212
  ENSP ID: ENSP00000418281

SEQ ID NO: 99303 - protein, 69 aa, Homo sapiens
  Payload ID: 19803
  Gene Name: zinc finger protein 212
  ENSP ID: ENSP00000419261
  MOD_RES (1)..(1): Any amino acid
XCFTEQEWENLEDWQKELYRNVMESNYETLVSLKSCSIAQAGVQWHNLGSLQPLPHRFKRFSCLSLSSS

SEQ ID NO: 99304 - protein, 194 aa, Homo sapiens
  Payload ID: 19803
  Gene Name: zinc finger protein 212
  ENSP ID: ENSP00000419419
  MOD_RES (1)..(1): Any amino acid
XYGLLQRRLENVENLLRNRNFWILRLPPGSKGEAPKVSRSLENDGVCFTEQEWENLEDWQKELYRNVMESNYETLVSLSSSDSPASASRVAEITEVLGQTEGEAELGTEMLGDLEEEGPGGAHPAGGVMIKQELQYTQEGPADLPGEFSCIAEEQAFLSPEQTELWGGQGSSVLLETGPGDSTLEEPVGSRVPS

SEQ ID NO: 99305 - protein, 459 aa, Homo sapiens
  Payload ID: 19804
  Gene Name: zinc finger protein 213
  Uniprot ID: O14771
  ENSP ID: ENSP00000380087
MAAPLEAQDQAPGEGEGLLIVKVEDSSWEQESAQHEDGRDSEACRQRFRQFCYGDVHGPHEAFSQLWELCCRWLRPELRTKEQILELLVLEQFLTVLPGEIQGWVREQHPGSGEEAVALVEDLQKQPVKAWRQDVPSEEAEPEAAGRGSQATGPPPTVGARRRPSVPQEQHSHSAQPPALLKEGRPGETTDTCFVSGVHGPVALGDIPFYFSREEWGTLDPAQRDLFWDIKRENSRNTTLGFGLKGQSEKSLLQEMVPVVPGQTGSDVTVSWSPEEAEAWESENRPRAALGPVVGARRGRPPTRRRQFRDLAAEKPHSCGQCGKRFRWGSDLARHQRTHTGEKPHKCPECDKSFRSSSDLVRHQGVHTGEKPFSCSECGKSFSRSAYLADHQRIHTGEKPFGCSDCGKSFSLRSYLLDHRRVHTGERPFGCGECDKSFKQRAHLIAHQSLHAKMAQPVG

SEQ ID NO: 99306 - protein, 459 aa, Homo sapiens; identical to SEQ ID NO: 99305
  Payload ID: 19804
  Gene Name: zinc finger protein 213
  Uniprot ID: O14771
  ENSP ID: ENSP00000403892

SEQ ID NO: 99307 - protein, 459 aa, Homo sapiens; identical to SEQ ID NO: 99305
  Payload ID: 19804
  Gene Name: zinc finger protein 213
  Uniprot ID: O14771
  ENSP ID: ENSP00000459177

SEQ ID NO: 99308 - protein, 182 aa, Homo sapiens
  Payload ID: 19804
  Gene Name: zinc finger protein 213
  ENSP ID: ENSP00000459233
EACRQRFRQFCYGDVHGPHEAFSQLWELCCRWLRPELRTKEQILELLVLEQFLTVLPGEIQGWVREQHPGSGEEAVALVEDLQKQPVKAWRQDVPSEEAEPEAAGRGSQATGPPPTVGARRRPSVPQEQHSHSGTCGIGRHPILFLPGRMGHPGPCSAGSLLGHKAGELPEHHPGFWAQRPK

SEQ ID NO: 99309 - protein, 270 aa, Homo sapiens
  Payload ID: 19804
  Gene Name: zinc finger protein 213
  ENSP ID: ENSP00000459293
QKQPVKAWRQDVPSEEAEPEAAGRGSQATGPPPTVGARRRPSVPQEQHSHSGFGLKGQSEKSLLQEMVPVVPGQTGSDVTVSWSPEEAEAWESENRPRAALGPVVGARRGRPPTRRRQFRDLAAEKPHSCGQCGKRFRWGSDLARHQRTHTGEKPHKCPECDKSFRSSSDLVRHQGVHTGEKPFSCSECGKSFSRSAYLADHQRIHTGEKPFGCSDCGKSFSLRSYLLDHRRVHTGERPFGCGECDKSFKQRAHLIAHQSLHAKMAQPVG

SEQ ID NO: 99310 - protein, 51 aa, Homo sapiens
  Payload ID: 19804
  Gene Name: zinc finger protein 213
  ENSP ID: ENSP00000459967
MAAPLEAQDQAPGEGEGLLIVKVEDSSWEQESAQHEDGRDSEACRQRFRQF

SEQ ID NO: 99311 - protein, 459 aa, Homo sapiens; identical to SEQ ID NO: 99305
  Payload ID: 19804
  Gene Name: zinc finger protein 213
  Uniprot ID: O14771
  ENSP ID: ENSP00000460157

SEQ ID NO: 99312 - protein, 145 aa, Homo sapiens
  Payload ID: 19804
  Gene Name: zinc finger protein 213
  ENSP ID: ENSP00000461024
MAAPLEAQDQAPGEGEGLLIVKVEDSSWEQESAQHEDGRDSEACRQRFRQFCYGDVHGPHEAFSQLWELCCRWLRPELRTKEQILELLVLEQFLTVLPGEIQGWVREQHPGSGEEAVALVEDLQKQPVKAWRQGVNSVSPGLVSG

SEQ ID NO: 99313 - protein, 606 aa, Homo sapiens
  Payload ID: 19805
  Gene Name: zinc finger protein 214
  Uniprot ID: Q9UL59
  ENSP ID: ENSP00000278314
MAVTFEDVTIIFTWEEWKFLDSSQKRLYREVMWENYTNVMSVENWNESYKSQEEKFRYLEYENFSYWQGWWNAGAQMYENQNYGETVQGTDSKDLTQQDRSQCQEWLILSTQVPGYGNYELTFESKSLRNLKYKNFMPWQSLETKTTQDYGREIYMSGSHGFQGGRYRLGISRKNLSMEKEQKLIVQHSYIPVEEALPQYVGVICQEDLLRDSMEEKYCGCNKCKGIYYWNSRCVFHKRNQPGENLCQCSICKACFSQRSDLYRHPRNHIGKKLYGCDEVDGNFHQSSGVHFHQRVHIGEVPYSCNACGKSFSQISSLHNHQRVHTEEKFYKIECDKDLSRNSLLHIHQRLHIGEKPFKCNQCGKSFNRSSVLHVHQRVHTGEKPYKCDECGKGFSQSSNLRIHQLVHTGEKSYKCEDCGKGFTQRSNLQIHQRVHTGEKPYKCDDCGKDFSHSSDLRIHQRVHTGEKPYTCPECGKGFSKSSKLHTHQRVHTGEKPYKCEECGKGFSQRSHLLIHQRVHTGEKPYKCHDCGKGFSHSSNLHIHQRVHTGEKPYQCAKCGKGFSHSSALRIHQRVHAGEKPYKCREYYKGFDHNSHLHNNHRRGNL

SEQ ID NO: 99314 - protein, 606 aa, Homo sapiens; identical to SEQ ID NO: 99313
  Payload ID: 19805
  Gene Name: zinc finger protein 214
  Uniprot ID: Q9UL59
  ENSP ID: ENSP00000445373

SEQ ID NO: 99315 - protein, 517 aa, Homo sapiens
  Payload ID: 19806
  Gene Name: zinc finger protein 215
  Uniprot ID: Q9UL58
  ENSP ID: ENSP00000278319
MQPLSKLMAISKPRNLSLREQREVLRADMSWQQETNPVVETHDSEASRQKFRHFQYLKVSGPHEALSQLWELCLQWLRPEIHTKKQIIELLVLEQFLAILPEEVRTWVNLQHPNNSKDMVTLIEDVIEMLEDEDMPCKDSALQMGSIKEKMKAGSRTGKPQEPVTFKDVVVEFSKEEWGQLDSAVKNLYRNVMLENFRNLNSLRKAHLLSKPFESLKLESKKKRWIMEKEIPRKTIFDMKSISGEESSHGVIMTRLTESGHPSSDAWKGENWLYRNQKKWDINLPQEAFIPETIYTEEEDFECSENKKSFDINSVSSICAIQVGIPSRKGSPKCDKFKTYFKFNLDSVGKQHSEYEYGNDLSLSTDIRHQKSHTTMNSYECYQCGKAFCRSSSLIRHQIIHTGEKPYKCSECGRFFNRRTNLTKHQKLHAEAKACTSNKCGKAFSKSEDSNNPTLHFGNNFYQCVNCGKSFNRSSSLIRHQMIHTGEKPFKCKECSKAFNRSSNLVKHQKLHTRDKS

SEQ ID NO: 99316 - protein, 517 aa, Homo sapiens; identical to SEQ ID NO: 99315
  Payload ID: 19806
  Gene Name: zinc finger protein 215
  Uniprot ID: Q9UL58
  ENSP ID: ENSP00000393202

SEQ ID NO: 99317 - protein, 304 aa, Homo sapiens
  Payload ID: 19806
  Gene Name: zinc finger protein 215
  Uniprot ID: Q9UL58
  ENSP ID: ENSP00000432306
MQPLSKLMAISKPRNLSLREQREVLRADMSWQQETNPVVETHDSEASRQKFRHFQYLKVSGPHEALSQLWELCLQWLRPEIHTKKQIIELLVLEQFLAILPEEVRTWVNLQHPNNSKDMVTLIEDVIEMLEDEDMPCKDSALQMGSIKEKMKAGSRTGKPQEPVTFKDVVVEFSKEEWGQLDSAVKNLYRNVMLENFRNLNSLRKAHLLSKPFESLKLESKKKRWIMEKEIPRKTIFDMKSISGEESSHGVIMTRLTESGHPSSDAWKDGVSLLLPRLEYNDAVSAHCNLHLWVQVILLPQPPE

SEQ ID NO: 99318 - protein, 304 aa, Homo sapiens; identical to SEQ ID NO: 99317
  Payload ID: 19806
  Gene Name: zinc finger protein 215
  Uniprot ID: Q9UL58
  ENSP ID: ENSP00000484674

SEQ ID NO: 99319 - protein, 1048 aa, Homo sapiens
  Payload ID: 19807
  Gene Name: zinc finger protein 217
  Uniprot ID: O75362
  ENSP ID: ENSP00000304308
MQSKVTGNMPTQSLLMYMDGPEVIGSSLGSPMEMEDALSMKGTAVVPFRATQEKNVIQIEGYMPLDCMFCSQTFTHSEDLNKHVLMQHRPTLCEPAVLRVEAEYLSPLDKSQVRTEPPKEKNCKENEFSCEVCGQTFRVAFDVEIHMRTHKDSFTYGCNMCGRRFKEPWFLKNHMRTHNGKSGARSKLQQGLESSPATINEVVQVHAAESISSPYKICMVCGFLFPNKESLIEHRKVHTKKTAFGTSSAQTDSPQGGMPSSREDFLQLFNLRPKSHPETGKKPVRCIPQLDPFTTFQAWQLATKGKVAICQEVKESGQEGSTDNDDSSSEKELGETNKGSCAGLSQEKEKCKHSHGEAPSVDADPKLPSSKEKPTHCSECGKAFRTYHQLVLHSRVHKKDRRAGAESPTMSVDGRQPGTCSPDLAAPLDENGAVDRGEGGSEDGSEDGLPEGIHLDKNDDGGKIKHLTSSRECSYCGKFFRSNYYLNIHLRTHTGEKPYKCEFCEYAAAQKTSLRYHLERHHKEKQTDVAAEVKNDGKNQDTEDALLTADSAQTKNLKRFFDGAKDVTGSPPAKQLKEMPSVFQNVLGSAVLSPAHKDTQDFHKNAADDSADKVNKNPTPAYLDLLKKRSAVETQANNLICRTKADVTPPPDGSTTHNLEVSPKEKQTETAADCRYRPSVDCHEKPLNLSVGALHNCPAISLSKSLIPSITCPFCTFKTFYPEVLMMHQRLEHKYNPDVHKNCRNKSLLRSRRTGCPPALLGKDVPPLSSFCKPKPKSAFPAQSKSLPSAKGKQSPPGPGKAPLTSGIDSSTLAPSNLKSHRPQQNVGVQGAATRQQQSEMFPKTSVSPAPDKTKRPETKLKPLPVAPSQPTLGSSNINGSIDYPAKNDSPWAPPGRDYFCNRSASNTAAEFGEPLPKRLKSSVVALDVDQPGANYRRGYDLPKYHMVRGITSLLPQDCVYPSQALPPKPRFLSSSEVDSPNVLTVQKPYGGSGPLYTCVPAGSPASSSTLEGKRPVSYQHLSNSMAQKRNYENFIGNAHYRPNDKKT

SEQ ID NO: 99320 - protein, 1048 aa, Homo sapiens; identical to SEQ ID NO: 99319
  Payload ID: 19807
  Gene Name: zinc finger protein 217
  Uniprot ID: O75362
  ENSP ID: ENSP00000360526

SEQ ID NO: 99321 - protein, 149 aa, Homo sapiens
  Payload ID: 19807
  Gene Name: zinc finger protein 217
  ENSP ID: ENSP00000394010
GEPLPKRLKSSVVALDVDQPGANYRRGYDLPKYHMVRGITSLLPQDCVYPSQALPPKPRFLSSSEVDSPNVLTVQKPYGGSGPLYTCVPAGSPASSSTLEGLGGCQCLLPMKLNFTSSFEKRMVKATEISCDCTVHKTYEESARNTTVV

SEQ ID NO: 99322 - protein, 95 aa, Homo sapiens
  Payload ID: 19807
  Gene Name: zinc finger protein 217
  ENSP ID: ENSP00000399672
MQSKVTGNMPTQSLLMYMDGPEVIGSSLGSPMEMEDALSMKGTAVVPFRATQEKNVIQIEGYMPLDCMFCSQTFTHSEDLNKHVLMQHRPTLCEP

SEQ ID NO: 99323 - protein, 722 aa, Homo sapiens
  Payload ID: 19808
  Gene Name: zinc finger protein 219
  Uniprot ID: Q9P2Y4
  ENSP ID: ENSP00000354206
MEGSRPRAPSGHLAPSPPAFDGELDLQRYSNGPAVSAGSLGMGAVSWSESRAGERRFPCPVCGKRFRFNSILALHLRAHPGAQAFQCPHCGHRAAQRALLRSHLRTHQPERPRSPAARLLLELEERALLREARLGRARSSGGMQATPATEGLARPQAPSSSAFRCPYCKGKFRTSAERERHLHILHRPWKCGLCSFGSSQEEELLHHSLTAHGAPERPLAATSAAPPPQPQPQPPPQPEPRSVPQPEPEPEPEREATPTPAPAAPEEPPAPPEFRCQVCGQSFTQSWFLKGHMRKHKASFDHACPVCGRCFKEPWFLKNHMKVHASKLGPLRAPGPASGPARAPQPPDLGLLAYEPLGPALLLAPAPTPAERREPPSLLGYLSLRAGEGRPNGEGAEPGPGRSFGGFRPLSSALPARARRHRAEEPEEEEEVVEAEEETWARGRSLGSLASLHPRPGEGPGHSASAAGAQARSTATQEENGLLVGGTRPEGGRGATGKDCPFCGKSFRSAHHLKVHLRVHTGERPYKCPHCDYAGTQSGSLKYHLQRHHREQRSGAGPGPPPEPPPPSQRGSAPQSGAKPSPQPATWVEGASSPRPPSSGAGPGSRRKPASPGRTLRNGRGGEAEPLDLSLRAGPGGEAGPGGALHRCLFCPFATGAPELMALHLQVHHSRRARGRRPPQADASPPYARVPSGETPPSPSQEGEEGSGLSRPGEAGLGGQER

SEQ ID NO: 99324 - protein, 722 aa, Homo sapiens; identical to SEQ ID NO: 99323
  Payload ID: 19808
  Gene Name: zinc finger protein 219
  Uniprot ID: Q9P2Y4
  ENSP ID: ENSP00000388558

SEQ ID NO: 99325 - protein, 722 aa, Homo sapiens; identical to SEQ ID NO: 99323
  Payload ID: 19808
  Gene Name: zinc finger protein 219
  Uniprot ID: Q9P2Y4
  ENSP ID: ENSP00000392401

SEQ ID NO: 99326 - protein, 111 aa, Homo sapiens
  Payload ID: 19808
  Gene Name: zinc finger protein 219
  ENSP ID: ENSP00000450609
MEGSRPRAPSGHLAPSPPAFDGELDLQRYSNGPAVSAGSLGMGAVSWSESRAGERRFPCPVCGKRFRFNSILALHLRAHPGAQAFQCPHCGHRAAQRALLRSHLRTHQPER

SEQ ID NO: 99327 - protein, 211 aa, Homo sapiens
  Payload ID: 19808
  Gene Name: zinc finger protein 219
  ENSP ID: ENSP00000450803
MEGSRPRAPSGHLAPSPPAFDGELDLQRYSNGPAVSAGSLGMGAVSWSESRAGERRFPCPVCGKRFRFNSILALHLRAHPGAQAFQCPHCGHRAAQRALLRSHLRTHQPERPRSPAARLLLELEERALLREARLGRARSSGGMQATPATEGLARPQAPSSSAFRCPYCKGKFRTSAERERHLHILHRPWKCGLCSFGSSQEEELLHHSLTA

SEQ ID NO: 99328 - protein, 107 aa, Homo sapiens
  Payload ID: 19808
  Gene Name: zinc finger protein 219
  ENSP ID: ENSP00000450900
MEGSRPRAPSGHLAPSPPAFDGELDLQRYSNGPAVSAGSLGMGAVSWSESRAGERRFPCPVCGKRFRFNSILALHLRAHPGAQAFQCPHCGHRAAQRALLRSHLRTH

SEQ ID NO: 99329 - protein, 158 aa, Homo sapiens
  Payload ID: 19808
  Gene Name: zinc finger protein 219
  ENSP ID: ENSP00000451212
MLGQKERQSQLLPCSTAPVAFISSFSSSSLHFPEPKNVKGVHGDLSPQGSRPRAPSGHLAPSPPAFDGELDLQRYSNGPAVSAGSLGMGAVSWSESRAGERRFPCPVCGKRFRFNSILALHLRAHPGAQAFQCPHCGHRAAQRALLRSHLRTHQPERP

SEQ ID NO: 99330 - protein, 31 aa, Homo sapiens
  Payload ID: 19808
  Gene Name: zinc finger protein 219
  ENSP ID: ENSP00000451595
MEGSRPRAPSGHLAPSPPAFDGELDLQRYSN

SEQ ID NO: 99331 - protein, 145 aa, Homo sapiens
  Payload ID: 19808
  Gene Name: zinc finger protein 219
  ENSP ID: ENSP00000451890
MNPIRSTAPVAFISSFSSSSLHFPEPKNVKGVHGDLSPQGSRPRAPSGHLAPSPPAFDGELDLQRYSNGPAVSAGSLGMGAVSWSESRAGERRFPCPVCGKRFRFNSILALHLRAHPGAQAFQCPHCGHRAAQRALLRSHLRTHQ

SEQ ID NO: 99332 - protein, 57 aa, Homo sapiens
  Payload ID: 19808
  Gene Name: zinc finger protein 219
  ENSP ID: ENSP00000451969
MGAVSWSESRAGERRFPCPVCGKRFRFNSILALHLRAHPGAQAFQCPHCGHRAAQRA

SEQ ID NO: 99333 - protein, 224 aa, Homo sapiens
  Payload ID: 19809
  Gene Name: zinc finger protein 22
  Uniprot ID: P17026
  ENSP ID: ENSP00000298299
MRLAKPKAGISRSSSQGKAYENKRKTGRQRQKWGMTIRFDSSFSRLRRSLDDKPYKCTECEKSFSQSSTLFQHQKIHTGKKSHKCADCGKSFFQSSNLIQHRRIHTGEKPYKCDECGESFKQSSNLIQHQRIHTGEKPYQCDECGRCFSQSSHLIQHQRTHTGEKPYQCSECGKCFSQSSHLRQHMKVHKEEKPRKTRGKNIRVKTHLPSWKAGTGRKSVAGLR

SEQ ID NO: 99334 - protein, 617 aa, Homo sapiens
  Payload ID: 19810
  Gene Name: zinc finger protein 221
  ENSP ID: ENSP00000251269
MISPSLELLHSGLCKFPEVEGKMTTFKEAVTFKDVAVVFTEEELGLLDPAQRKLYRDVMLENFRNLLSVGNQPFHQDTFHFLGKEKFWKMKTTSQREGNSGGKIQIEMETVPEAGPHEEWSCQQIWEQIASDLTRSQNSIRNSSQFFKEGDVPCQIEARLSISHVQQKPYRCNECKQSFSDVSVFDLHQQSHSGEKSHTCGECGKSFCYSPALHIHQRVHMGEKCYKCDVCGKEFNQSSHLQTHQRVHTGEKPFKCGQCGKGFHSRSALNVHCKLHTGEKPYNCEECGKAFIHDSQLQEHQRIHTGEKPFKCDICGKSFRVRSRLNRHSMVHTGEKPFRCDTCGKNFRQRSALNSHSMVHIEEKPYKCEQCGKGFICRRDFCKHQMVHTGEKPYNCKECGKTFRWSSCLLNHQQVHSGQKSFKCEECGKGFYTNSRRSSHQRSHNGEKPYNCEECGKDYKRRLDLEFHQRVHTGERPYNCKECGKSFGWASCLLKHQRLHSGEKPFKCEECGKRFTQSSQLHSHQTCHTGEKLYKCEQCEKGYNSKFNLDMHQRVHGGERPYNCKECGKSFGWASCLLKHQRLHSGEKPLKSGVWEEIYSEFTASFTSVSLCGRKAI

SEQ ID NO: 99335 - protein, 130 aa, Homo sapiens
  Payload ID: 19810
  Gene Name: zinc finger protein 221
  ENSP ID: ENSP00000464885
MISPSLELLHSGLCKFPEVEGKMTTFKEAVTFKDVAVVFTEEELGLLDPAQRKLYRDVMLENFRNLLSVGNQPFHQDTFHFLGKEKFWKMKTTSQREGNSGGKIQIEMETVPEAGPHEEWSCQQIWEQIA

SEQ ID NO: 99336 - protein, 617 aa, Homo sapiens; identical to SEQ ID NO: 99334
  Payload ID: 19810
  Gene Name: zinc finger protein 221
  ENSP ID: ENSP00000467367

SEQ ID NO: 99337 - protein, 617 aa, Homo sapiens; identical to SEQ ID NO: 99334
  Payload ID: 19810
  Gene Name: zinc finger protein 221
  ENSP ID: ENSP00000467446

SEQ ID NO: 99338 - protein, 617 aa, Homo sapiens; identical to SEQ ID NO: 99334
  Payload ID: 19810
  Gene Name: zinc finger protein 221
  ENSP ID: ENSP00000477876

SEQ ID NO: 99339 - protein, 451 aa, Homo sapiens
  Payload ID: 19811
  Gene Name: zinc finger protein 222
  Uniprot ID: Q9UK12
  ENSP ID: ENSP00000187879
MAKLYEAVTFKDVAVIFTEEELGLLDPAQRKLYRDVMLENFRNLLSVGGKIQTEMETVPEAGTHEEFSCKQIWEQIASDLTRSQDTTISNSQLFEQDDNPSQIKARLSTVHTREKPFQGENCKQFFSDVSFFDLPQQLYSGEKSHTCDECGKSFCYISALHIHQRVHMGVKCYKCDVCGKEFSQSSRLQTHQRVHTGEKPFKCEQCGKGFRCRSALKVHCKLHMREKPYNCEKCGKAFMHNFQLQKHHRIHTGEKPFKCEICGKSFCLRSSLNRHCMVHTAEKLYKSEKYGRGFIDRLDLHKHQMIHMGQKPYNCKECGKSFKWSSYLLVHQRVHTGEKPYKCEECGKGYISKSGLDFHHRTHTGERSYNCDNCGKSFRHASSILNHKKLHCQRKPLKCEDCGKRLVCRSYCKDQQRDHSGENPSKCEDCGKRYKRRLNLDIILSLFLNDI

SEQ ID NO: 99340 - protein, 491 aa, Homo sapiens
  Payload ID: 19811
  Gene Name: zinc finger protein 222
  Uniprot ID: Q9UK12
  ENSP ID: ENSP00000375822
MIDSGEKKPGRRAEEAVTFKDVAVIFTEEELGLLDPAQRKLYRDVMLENFRNLLSVGHQPFHGDTFHFLREEKFWVMGTTSQREGNLGGKIQTEMETVPEAGTHEEFSCKQIWEQIASDLTRSQDTTISNSQLFEQDDNPSQIKARLSTVHTREKPFQGENCKQFFSDVSFFDLPQQLYSGEKSHTCDECGKSFCYISALHIHQRVHMGVKCYKCDVCGKEFSQSSRLQTHQRVHTGEKPFKCEQCGKGFRCRSALKVHCKLHMREKPYNCEKCGKAFMHNFQLQKHHRIHTGEKPFKCEICGKSFCLRSSLNRHCMVHTAEKLYKSEKYGRGFIDRLDLHKHQMIHMGQKPYNCKECGKSFKWSSYLLVHQRVHTGEKPYKCEECGKGYISKSGLDFHHRTHTGERSYNCDNCGKSFRHASSILNHKKLHCQRKPLKCEDCGKRLVCRSYCKDQQRDHSGENPSKCEDCGKRYKRRLNLDIILSLFLNDI

SEQ ID NO: 99341 - protein, 90 aa, Homo sapiens
  Payload ID: 19811
  Gene Name: zinc finger protein 222
  ENSP ID: ENSP00000466778
MIDSGEKKPGRRAEEAVTFKDVAVIFTEEELGLLDPAQRKLYRDVMLENFRNLLSVGHQPFHGDTFHFLREEKFWVMGTTSQREGNLGPL

SEQ ID NO: 99342 - protein, 482 aa, Homo sapiens
  Payload ID: 19812
  Gene Name: zinc finger protein 223
  Uniprot ID: Q9UK11
  ENSP ID: ENSP00000401947
MTMSKEAVTFKDVAVVFTEEELGLLDLAQRKLYRDVMLENFRNLLSVGHQPFHRDTFHFLREEKFWMMDIATQREGNSGGKIQPEMKTFPEAGPHEGWSCQQIWEEIASDLTRPQDSTIKSSQFFEQGDAHSQVEEGLSIMHTGQKPSNCGKCKQSFSDMSIFDLPQQIRSAEKSHSCDECGKSFCYISALHIHQRVHLGEKLFKCDVCGKEFSQSLHLQTHQRVHTGEKPFKCEQCGRGFRCRSALTVHCKLHMGEKHYNCEACGRAFIHDFQLQKHQRIHTGEKPFKCEICSVSFRLRSSLNRHCVVHTGKKPNSTGEYGKGFIRRLDLCKHQTIHTGEKPYNCKECGKSFRRSSYLLIHQRVHTGEKPYKCDKCGKSYITKSGLDLHHRAHTGERPYNCDDCGKSFRQASSILNHKRLHCRKKPFKCEDCGKKLVYRSYRKDQQKNHSGENPSKCEDCGKRYKRRLNLDIILSLFLNDT

SEQ ID NO: 99343 - protein, 89 aa, Homo sapiens
  Payload ID: 19812
  Gene Name: zinc finger protein 223
  ENSP ID: ENSP00000467561
MTMSKEAVTFKDVAVVFTEEELGLLDLAQRKLYRDVMLENFRNLLSVGHQPFHRDTFHFLREEKFWMMDIATQREGNSGKKHATVCPCL

SEQ ID NO: 99344 - protein, 222 aa, Homo sapiens
  Payload ID: 19812
  Gene Name: zinc finger protein 223
  ENSP ID: ENSP00000467647
MLENFRNLLSVGHQPFHRDTFHFLREEKFWMMDIATQREGNSGGKIQPEMKTFPEAGPHEGWSCQQIWEEIASDLTRPQDSTIKSSQFFEQGDAHSQVEEGLSIMHTGQKPSNCGKCKQSFSDMSIFDLPQQIRSAEKSHSCDECGKSFCYISALHIHQRVHLGEKLFKCDVCGKEFSQSLHLQTHQRVHTGEKPFKCEQCGRGFRCRSALTVHCKLHMGEK

SEQ ID NO: 99345 - protein, 92 aa, Homo sapiens
  Payload ID: 19812
  Gene Name: zinc finger protein 223
  ENSP ID: ENSP00000468129
MTMSKEAVTFKDVAVVFTEEELGLLDLAQRKLYRDVMLENFRNLLSVGHQPFHRDTFHFLREEKFWMMDIATQREGNSGGSVQASKCRNRSK

SEQ ID NO: 99346 - protein, 707 aa, Homo sapiens
  Payload ID: 19813
  Gene Name: zinc finger protein 224
  Uniprot ID: Q9NZL3
  ENSP ID: ENSP00000337368
MTTFKEAMTFKDVAVVFTEEELGLLDLAQRKLYRDVMLENFRNLLSVGHQAFHRDTFHFLREEKIWMMKTAIQREGNSGDKIQTEMETVSEAGTHQEWSFQQIWEKIASDLTRSQDLMINSSQFSKEGDFPCQTEAGLSVIHTRQKSSQGNGYKPSFSDVSHFDFHQQLHSGEKSHTCDECGKNFCYISALRIHQRVHMGEKCYKCDVCGKEFSQSSHLQTHQRVHTGEKPFKCVECGKGFSRRSALNVHHKLHTGEKPYNCEECGKAFIHDSQLQEHQRIHTGEKPFKCDICGKSFCGRSRLNRHSMVHTAEKPFRCDTCDKSFRQRSALNSHRMIHTGEKPYKCEECGKGFICRRDLYTHHMVHTGEKPYNCKECGKSFRWASCLLKHQRVHSGEKPFKCEECGKGFYTNSQCYSHQRSHSGEKPYKCVECGKGYKRRLDLDFHQRVHTGEKLYNCKECGKSFSRAPCLLKHERLHSGEKPFQCEECGKRFTQNSHLHSHQRVHTGEKPYKCEKCGKGYNSKFNLDMHQKVHTGERPYNCKECGKSFGWASCLLKHQRLHSGEKPFKCEECGKRFTQNSQLHSHQRVHTGEKPYKCDECGKGFSWSSTRLTHQRRHSRETPLKCEQHGKNIVQNSFSKVQEKVHSVEKPYKCEDCGKGYNRRLNLDMHQRVHMGEKTWKCRECDMCFSQASSLRLHQNVHVGEKP

SEQ ID NO: 99347 - protein, 66 aa, Homo sapiens
  Payload ID: 19813
  Gene Name: zinc finger protein 224
  ENSP ID: ENSP00000465000
MTTFKEAMTFKDVAVVFTEEELGLLDLAQRKLYRDVMLENFRNLLSVGHQAFHRDTFHFLREEKIW

SEQ ID NO: 99348 - protein, 53 aa, Homo sapiens
  Payload ID: 19813
  Gene Name: zinc finger protein 224
  ENSP ID: ENSP00000465886
MTTFKEAMTFKDVAVVFTEEELGLLDLAQRKLYRDVMLENFRNLLSVGHQAFH

SEQ ID NO: 99349 - protein, 124 aa, Homo sapiens
  Payload ID: 19813
  Gene Name: zinc finger protein 224
  ENSP ID: ENSP00000466961
MTTFKEAMTFKDVAVVFTEEELGLLDLAQRKLYRDVMLENFRNLLSVGHQAFHRDTFHFLREEKIWMMKTAIQREGNSGDKIQTEMETVSEAGTHQEWSFQQIWEKIASDLTRSQDLMINSSQF

SEQ ID NO: 99350 - protein, 706 aa, Homo sapiens
  Payload ID: 19814
  Gene Name: zinc finger protein 225
  Uniprot ID: Q9UK10
  ENSP ID: ENSP00000262894
MTTLKEAVTFKDVAVVFTEEELRLLDLAQRKLYREVMLENFRNLLSVGHQSLHRDTFHFLKEEKFWMMETATQREGNLGGKIQMEMETVSESGTHEGLFSHQTWEQISSDLTRFQDSMVNSFQFSKQDDMPCQVDAGLSIIHVRQKPSEGRTCKKSFSDVSVLDLHQQLQSREKSHTCDECGKSFCYSSALRIHQRVHMGEKLYNCDVCGKEFNQSSHLQIHQRIHTGEKPFKCEQCGKGFSRRSGLYVHRKLHTGVKPHICEKCGKAFIHDSQLQEHQRIHTGEKPFKCDICCKSFRSRANLNRHSMVHMREKPFRCDTCGKSFGLKSALNSHRMVHTGEKRYKCEECGKRFIYRQDLYKHQIDHTGEKPYNCKECGKSFRWASGLSRHVRVHSGETTFKCEECGKGFYTNSQRYSHQRAHSGEKPYRCEECGKGYKRRLDLDFHQRVHRGEKPYNCKECGKSFGWASCLLNHQRIHSGEKPFKCEECGKRFTQNSQLYTHRRVHSGEKPFKCEECGKRFTQNSQLYSHRRVHTGVKPYKCEECGKGFNSKFNLDMHQRVHTGERPYNCKECGKSFSRASSILNHKRLHGDEKPFKCEECGKRFTENSQLHSHQRVHTGEKPYKCEKCGKSFRWASTHLTHQRLHSREKLLQCEDCGKSIVHSSCLKDQQRDQSGEKTSKCEDCGKRYKRRLNLDTLLSLFLNDT

SEQ ID NO: 99351 - protein, 122 aa, Homo sapiens
  Payload ID: 19814
  Gene Name: zinc finger protein 225
  ENSP ID: ENSP00000466853
MTTLKEAVTFKDVAVVFTEEELRLLDLAQRKLYREVMLENFRNLLSVGHQSLHRDTFHFLKEEKFWMMETATQREGNLGGKIQMEMETVSESGTHEGLFSHQTWEQISSDLTRFQDSMVNSF

SEQ ID NO: 99352 - protein, 91 aa, Homo sapiens
  Payload ID: 19814
  Gene Name: zinc finger protein 225
  ENSP ID: ENSP00000466889
MTTLKEAVTFKDVAVVFTEEELRLLDLAQRKLYREVMLENFRNLLSVGHQSLHRDTFHFLKEEKFWMMETATQREGNLGPAFQIPIKTEGF

SEQ ID NO: 99353 - protein, 51 aa, Homo sapiens
  Payload ID: 19814
  Gene Name: zinc finger protein 225
  ENSP ID: ENSP00000468414
MTTLKEAVTFKDVAVVFTEEELRLLDLAQRKLYREVMLENFRNLLSVGHQS

SEQ ID NO: 99354 - protein, 706 aa, Homo sapiens; identical to SEQ ID NO: 99350
  Payload ID: 19814
  Gene Name: zinc finger protein 225
  Uniprot ID: Q9UK10
  ENSP ID: ENSP00000468686

SEQ ID NO: 99355 - protein, 94 aa, Homo sapiens
  Payload ID: 19815
  Gene Name: zinc finger protein 226
  Uniprot ID: Q9NYT6
  ENSP ID: ENSP00000300823
MNMFKEAVTFKDVAVAFTEEELGLLGPAQRKLYRDVMVENFRNLLSVGHPPFKQDVSPIERNEQLWIMTTATRRQGNLDTLLVKALLLYDLAQT

SEQ ID NO: 99356 - protein, 803 aa, Homo sapiens
  Payload ID: 19815
  Gene Name: zinc finger protein 226
  Uniprot ID: Q9NYT6
  ENSP ID: ENSP00000336719
MNMFKEAVTFKDVAVAFTEEELGLLGPAQRKLYRDVMVENFRNLLSVGHPPFKQDVSPIERNEQLWIMTTATRRQGNLGEKNQSKLITVQDRESEEELSCWQIWQQIANDLTRCQDSMINNSQCHKQGDFPYQVGTELSIQISEDENYIVNKADGPNNTGNPEFPILRTQDSWRKTFLTESQRLNRDQQISIKNKLCQCKKGVDPIGWISHHDGHRVHKSEKSYRPNDYEKDNMKILTFDHNSMIHTGQKSYQCNECKKPFSDLSSFDLHQQLQSGEKSLTCVERGKGFCYSPVLPVHQKVHVGEKLKCDECGKEFSQGAHLQTHQKVHVIEKPYKCKQCGKGFSRRSALNVHCKVHTAEKPYNCEECGRAFSQASHLQDHQRLHTGEKPFKCDACGKSFSRNSHLQSHQRVHTGEKPYKCEECGKGFICSSNLYIHQRVHTGEKPYKCEECGKGFSRPSSLQAHQGVHTGEKSYICTVCGKGFTLSSNLQAHQRVHTGEKPYKCNECGKSFRRNSHYQVHLVVHTGEKPYKCEICGKGFSQSSYLQIHQKAHSIEKPFKCEECGQGFNQSSRLQIHQLIHTGEKPYKCEECGKGFSRRADLKIHCRIHTGEKPYNCEECGKVFRQASNLLAHQRVHSGEKPFKCEECGKSFGRSAHLQAHQKVHTGDKPYKCDECGKGFKWSLNLDMHQRVHTGEKPYKCGECGKYFSQASSLQLHQSVHTGEKPYKCDVCGKVFSRSSQLQSHQRVHTGEKPYKCEICGKSFSWRSNLTVHHRIHVGDKSYKSNRGGKNIRESTQEKKSIK

SEQ ID NO: 99357 - protein, 803 aa, Homo sapiens; identical to SEQ ID NO: 99356
  Payload ID: 19815
  Gene Name: zinc finger protein 226
  Uniprot ID: Q9NYT6
  ENSP ID: ENSP00000393265

SEQ ID NO: 99358 - protein, 94 aa, Homo sapiens; identical to SEQ ID NO: 99355
  Payload ID: 19815
  Gene Name: zinc finger protein 226
  Uniprot ID: Q9NYT6
  ENSP ID: ENSP00000407474

SEQ ID NO: 99359 - protein, 89 aa, Homo sapiens
  Payload ID: 19815
  Gene Name: zinc finger protein 226
  ENSP ID: ENSP00000464735
MNMFKEAVTFKDVAVAFTEEELGLLGPAQRKLYRDVMVENFRNLLSVGHPPFKQDVSPIERNEQLWIMTTATRRQGNLGKNQTVMSSYS

SEQ ID NO: 99360 - protein, 114 aa, Homo sapiens
  Payload ID: 19815
  Gene Name: zinc finger protein 226
  ENSP ID: ENSP00000465043
MVENFRNLLSVGHPPFKQDVSPIERNEQLWIMTTATRRQGNLGEKNQSKLITVQDRESEEELSCWQIWQQIANDLTRCQDSMINNSQCHKQGDFPYQVGTELSIQISEDENYIV

SEQ ID NO: 99361 - protein, 803 aa, Homo sapiens; identical to SEQ ID NO: 99356
  Payload ID: 19815
  Gene Name: zinc finger protein 226
  Uniprot ID: Q9NYT6
  ENSP ID: ENSP00000465121

SEQ ID NO: 99362 - protein, 89 aa, Homo sapiens; identical to SEQ ID NO: 99359
  Payload ID: 19815
  Gene Name: zinc finger protein 226
  ENSP ID: ENSP00000465401

SEQ ID NO: 99363 - protein, 72 aa, Homo sapiens
  Payload ID: 19815
  Gene Name: zinc finger protein 226
  ENSP ID: ENSP00000465730
MNMFKEAVTFKDVAVAFTEEELGLLGPAQRKLYRDVMVENFRNLLSVGHPPFKQDVSPIERNEQLWIMTTAT

SEQ ID NO: 99364 - protein, 66 aa, Homo sapiens
  Payload ID: 19815
  Gene Name: zinc finger protein 226
  ENSP ID: ENSP00000465951
MNMFKEAVTFKDVAVAFTEEELGLLGPAQRKLYRDVMVENFRNLLSVGHPPFKQDVSPIERNEQLW

SEQ ID NO: 99365 - protein, 89 aa, Homo sapiens
  Payload ID: 19815
  Gene Name: zinc finger protein 226
  ENSP ID: ENSP00000465984
MNMFKEAVTFKDVAVAFTEEELGLLGPAQRKLYRDVMVENFRNLLSVGHPPFKQDVSPIERNEQLWIMTTATRRQGNLGEKNQSKLITV

SEQ ID NO: 99366 - protein, 139 aa, Homo sapiens
  Payload ID: 19815
  Gene Name: zinc finger protein 226
  ENSP ID: ENSP00000466141
MNMFKEAVTFKDVAVAFTEEELGLLGPAQRKLYRDVMVENFRNLLSVGHPPFKQDVSPIERNEQLWIMTTATRRQGNLGEKNQSKLITVQDRESEEELSCWQIWQQIANDLTRCQDSMINNSQCHKQGDFPYQVGTELS

SEQ ID NO: 99367 - protein, 94 aa, Homo sapiens; identical to SEQ ID NO: 99355
  Payload ID: 19815
  Gene Name: zinc finger protein 226
  Uniprot ID: Q9NYT6
  ENSP ID: ENSP00000467003

SEQ ID NO: 99368 - protein, 60 aa, Homo sapiens
  Payload ID: 19815
  Gene Name: zinc finger protein 226
  ENSP ID: ENSP00000467539
MNMFKEAVTFKDVAVAFTEEELGLLGPAQRKLYRDVMVENFRNLLSVGHPPFKQDVSPIE

SEQ ID NO: 99369 - protein, 89 aa, Homo sapiens; identical to SEQ ID NO: 99359
  Payload ID: 19815
  Gene Name: zinc finger protein 226
  ENSP ID: ENSP00000467748

SEQ ID NO: 99370 - protein, 153 aa, Homo sapiens
  Payload ID: 19815
  Gene Name: zinc finger protein 226
  ENSP ID: ENSP00000467766
MNMFKEAVTFKDVAVAFTEEELGLLGPAQRKLYRDVMVENFRNLLSVGHPPFKQDVSPIERNEQLWIMTTATRRQGNLGEKNQSKLITVQDRESEEELSCWQIWQQIANDLTRCQDSMINNSQCHKQGDFPYQVGTELSIQISEDENYIVNKA

SEQ ID NO: 99371 - protein, 27 aa, Homo sapiens
  Payload ID: 19815
  Gene Name: zinc finger protein 226
  ENSP ID: ENSP00000468462
MNMFKEAVTFKDVAVAFTEEELGLLGP

SEQ ID NO: 99372 - protein, 127 aa, Homo sapiens
  Payload ID: 19815
  Gene Name: zinc finger protein 226
  ENSP ID: ENSP00000468779
MNMFKEAVTFKDVAVAFTEEELGLLGPAQRKLYRDVMVENFRNLLSVGHPPFKQDVSPIERNEQLWIMTTATRRQGNLGEKNQSKLITVQDRESEEELSCWQIWQQIANDLTRCQDSMINNSQCHKQ

SEQ ID NO: 99373 - protein, 799 aa, Homo sapiens
  Payload ID: 19816
  Gene Name: zinc finger protein 227
  Uniprot ID: Q86WZ6
  ENSP ID: ENSP00000321049
MPSQNYDLPQKKQEKMTKFQEAVTFKDVAVVFSREELRLLDLTQRKLYRDVMVENFKNLVAVGHLPFQPDMVSQLEAEEKLWMMETETQRSSKHQNKMETLQKFALKYLSNQELSCWQIWKQVASELTRCLQGKSSQLLQGDSIQVSENENNIMNPKGDSSIYIENQEFPFWRTQHSCGNTYLSESQIQSRGKQIDVKNNLQIHEDFMKKSPFHEHIKTDTEPKPCKGNEYGKIISDGSNQKLPLGEKPHPCGECGRGFSYSPRLPLHPNVHTGEKCFSQSSHLRTHQRIHPGEKLNRCHESGDCFNKSSFHSYQSNHTGEKSYRCDSCGKGFSSSTGLIIHYRTHTGEKPYKCEECGKCFSQSSNFQCHQRVHTEEKPYKCEECGKGFGWSVNLRVHQRVHRGEKPYKCEECGKGFTQAAHFHIHQRVHTGEKPYKCDVCGKGFSHNSPLICHRRVHTGEKPYKCEACGKGFTRNTDLHIHFRVHTGEKPYKCKECGKGFSQASNLQVHQNVHTGEKRFKCETCGKGFSQSSKLQTHQRVHTGEKPYRCDVCGKDFSYSSNLKLHQVIHTGEKPYKCEECGKGFSWRSNLHAHQRVHSGEKPYKCEQCDKSFSQAIDFRVHQRVHTGEKPYKCGVCGKGFSQSSGLQSHQRVHTGEKPYKCDVCGKGFRYSSQFIYHQRGHTGEKPYKCEECGKGFGRSLNLRHHQRVHTGEKPHICEECGKAFSLPSNLRVHLGVHTREKLFKCEECGKGFSQSARLEAHQRVHTGEKPYKCDICDKDFRHRSRLTYHQKVHTGKKL

SEQ ID NO: 99374 - protein, 748 aa, Homo sapiens
  Payload ID: 19816
  Gene Name: zinc finger protein 227
  Uniprot ID: Q86WZ6
  ENSP ID: ENSP00000375823
MVENFKNLVAVGHLPFQPDMVSQLEAEEKLWMMETETQRSSKHQNKMETLQKFALKYLSNQELSCWQIWKQVASELTRCLQGKSSQLLQGDSIQVSENENNIMNPKGDSSIYIENQEFPFWRTQHSCGNTYLSESQIQSRGKQIDVKNNLQIHEDFMKKSPFHEHIKTDTEPKPCKGNEYGKIISDGSNQKLPLGEKPHPCGECGRGFSYSPRLPLHPNVHTGEKCFSQSSHLRTHQRIHPGEKLNRCHESGDCFNKSSFHSYQSNHTGEKSYRCDSCGKGFSSSTGLIIHYRTHTGEKPYKCEECGKCFSQSSNFQCHQRVHTEEKPYKCEECGKGFGWSVNLRVHQRVHRGEKPYKCEECGKGFTQAAHFHIHQRVHTGEKPYKCDVCGKGFSHNSPLICHRRVHTGEKPYKCEACGKGFTRNTDLHIHFRVHTGEKPYKCKECGKGFSQASNLQVHQNVHTGEKRFKCETCGKGFSQSSKLQTHQRVHTGEKPYRCDVCGKDFSYSSNLKLHQVIHTGEKPYKCEECGKGFSWRSNLHAHQRVHSGEKPYKCEQCDKSFSQAIDFRVHQRVHTGEKPYKCGVCGKGFSQSSGLQSHQRVHTGEKPYKCDVCGKGFRYSSQFIYHQRGHTGEKPYKCEECGKGFGRSLNLRHHQRVHTGEKPHICEECGKAFSLPSNLRVHLGVHTREKLFKCEECGKGFSQSARLEAHQRVHTGEKPYKCDICDKDFRHRSRLTYHQKVHTGKKL

SEQ ID NO: 99375 - protein, 82 aa, Homo sapiens
  Payload ID: 19816
  Gene Name: zinc finger protein 227
  ENSP ID: ENSP00000464800
MPSQNYDLPQKKQEKMTKFQEAVTFKDVAVVFSREELRLLDLTQRKLYRDVMVENFKNLVAVGHLPFQPDMVSQLEAEEKLW

SEQ ID NO: 99376 - protein, 96 aa, Homo sapiens
  Payload ID: 19816
  Gene Name: zinc finger protein 227
  ENSP ID: ENSP00000464866
MVENFKNLVAVGSKHQNKMETLQKFALKYLSNQELSCWQIWKQVASELTRCLQGKSSQLLQGDSIQVSENENNIMNPKGDSSIYIENQEFPFWRTQ

SEQ ID NO: 99377 - protein, 37 aa, Homo sapiens
  Payload ID: 19816
  Gene Name: zinc finger protein 227
  ENSP ID: ENSP00000465071
MVENFKNLVAVGEDRHSLTLNFSSLENLFALRQQASK

SEQ ID NO: 99378 - protein, 215 aa, Homo sapiens
  Payload ID: 19816
  Gene Name: zinc finger protein 227
  ENSP ID: ENSP00000466197
MPSQNYDLPQKKQEKMTKFQEAVTFKDVAVVFSREELRLLDLTQRKLYRDVMVENFKNLVAVGSKHQNKMETLQKFALKYLSNQELSCWQIWKQVASELTRCLQGKSSQLLQGDSIQVSENENNIMNPKGDSSIYIENQEFPFWRTQHSCGNTYLSESQIQSRGKQIDVKNNLQIHEDFMKKSPFHEHIKTDTEPKPCKGNEYGKIISDGSNQKL

SEQ ID NO: 99379 - protein, 82 aa, Homo sapiens
  Payload ID: 19816
  Gene Name: zinc finger protein 227
  ENSP ID: ENSP00000467496
MPSQNYDLPQKKQEKMTKFQGGTATARSYPEEAVPRCHGGELQEPGCSGASSLPTRYGIPIGSRRKALDDGNRNPKKQQASK

SEQ ID NO: 99380 - protein, 748 aa, Homo sapiens; identical to SEQ ID NO: 99374
  Payload ID: 19816
  Gene Name: zinc finger protein 227
  Uniprot ID: Q86WZ6
  ENSP ID: ENSP00000467577

SEQ ID NO: 99381 - protein, 799 aa, Homo sapiens; identical to SEQ ID NO: 99373
  Payload ID: 19816
  Gene Name: zinc finger protein 227
  Uniprot ID: Q86WZ6
  ENSP ID: ENSP00000482749

SEQ ID NO: 99382 - protein, 12 aa, Homo sapiens
  Payload ID: 19817
  Gene Name: zinc finger protein 229
  ENSP ID: ENSP00000464902
MSQEPLSFKDVA

SEQ ID NO: 99383 - protein, 819 aa, Homo sapiens
  Payload ID: 19817
  Gene Name: zinc finger protein 229
  ENSP ID: ENSP00000479807
METLTSRHEKRALHSQASAISQDREEKIMSQEPLSFKDVAVVFTEEELELLDSTQRQLYQDVMQENFRNLLSVGDKNGKDTEYIQDEELRFFSHKELSSCKIWEEVAGELPGSQDCRVNLQGKDFQFSEDAAPHQGWEGASTPCFPIENFLDSLQGDGLIGLENQQFPAWRAIRPIPIQGSWAKAFVNQLGDVQERCKNLDTEDTVYKCNWDDDSFCWISCHVDHRFPEIDKPCGCNKCRKDCIKNSVLHRINPGENGLKSNEYRNGFRDDADLPPHPRVPLKEKLCQYDEFSEGLRHSAHLNRHQRVPTGEKSVKSLERGRGVRQNTHIRNHPRAPVGDMPYRCDVCGKGFRYKSVLLIHQGVHTGRRPYKCEECGKAFGRSSNLLVHQRVHTGEKPYKCSECGKGFSYSSVLQVHQRLHTGEKPYTCSECGKGFCAKSALHKHQHIHPGEKPYSCGECGKGFSCSSHLSSHQKTHTGERPYQCDKCGKGFSHNSYLQAHQRVHMGQHLYKCNVCGKSFSYSSGLLMHQRLHTGEKPYKCECGKSFGRSSDLHIHQRVHTGEKPYKCSECGKGFRRNSDLHSHQRVHTGERPYVCDVCGKGFIYSSDLLIHQRVHTGEKPYKCAECGKGFSYSSGLLIHQRVHTGEKPYRCQECGKGFRCTSSLHKHQRVHTGKKPYTCDQCGKGFSYGSNLRTHQRLHTGEKPYTCCECGKGFRYGSGLLSHKRVHTGEKPYRCHVCGKGYSQSSHLQGHQRVHTGEKPYKCEECGKGFGRNSCLHVHQRVHTGEKPYTCGVCGKGFSYTSGLRNHQRVHLGENPYK

SEQ ID NO: 99384 - protein, 825 aa, Homo sapiens
  Payload ID: 19817
  Gene Name: zinc finger protein 229
  Uniprot ID: Q9UJW7
  ENSP ID: ENSP00000479884
METLTSRHEKRALHSQASAISQDREEKIMSQEPLSFKDVAVVFTEEELELLDSTQRQLYQDVMQENFRNLLSVGERNPLGDKNGKDTEYIQDEELRFFSHKELSSCKIWEEVAGELPGSQDCRVNLQGKDFQFSEDAAPHQGWEGASTPCFPIENFLDSLQGDGLIGLENQQFPAWRAIRPIPIQGSWAKAFVNQLGDVQERCKNLDTEDTVYKCNWDDDSFCWISCHVDHRFPEIDKPCGCNKCRKDCIKNSVLHRINPGENGLKSNEYRNGFRDDADLPPHPRVPLKEKLCQYDEFSEGLRHSAHLNRHQRVPTGEKSVKSLERGRGVRQNTHIRNHPRAPVGDMPYRCDVCGKGFRYKSVLLIHQGVHTGRRPYKCEECGKAFGRSSNLLVHQRVHTGEKPYKCSECGKGFSYSSVLQVHQRLHTGEKPYTCSECGKGFCAKSALHKHQHIHPGEKPYSCGECGKGFSCSSHLSSHQKTHTGERPYQCDKCGKGFSHNSYLQAHQRVHMGQHLYKCNVCGKSFSYSSGLLMHQRLHTGEKPYKCECGKSFGRSSDLHIHQRVHTGEKPYKCSECGKGFRRNSDLHSHQRVHTGERPYVCDVCGKGFIYSSDLLIHQRVHTGEKPYKCAECGKGFSYSSGLLIHQRVHTGEKPYRCQECGKGFRCTSSLHKHQRVHTGKKPYTCDQCGKGFSYGSNLRTHQRLHTGEKPYTCCECGKGFRYGSGLLSHKRVHTGEKPYRCHVCGKGYSQSSHLQGHQRVHTGEKPYKCEECGKGFGRNSCLHVHQRVHTGEKPYTCGVCGKGFSYTSGLRNHQRVHLGENPYK

SEQ ID NO: 99385 - protein, 83 aa, Homo sapiens
  Payload ID: 19817
  Gene Name: zinc finger protein 229
  ENSP ID: ENSP00000483138
METLTSRHEKRALHSQASAISQDREEKIMSQEPLSFKDVAVVFTEEELELLDSTQRQLYQDVMQENFRNLLSVGERNPLGNWN

SEQ ID NO: 99386 - protein, 643 aa, Homo sapiens
  Payload ID: 19818
  Gene Name: zinc finger protein 23
  Uniprot ID: P17027
  ENSP ID: ENSP00000349796
MLENYGNVASLGFPLLKPAVISQLEGGSELGGSSPLAAGTGLQGLQTDIQTDNDLTKEMYEGKENVSFELQRDFSQETDFSEASLLEKQQEVHSAGNIKKEKSNTIDGTVKDETSPVEECFFSQSSNSYQCHTITGEQPSGCTGLGKSISFDTKLVKHEIINSEERPFKCEELVEPFRCDSQLIQHQENNTEEKPYQCSECGKAFSINEKLIWHQRLHSGEKPFKCVECGKSFSYSSHYITHQTIHSGEKPYQCKMCGKAFSVNGSLSRHQRIHTGEKPYQCKECGNGFSCSSAYITHQRVHTGEKPYECNDCGKAFNVNAKLIQHQRIHTGEKPYECNECGKGFRCSSQLRQHQSIHTGEKPYQCKECGKGFNNNTKLIQHQRIHTGEKPYECTECGKAFSVKGKLIQHQRIHTGEKPYECNECGKAFRCNSQFRQHLRIHTGEKPYECNECGKAFSVNGKLMRHQRIHTGEKPFECNECGRCFTSKRNLLDHHRIHTGEKPYQCKECGKAFSINAKLTRHQRIHTGEKPFKCMECEKAFSCSSNYIVHQRIHTGEKPFQCKECGKAFHVNAHLIRHQRSHTGEKPFRCVECGKGFSFSSDYIIHQTVHTWKKPYMCSVCGKAFRFSFQLSQHQSVHSEGKS

SEQ ID NO: 99387 - protein, 83 aa, Homo sapiens
  Payload ID: 19818
  Gene Name: zinc finger protein 23
  ENSP ID: ENSP00000351535
MLENYGNVASLGFPLLKPAVISQLEGGSELGGSSPLAAGTGLQGLQTDGVSLCRPNWSAVARTWLTATSVSRVRAILLPHPPE

SEQ ID NO: 99388 - protein, 643 aa, Homo sapiens; identical to SEQ ID NO: 99386
  Payload ID: 19818
  Gene Name: zinc finger protein 23
  Uniprot ID: P17027
  ENSP ID: ENSP00000377171

SEQ ID NO: 99389 - protein, 643 aa, Homo sapiens; identical to SEQ ID NO: 99386
  Payload ID: 19818
  Gene Name: zinc finger protein 23
  Uniprot ID: P17027
  ENSP ID: ENSP00000387673

SEQ ID NO: 99390 - protein, 103 aa, Homo sapiens
  Payload ID: 19818
  Gene Name: zinc finger protein 23
  ENSP ID: ENSP00000454326
MLENYGNVASLGFPLLKPAVISQLEGGIDIQTDNDLTKEMYEGKENVSFELQRDFSQETDFSEASLLEKQQEVHSAGNIKKEKSNTIDGTVKDETSPVEECFF

SEQ ID NO: 99391 - protein, 27 aa, Homo sapiens
  Payload ID: 19818
  Gene Name: zinc finger protein 23
  ENSP ID: ENSP00000455280
MLENYGNVASLGFPLLKPAVISQLEGG

SEQ ID NO: 99392 - protein, 83 aa, Homo sapiens; identical to SEQ ID NO: 99387
  Payload ID: 19818
  Gene Name: zinc finger protein 23
  ENSP ID: ENSP00000456683

SEQ ID NO: 99393 - protein, 585 aa, Homo sapiens
  Payload ID: 19818
  Gene Name: zinc finger protein 23
  Uniprot ID: P17027
  ENSP ID: ENSP00000462429
MYEGKENVSFELQRDFSQETDFSEASLLEKQQEVHSAGNIKKEKSNTIDGTVKDETSPVEECFFSQSSNSYQCHTITGEQPSGCTGLGKSISFDTKLVKHEIINSEERPFKCEELVEPFRCDSQLIQHQENNTEEKPYQCSECGKAFSINEKLIWHQRLHSGEKPFKCVECGKSFSYSSHYITHQTIHSGEKPYQCKMCGKAFSVNGSLSRHQRIHTGEKPYQCKECGNGFSCSSAYITHQRVHTGEKPYECNDCGKAFNVNAKLIQHQRIHTGEKPYECNECGKGFRCSSQLRQHQSIHTGEKPYQCKECGKGFNNNTKLIQHQRIHTGEKPYECTECGKAFSVKGKLIQHQRIHTGEKPYECNECGKAFRCNSQFRQHLRIHTGEKPYECNECGKAFSVNGKLMRHQRIHTGEKPFECNECGRCFTSKRNLLDHHRIHTGEKPYQCKECGKAFSINAKLTRHQRIHTGEKPFKCMECEKAFSCSSNYIVHQRIHTGEKPFQCKECGKAFHVNAHLIRHQRSHTGEKPFRCVECGKGFSFSSDYIIHQTVHTWKKPYMCSVCGKAFRFSFQLSQHQSVHSEGKS

SEQ ID NO: 99394 - protein, 474 aa, Homo sapiens
  Payload ID: 19819
  Gene Name: zinc finger protein 230
  Uniprot ID: Q9UIE0
  ENSP ID: ENSP00000409318
MTTFKEAVTFKDVAVFFTEEELGLLDPAQRKLYQDVMLENFTNLLSVGHQPFHPFHFLREEKFWMMETATQREGNSGGKTIAEAGPHEDCPCQQIWEQTASDLTQSQDSIINNSHFFEQGDVPSQVEAGLSIIHTGQKPSQNGKCKQSFSDVAIFDPPQQFHSGEKSHTCNECGKSFCYISALRIHQRVHLREKLSKCDMRGKEFSQSSCLQTRERVHTGEKPFKCEQCGKGFRCRAILQVHCKLHTGEKPYICEKCGRAFIHDFQLQKHQIIHTGEKPFKCEICGKSFCLRSSLNRHCMVHTAEKLYKSEECGKGFTDSLDLHKHQIIHTGQKPYNCKECGKSFRWSSYLLIHQRIHSGEKPYRCEECGKGYISKSGLNLHQRVHTGERPYNCKECGKSFSRASSILNHKKLHCRKKPFKCEDCGKRLVHRSFCKDQQGDHNGENSSKCEDCGKRYKRRLNLDIILSLFLNDM

SEQ ID NO: 99395 - protein, 54 aa, Homo sapiens
  Payload ID: 19819
  Gene Name: zinc finger protein 230
  ENSP ID: ENSP00000465324
MTTFKEAVTFKDVAVFFTEEELGLLDPAQRKLYQDVMLENFTNLLSVGEHRHPL

SEQ ID NO: 99396 - protein, 87 aa, Homo sapiens
  Payload ID: 19819
  Gene Name: zinc finger protein 230
  ENSP ID: ENSP00000465988
MTTFKEAVTFKDVAVFFTEEELGLLDPAQRKLYQDVMLENFTNLLSVGHQPFHPFHFLREEKFWMMETATQREGNSGKKQATVCPCT

SEQ ID NO: 99397 - protein, 73 aa, Homo sapiens
  Payload ID: 19819
  Gene Name: zinc finger protein 230
  ENSP ID: ENSP00000466541
MTTFKEAVTFKDVAVFFTEEELGLLDPAQRKLYQDVMLENFTNLLSVGHQPFHPFHFLREEKFWMMETATQRE

SEQ ID NO: 99398 - protein, 444 aa, Homo sapiens
  Payload ID: 19820
  Gene Name: zinc finger protein 232
  Uniprot ID: Q9UNY5
  ENSP ID: ENSP00000250076
MEPPGPVRGPLQDSSWYEPSAELVQTRMAVSLTAAETLALQGTQGQEKMMMMGPKEEEQSCEYETRLPGNHSTSQEIFRQRFRHLRYQETPGPREALSQLRVLCCEWLRPEKHTKEQILEFLVLEQFLTILPEELQSWVRGHHPKSGEEAVTVLEDLEKGLEPEPQVPGPAHGPAQEEPWEKKESLGAAQEALSIQLQPKETQPFPKSEQVYLHFLSVVTEDGPEPKDKGSLPQPPITEVESQVFSEKLATDTSTFEATSEGTLELQQRNPKAERLRWSPAQEESFRQMVVIHKEIPTGKKDHECSECGKTFIYNSHLVVHQRVHSGEKPYKCSDCGKTFKQSSNLGQHQRIHTGEKPFECNECGKAFRWGAHLVQHQRIHSGEKPYECNECGKAFSQSSYLSQHRRIHSGEKPFICKECGKAYGWCSELIRHRRVHARKEPSH

SEQ ID NO: 99399 - protein, 50 aa, Homo sapiens
  Payload ID: 19820
  Gene Name: zinc finger protein 232
  ENSP ID: ENSP00000458387
MEPPGPVSCKIESNICPQVASLTLAMETNSRASPDKTRNRSSTHPETKHI

SEQ ID NO: 99400 - protein, 50 aa, Homo sapiens; identical to SEQ ID NO: 99399
  Payload ID: 19820
  Gene Name: zinc finger protein 232
  ENSP ID: ENSP00000458589

SEQ ID NO: 99401 - protein, 50 aa, Homo sapiens; identical to SEQ ID NO: 99399
  Payload ID: 19820
  Gene Name: zinc finger protein 232
  ENSP ID: ENSP00000461267

SEQ ID NO: 99402 - protein, 435 aa, Homo sapiens
  Payload ID: 19820
  Gene Name: zinc finger protein 232
  ENSP ID: ENSP00000461305
MEPPGPVRGPLQDSSWYEPSAELVQTRMAVSLTAAETLALQGTQGQEKMMMMGPKEEEQSCEYETRLPGNHSTSQEIFRQRFRHLRYQETPGPREALSQLRVLCCEWLRPEKHTKEQILEFLVLEQFLTILPEELQSWVRGHHPKSGEEAVTVLEDLEKGLEPEPQVPGPAHGPAQEEPWEKKESLGAAQEALSIQLQPKETQPFPKSVVTEDGPEPKDKGSLPQPPITEVESQVFSEKLATDTSTFEATSEGTLELQQRNPKAERLRWSPAQEESFRQMVVIHKEIPTGKKDHECSECGKTFIYNSHLVVHQRVHSGEKPYKCSDCGKTFKQSSNLGQHQRIHTGEKPFECNECGKAFRWGAHLVQHQRIHSGEKPYECNECGKAFSQSSYLSQHRRIHSGEKPFICKECGKAYGWCSELIRHRRVHARKEPSH

SEQ ID NO: 99403 - protein, 670 aa, Homo sapiens
  Payload ID: 19821
  Gene Name: zinc finger protein 233
  Uniprot ID: A6NK53
  ENSP ID: ENSP00000375820
MTKFQEMVTFKDVAVVFTREELGLLDLAQRKLYQDVMLENFRNLLSVGYQPFKLDVILQLGKEDKLRMMETEIQGDGCSGHKNQNEIDTLQEVRLRFLSYEDLICWQIWEQFTSKLTSNQDLIINLQGKRSKLLKQGDSPCQVWTGESSQVSEDENYVIKLQGESSNSIKNQELPLRTTWDFWRKMYLREPQNYQSRCQQIDVKNKLCKCDHCVRQRIAHQHDDHGVHKREKAFSHNNCGKDCVKESSQHSIIQSGEQTSDENGKGLSVGSNLELHQQLHLRDKPHVNVEYGKGIGYSSGLPRHQCFHIGEKCYRNGDSGEGFSQGSHLQPHQRVSTGENLYRCQVYARSSNQNSCLPSHELTHPGEKLCTCGRCGKGFHHSLDFDIHCVDSAGERACKCDVYDKGFSQTSQLQAHQRGHSRDKTYKWEVSDRIFNRNSGLHQRVHTGEKPYKCEVCDKGFSKASNLQAHQRIHTGEKPYKCDVCDKNFSRNSHLQAHQRVHTGEKPYKCDTCGKDFSQISHLQAHQRVHKGEKPYKCETCGKGFSQSSHLQDHQQVHTGENPYKCDVCGKGFSWSSHLQAHQRVHTGEKPYKCEECRKGFIWNSYLHVHQRIHTGEKPYKCGMCGKSFSQTSHLQAHQRVHTGEKPYKCFVCGKGFSKSSLSSDSSESP

SEQ ID NO: 99404 - protein, 116 aa, Homo sapiens
  Payload ID: 19821
  Gene Name: zinc finger protein 233
  ENSP ID: ENSP00000465136
MGLQVGNGSWSHVWFEGLPGAQVPSPSPPSTRSAVFWQYNLVLPSQDPALPQKEQEKMTKFQEMVTFKDVAVVFTREELGLLDLAQRKLYQDVMLENFRNLLSVGYQPFKLDVILQ

SEQ ID NO: 99405 - protein, 83 aa, Homo sapiens
  Payload ID: 19821
  Gene Name: zinc finger protein 233
  ENSP ID: ENSP00000465307
MTKFQEMVTFKDVAVVFTREELGLLDLAQRKLYQDVMLENFRNLLSVGYQPFKLDVILQLGKEDKLRMMETEIQGDGCSGLTL

SEQ ID NO: 99406 - protein, 162 aa, Homo sapiens
  Payload ID: 19821
  Gene Name: zinc finger protein 233
  ENSP ID: ENSP00000466781
MTKFQEMVTFKDVAVVFTREELGLLDLAQRKLYQDVMLENFRNLLSVGYQPFKLDVILQLGKEDKLRMMETEIQGDGCSGHKNQNEIDTLQEVRLRFLSYEDLICWQIWEQFTSKLTSNQDLIINLQGKRSKLLKQGDSPCQVWTGESSQVSEDENYVIKLQ

SEQ ID NO: 99407 - protein, 140 aa, Homo sapiens
  Payload ID: 19821
  Gene Name: zinc finger protein 233
  ENSP ID: ENSP00000468154
MTKFQEMVTFKDVAVVFTREELGLLDLAQRKLYQDVMLENFRNLLSVGYQPFKLDVILQLGKEDKLRMMETEIQGDGCSGENHGALSLCGVQPSPLLLTTSSATSLAQDPRIHRPGLLQQLAHDLPPSTSLQSILHIARS

SEQ ID NO: 99408 - protein, 700 aa, Homo sapiens
  Payload ID: 19822
  Gene Name: zinc finger protein 234
  Uniprot ID: Q14588
  ENSP ID: ENSP00000400878
MTTFKEGLTFKDVAVVFTEEELGLLDPVQRNLYQDVMLENFRNLLSVGHHPFKHDVFLLEKEKKLDIMKTATQRKGKSADKIQSEVETVPEAGRHEELYWGQIWKQIASDLIKYEDSMISISRFPRQGDLSCQVRAGLYTTHTGQKFYQCDEYKKSFTDVFNFDLHQQLHSGEKSHTCDECGKSFCYISALHIHQRVHMGEKCYKCDVCGKEFSQSSHLQTHQRVHTVEKPFKCVECGKGFSRRSTLTVHCKLHSGEKPYNCEECGRAFIHASHLQEHQRIHTGEKPFKCDTCGKNFRRRSALNNHCMVHTGEKPYKCEDCGKCFTCSSNLRIHQRVHTGEKPYKCEECGKCFIQPSQFQAHRRIHTGEKPYVCKVCGKGFIYSSSFQAHQGVHTGEKPYKCNECGKSFRMKIHYQVHLVVHTGEKPYKCEVCGKAFRQSSYLKIHLKAHSVQKPFKCEECGQGFNQSSRLQIHQLIHTGEKPYKCEECGKGFSRRADLKIHCRIHTGEKPYNCEECGKVFSQASHLLTHQRVHSGEKPFKCEECGKSFSRSAHLQAHQKVHTGEKPYKCGECGKGFKWSLNLDMHQRVHTGEKPYTCGECGKHFSQASSLQLHQSVHTGEKPYKCDVCGKVFSRSSQLQYHRRVHTGEKPYKCEICGKRFSWRSNLVSHHKIHAAGTFYENDENSKNIRELSEGGSSTR

SEQ ID NO: 99409 - protein, 700 aa, Homo sapiens; identical to SEQ ID NO: 99408
  Payload ID: 19822
  Gene Name: zinc finger protein 234
  Uniprot ID: Q14588
  ENSP ID: ENSP00000465011

SEQ ID NO: 99410 - protein, 53 aa, Homo sapiens
  Payload ID: 19822
  Gene Name: zinc finger protein 234
  ENSP ID: ENSP00000466129
MTTFKEGLTFKDVAVVFTEEELGLLDPVQRNLYQDVMLENFRNLLSVGPIRLK

SEQ ID NO: 99411 - protein, 738 aa, Homo sapiens
  Payload ID: 19823
  Gene Name: zinc finger protein 235
  Uniprot ID: Q14590
  ENSP ID: ENSP00000291182
MTKFQEAVTFKDVAVAFTEEELGLLDSAQRKLYRDVMLENFRNLVSVGHQSFKPDMISQLEREEKLWMKELQTQRGKHSGDRNQNEMATLHKAGLRCFSLGELSCWQIKRHIASKLARSQDSMINIEGKSSQFPKHHDSPCQVGAGESIQASVDDNCLVNHIGDHSSIIENQEFPTGKVPNSWSKIYLNETQNYQRSCKQTQMKNKLCIFAPYVDIFSCISHHHDDNIVHKRDKVHSNSDCGKDTLKVSPLTQRSIHTGQKTYQGNECEEAFNDSSSLELHKQVHLGKKSPACSTHEKDTSYSSGIPVQQSVRTGKKRYWCHECGKGFSQSSNLQTHQRVHTGEKPYTCHECGKSFNQSSHLYAHLPIHTGEKPYRCDSCGKGFSRSTDLNIHCRVHTGEKPYKCEVCGKGFTQRSHLQAHERIHTGEKPYKCGDCGKRFSCSSNLHTHQRVHTEEKPYKCDECGKCFSLSFNLHSHQRVHTGEKPYKCEECGKGFSSASSFQSHQRVHTGEKPFRCNVCGKGFSQSSYFQAHQRVHTGEKPYKCEVCGKRFNWSLNLHNHQRVHTGEKPYKCEECGKGFSQASNLQAHQSVHTGEKPFKCDACQKRFSQASHLQAHQRVHTGEKPYKCDTCGKAFSQRSNLQVHQIIHTGEKPFKCEECGKEFSWSAGLSAHQRVHTGEKPYTCQQCGKGFSQASHFHTHQRVHTGERPYICDVCCKGFSQRSHLIYHQRVHTGGNL

SEQ ID NO: 99412 - protein, 81 aa, Homo sapiens
  Payload ID: 19823
  Gene Name: zinc finger protein 235
  ENSP ID: ENSP00000465641
MTKFQEAVTFKDVAVAFTEEELGLLDSAQRKLYRDVMLENFRNLVSVGHQSFKPDMISQLEREEKLWMKELQTQRGKHSET

SEQ ID NO: 99413 - protein, 295 aa, Homo sapiens
  Payload ID: 19823
  Gene Name: zinc finger protein 235
  ENSP ID: ENSP00000465880
MNPSLAWGREAAASAGGRGWEAAGVCVPSAEPLAWEAGSRRPSRLRVCCPSRPHAPTSQSCLLLAVKYWVHFPGTLPFPRRRRGKMTKFQEAVTFKDVAVAFTEEELGLLDSAQRKLYRDVMLENFRNLVSVGHQSFKPDMISQLEREEKLWMKELQTQRGKHSGDRNQNEMATLHKAGLRCFSLGELSCWQIKRHIASKLARSQDSMINIEGKSSQFPKHHDSPCQVGAGESIQASVDDNCLVNHIGDHSSIIENQEFPTGKVPNSWSKIYLNETQNYQRSCKQTQMKNKLCIF

SEQ ID NO: 99414 - protein, 87 aa, Homo sapiens
  Payload ID: 19823
  Gene Name: zinc finger protein 235
  ENSP ID: ENSP00000468609
MTKFQEAVTFKDVAVAFTEEELGLLDSAQRKLYRDVMLENFRNLVSVGHQSFKPDMISQLEREEKLWMKELQTQRGKHSGFLCCVFS

SEQ ID NO: 99415 - protein, 83 aa, Homo sapiens
  Payload ID: 19823
  Gene Name: zinc finger protein 235
  ENSP ID: ENSP00000468695
MTKFQEAVTFKDVAVAFTEEELGLLDSAQRKLYRDVMLENFRNLVSVGHQSFKPDMISQLEREEKLWMKELQTQRGKHSVWTL

SEQ ID NO: 99416 - protein, 588 aa, Homo sapiens
  Payload ID: 19823
  Gene Name: zinc finger protein 235
  ENSP ID: ENSP00000484268
SGDRNQNEMATLHKAGLRCFSLGELSCWQIKRHIASKLARSQDSMINIEGKSSQFPKHHDSPCQVGAGESIQASVDDNCLVNHIGDHSSIIENQEFPTGKVPNSWSKIYLNETQNYQRSCKQTQMKNKLCIFAPYVDIFSCISHHHDDNIVHKRDKVHSNSDCGKDTLKVSPLTQRSIHTGQKTYQGNECEEAFNDSSSLELHKQVHLGKKSPACSTHEKDTSYSSGIPVQQSVRTGKKRYWCHECGKGFSQSSNLQTHQRVHTGEKPYTCHECGKSFNQSSHLYAHLPIHTGEKPYRCDSCGKGFSRSTDLNIHCRVHTGEKPYKCEVCGKGFTQRSHLQAHERIHTGEKPYKSQIFIPIRDFNLHSHQRVHTGEKPYKCEECGKGFSSASSFQSHQRVHTGEKPFRCNVCGKGFSQSSYFQAHQRVHTGEKPYKCEVCGKRFNWSLNLHNHQRVHTGEKPYKCEECGKGFSQASNLQAHQSVHTGEKPFKCDACQKRFSQASHLQAHQRVHTGEKPYKCDTCGKAFSQRSNLQVHQIIHTGEKPFKCEECGKEFSWSAGLSAHQRVHTGEKPYTCQQCGKGFSQAS

SEQ ID NO: 99417 - protein, 1845 aa, Homo sapiens
  Payload ID: 19824
  Gene Name: zinc finger protein 236
  Uniprot ID: Q9UL36
  ENSP ID: ENSP00000253159
MGLCGLLERCWLHHDPDGVLTLNAENTNYAYQVPNFHKCEICLLSFPKESQFQRHMRDHERNDKPHRCDQCPQTFNVEFNLTLHKCTHSGEDPTCPVCNKKFSRVASLKAHIMLHEKEENLICSECGDEFTLQSQLAVHMEEHRQELAGTRQHACKACKKEFETSSELKEHMKTHYKIRVSSTRSYNRNIDRSGFTYSCPHCGKTFQKPSQLTRHIRIHTGERPFKCSECGKAFNQKGALQTHMIKHTGEKPHACAFCPAAFSQKGNLQSHVQRVHSEVKNGPTYNCTECSCVFKSLGSLNTHISKMHMGGPQNSTSSTETAHVLTATLFQTLPLQQTEAQATSASSQPSSQAVSDVIQQLLELSEPAPVESGQSPQPGQQLSITVGINQDILQQALENSGLSSIPAAAHPNDSCHAKTSAPHAQNPDVSSVSNEQTDPTDAEQEKEQESPEKLDKKEKKMIKKKSPFLPGSIREENGVRWHVCPYCAKEFRKPSDLVRHIRIHTHEKPFKCPQCFRAFAVKSTLTAHIKTHTGIKAFKCQYCMKSFSTSGSLKVHIRLHTGVRPFACPHCDKKFRTSGHRKTHIASHFKHTELRKMRHQRKPAKVRVGKTNIPVPDIPLQEPILITDLGLIQPIPKNQFFQSYFNNNFVNEADRPYKCFYCHRAYKKSCHLKQHIRSHTGEKPFKCSQCGRGFVSAGVLKAHIRTHTGLKSFKCLICNGAFTTGGSLRRHMGIHNDLRPYMCPYCQKTFKTSLNCKKHMKTHRYELAQQLQQHQQAASIDDSTVDQQSMQASTQMQVEIESDELPQTAEVVAANPEAMLDLEPQHVVGTEEAGLGQQLADQPLEADEDGFVAPQDPLRGHVDQFEEQSPAQQSFEPAGLPQGFTVTDTYHQQPQFPPVQQLQDSSTLESQALSTSFHQQSLLQAPSSDGMNVTTRLIQESSQEELDLQAQGSQFLEDNEDQSRRSYRCDYCNKGFKKSSHLKQHVRSHTGEKPYKCKLCGRGFVSSGVLKSHEKTHTGVKAFSCSVCNASFTTNGSLTRHMATHMSMKPYKCPFCEEGFRTTVHCKKHMKRHQTVPSAVSATGETEGGDICMEEEEEHSDRNASRKSRPEVITFTEEETAQLAKIRPQESATVSEKVLVQSAAEKDRISELRDKQAELQDEPKHANCCTYCPKSFKKPSDLVRHVRIHTGEKPYKCDECGKSFTVKSTLDCHVKTHTGQKLFSCHVCSNAFSTKGSLKVHMRLHTGAKPFKCPHCELRFRTSGRRKTHMQFHYKPDPKKARKPMTRSSSEGLQPVNLLNSSSTDPNVFIMNNSVLTGQFDQNLLQPGLVGQAILPASVSAGGDLTVSLTDGSLATLEGIQLQLAANLVGPNVQISGIDAASINNITLQIDPSILQQTLQQGNLLAQQLTGEPGLAPQNSSLQTSDSTVPASVVIQPISGLSLQPTVTSANLTIGPLSEQDSVLTTNSSGTQDLTQVMTSQGLVSPSGGPHEITLTINNSSLSQVLAQAAGPTATSSSGSPQEITLTISELNTTSGSLPSTTPMSPSAISTQNLVMSSSGVGGDASVTLTLADTQGMLSGGLDTVTLNITSQGQQFPALLTDPSLSGQGGAGSPQVILVSHTPQSASAACEEIAYQVAGVSGNLAPGNQPEKEGRAHQCLECDRAFSSAAVLMHHSKEVHGRERIHGCPVCRKAFKRATHLKEHMQTHQAGPSLSSQKPRVFKCDTCEKAFAKPSQLERHSRIHTGERPFHCTLCEKAFNQKSALQVHMKKHTGERPYKCAYCVMGFTQKSNMKLHMKRAHSYAGALQESAGHPEQDGEELSRTLHLEEVVQEAAGEWQALTHVF

SEQ ID NO: 99418 - protein, 1847 aa, Homo sapiens
  Payload ID: 19824
  Gene Name: zinc finger protein 236
  ENSP ID: ENSP00000322361
MPRGRPPKPRESKARGDSDGVLTLNAENTNYAYQVPNFHKCEICLLSFPKESQFQRHMRDHERNDKPHRCDQCPQTFNVEFNLTLHKCTHSGEDPTCPVCNKKFSRVASLKAHIMLHEKEENLICSECGDEFTLQSQLAVHMEEHRQELAGTRQHACKACKKEFETSSELKEHMKTHYKIRVSSTRSYNRNIDRSGFTYSCPHCGKTFQKPSQLTRHIRIHTGERPFKCSECGKAFNQKGALQTHMIKHTGEKPHACAFCPAAFSQKGNLQSHVQRVHSEVKNGPTYNCTECSCVFKSLGSLNTHISKMHMGGPQNSTSSTETAHVLTATLFQTLPLQQTEAQATSASSQPSSQAVSDVIQQLLELSEPAPVESGQSPQPGQQLSITVGINQDILQQALENSGLSSIPAAAHPNDSCHAKTSAPHAQNPDVSSVSNEQTDPTDAEQEKEQESPEKLDKKEKKMIKKKSPFLPGSIREENGVRWHVCPYCAKEFRKPSDLVRHIRIHTHEKPFKCPQCFRAFAVKSTLTAHIKTHTGIKAFKCQYCMKSFSTSGSLKVHIRLHTGVRPFACPHCDKKFRTSGHRKTHIASHFKHTELRKMRHQRKPAKVRVGKTNIPVPDIPLQEPILITDLGLIQPIPKNQFFQSYFNNNFVNEADRPYKCFYCHRAYKKSCHLKQHIRSHTGEKPFKCSQCGRGFVSAGVLKAHIRTHTGLKSFKCLICNGAFTTGGSLRRHMGIHNDLRPYMCPYCQKTFKTSLNCKKHMKTHRYELAQQLQQHQQAASIDDSTVDQQSMQASTQMQVEIESDELPQTAEVVAANPEAMLDLEPQHVVGTEEAGLGQQLADQPLEADEDGFVAPQDPLRGHVDQFEEQSPAQQSFEPAGLPQGFTVTDTYHQQPQFPPVQQLQDSSTLESQALSTSFHQQSLLQAPSSDGMNVTTRLIQESSQEELDLQAQGSQFLEDNEDQSRRSYRCDYCNKGFKKSSHLKQHVRSHTGEKPYKCKLCGRGFVSSGVLKSHEKTHTGVKAFSCSVCNASFTTNGSLTRHMATHMSMKPYKCPFCEEGFRTTVHCKKHMKRHQTVPSAVSATGETEGGDICMEEEEEHSDRNASRKSRPEVITFTEEETAQLAKIRPQESATVSEKVLVQSAAEKDRISELRDKQAELQDEPKHANCCTYCPKSFKKPSDLVRHVRIHTGEKPYKCDECGKSFTVKSTLDCHVKTHTGQKLFSCHVCSNAFSTKGSLKVHMRLHTGAKPFKCPHCELRFRTSGRRKTHMQFHYKPDPKKARKPMTRSSSEGLQPVNLLNSSSTDPNVFIMNNSVLTGQFDQNLLQPGLVGQAILPASVSAGGDLTVSLTDGSLATLEGIQLQLAANLVGPNVQISGIDAASINNITLQIDPSILQQTLQQGNLLAQQLTGEPGLAPQNSSLQTSDSTVPASVVIQPISGLSLQPTVTSANLTIGPLSEQDSVLTTNSSGTQDLTQVMTSQGLVSPSGGPHEITLTINNSSLSQVLAQAAGPTATSSSGSPQEITLTISELNTTSGSLPSTTPMSPSAISTQNLVMSSSGVGGDASVTLTLADTQGMLSGGLDTVTLNITSQGQQFPALLTDPSLSGQGGAGSPQVILVSHTPQSASAACEEIAYQVAGVSGNLAPGNQPEKEGRAHQCLECDRAFSSAAVLMHHSKEVHGRERIHGCPVCRKAFKRATHLKEHMQTHQAGPSLSSQKPRVFKCDTCEKAFAKPSQLERHSRIHTGERPFHCTLCEKAFNQKSALQVHMKKHTGERPYKCAYCVMGFTQKSNMKLHMKRAHSYAGALQESAGHPEQDGEELSRTLHLEEVVQEAAGEWQALTHVF

SEQ ID NO: 99419 - protein, 1558 aa, Homo sapiens
  Payload ID: 19824
  Gene Name: zinc finger protein 236
  Uniprot ID: Q9UL36
  ENSP ID: ENSP00000444524
MGLCGLLERCWLHHDPDGVLTLNAENTNYAYQVPNFHKCEICLLSFPKESQFQRHMRDHERNDKPHRCDQCPQTFNVEFNLTLHKCTHSGEDPTCPVCNKKFSRVASLKAHIMLHEKEENLICSECGDEFTLQSQLAVHMEEHRQELAGTRQHACKACKKEFETSSELKEHMKTHYKIRVSSTRSYNRNIDRSGFTYSCPHCGKTFQKPSQLTRHIRIHTGERPFKCSECGKAFNQKGALQTHMIKHTGEKPHACAFCPAAFSQKGNLQSHVQRVHSEVKNGPTYNCTECSCVFKSLGSLNTHISKMHMGGPQNSTSSTETAHVLTATLFQTLPLQQTEAQATSASSQPSSQAVSDVIQQLLELSEPAPVESGQSPQPGQQLSITVGINQDILQQALENSGLSSIPAAAHPNDSCHAKTSAPHAQNPDVSSVSNEQTDPTDAEQEKEQESPEKLDKKEKKMIKKKSPFLPGSIREENGVRWHVCPYCAKEFRKPSDLVRHIRIHTHEKPFKCPQCFRAFAVKSTLTAHIKTHTGIKAFKCQYCMKSFSTSGSLKVHIRLHTGVRPFACPHCDKKFRTSGHRKTHIASHFKHTELRKMRHQRKPAKVRVGKTNIPVPDIPLQEPILITDLGLIQPIPKNQFFQSYFNNNFVNEADRPYKCFYCHRAYKKSCHLKQHIRSHTGEKPFKCSQCGRGFVSAGVLKAHIRTHTGLKSFKCLICNGAFTTGGSLRRHMGIHNDLRPYMCPYCQKTFKTSLNCKKHMKTHRYELAQQLQQHQQAASIDDSTVDQQSMQASTQMQVEIESDELPQTAEVVAANPEAMLDLEPQHVVGTEEAGLGQQLADQPLEADEDGFVAPQDPLRGHVDQFEEQSPAQQSFEPAGLPQGFTVTDTYHQQPQFPPVQQLQDSSTLESQALSTSFHQQSLLQAPSSDGMNVTTRLIQESSQEELDLQAQGSQFLEDNEDQSRRSYRCDYCNKGFKKSSHLKQHVRSHTGEKPYKCKLCGRGFVSSGVLKSHEKTHTGVKAFSCSVCNASFTTNGSLTRHMATHMSMKPYKCPFCEEGFRTTVHCKKHMKRHQTVPSAVSATGETEGGDICMEEEEEHSDRNASRKSRPEVITFTEEETAQLAKIRPQESATVSEKVLVQSAAEKDRISELRDKQAELQDEPKHANCCTYCPKSFKKPSDLVRHVRIHTGEKPYKCDECGKSFTVKSTLDCHVKTHTGQKLFSCHVCSNAFSTKGSLKVHMRLHTGAKPFKCPHCELRFRTSGRRKTHMQFHYKPDPKKARKPMTRSSSEGLQPVNLLNSSSTDPNVFIMNNSVLTGQFDQNLLQPGLVGQAILPASVSAGGDLTVSLTDGSLATLEGIQLQLAANLVGPNVQISGIDAASINNITLQIDPSILQQTLQQGNLLAQQLTGEPGLAPQNSSLQTSDSTVPASVVIQPISGLSLQPTVTSANLTIGPLSEQDSVLTTNSSGTQDLTQVMTSQGLVSPSGGPHEITLTINNSSLSQVLAQAAGPTATSSSGSPQEITLTISGSRSVQHSVGPQECGSVEALYLENSSDKT

SEQ ID NO: 99420 - protein, 460 aa, Homo sapiens
  Payload ID: 19824
  Gene Name: zinc finger protein 236
  ENSP ID: ENSP00000463787
MRITTGIYCLYLCNFIDGVLTLNAENTNYAYQVPNFHKCEICLLSFPKESQFQRHMRDHERNDKPHRCDQCPQTFNVEFNLTLHKCTHSGEDPTCPVCNKKFSRVASLKAHIMLHEKEENLICSECGDEFTLQSQLAVHMEEHRQELAGTRQHACKACKKEFETSSELKEHMKTHYKIRVSSTRSYNRNIDRSGFTYSCPHCGKTFQKPSQLTRHIRIHTGERPFKCSECGKAFNQKGALQTHMIKHTGEKPHACAFCPAAFSQKGNLQSHVQRVHSEVKNGPTYNCTECSCVFKSLGSLNTHISKMHMGGPQNSTSSTETAHVLTATLFQTLPLQQTEAQATSASSQPSSQAVSDVIQQLLELSEPAPVESGQSPQPGQQLSITVGINQDILQQALENSGLSSIPAAAHPNDSCHAKTSAPHAQNPDVSSVSNEQTDPTDAEQEKEQESPEKLDKKEKK

SEQ ID NO: 99421 - protein, 458 aa, Homo sapiens
  Payload ID: 19825
  Gene Name: zinc finger protein 239
  Uniprot ID: Q16600
  ENSP ID: ENSP00000307774
MASTITGSQDCIVNHRGEVDGEPELDISPCQQWGEASSPISRNRDSVMTLQSGCFENIESETYLPLKVSSQIDTQDSSVKFCKNEPQDHQESRRLFVMEESTERKVIKGESCSENLQVKLVSDGQELASPLLNGEATCQNGQLKESLDPIDCNCKDIHGWKSQVVSCSQQRAHTEEKPCDHNNCGKILNTSPDGHPYEKIHTAEKQYECSQCGKNFSQSSELLLHQRDHTEEKPYKCEQCGKGFTRSSSLLIHQAVHTDEKPYKCDKCGKGFTRSSSLLIHHAVHTGEKPYKCDKCGKGFSQSSKLHIHQRVHTGEKPYECEECGMSFSQRSNLHIHQRVHTGERPYKCGECGKGFSQSSNLHIHRCIHTGEKPYQCYECGKGFSQSSDLRIHLRVHTGEKPYHCGKCGKGFSQSSKLLIHQRVHTGEKPYECSKCGKGFSQSSNLHIHQRVHKKDPR

SEQ ID NO: 99422 - protein, 458 aa, Homo sapiens; identical to SEQ ID NO: 99421
  Payload ID: 19825
  Gene Name: zinc finger protein 239
  Uniprot ID: Q16600
  ENSP ID: ENSP00000363569

SEQ ID NO: 99423 - protein, 458 aa, Homo sapiens; identical to SEQ ID NO: 99421
  Payload ID: 19825
  Gene Name: zinc finger protein 239
  Uniprot ID: Q16600
  ENSP ID: ENSP00000398202

SEQ ID NO: 99424 - protein, 458 aa, Homo sapiens; identical to SEQ ID NO: 99421
  Payload ID: 19825
  Gene Name: zinc finger protein 239
  Uniprot ID: Q16600
  ENSP ID: ENSP00000443907

SEQ ID NO: 99425 - protein, 368 aa, Homo sapiens
  Payload ID: 19826
  Gene Name: zinc finger protein 24
  Uniprot ID: P17028
  ENSP ID: ENSP00000261332
MSAQSVEEDSILIIPTPDEEEKILRVKLEEDPDGEEGSSIPWNHLPDPEIFRQRFRQFGYQDSPGPREAVSQLRELCRLWLRPETHTKEQILELVVLEQFVAILPKELQTWVRDHHPENGEEAVTVLEDLESELDDPGQPVSLRRRKREVLVEDMVSQEEAQGLPSSELDAVENQLKWASWELHSLRHCDDDGRTENGALAPKQELPSALESHEVPGTLNMGVPQIFKYGETCFPKGRFERKRNPSRKKQHICDECGKHFSQGSALILHQRIHSGEKPYGCVECGKAFSRSSILVQHQRVHTGEKPYKCLECGKAFSQNSGLINHQRIHTGEKPYECVQCGKSYSQSSNLFRHQRRHNAEKLLNVVKV

SEQ ID NO: 99426 - protein, 368 aa, Homo sapiens; identical to SEQ ID NO: 99425
  Payload ID: 19826
  Gene Name: zinc finger protein 24
  Uniprot ID: P17028
  ENSP ID: ENSP00000382015

SEQ ID NO: 99427 - protein, 138 aa, Homo sapiens
  Payload ID: 19826
  Gene Name: zinc finger protein 24
  ENSP ID: ENSP00000467432
MSAQSVEEDSILIIPTPDEEEKILRVKLEEDPDGEEGSSIPWNHLPDPEIFRQRFRQFGYQDSPGPREAVSQLRELCRLWLRPETHTKEQILELVVLEQFVAILPKELQTWVRDHHPENGEEAVTVLEDLESELDDPG

SEQ ID NO: 99428 - protein, 102 aa, Homo sapiens
  Payload ID: 19826
  Gene Name: zinc finger protein 24
  ENSP ID: ENSP00000467608
MSAQSVEEDSILIIPTPDEEEKILRVKLEEDPDGEEGSSIPWNHLPDPEIFRQRFRQFGYQDSPGPREAVSQLRELCRLWLRPETHTKEQILELVVLEQFVA

SEQ ID NO: 99429 - protein, 193 aa, Homo sapiens
  Payload ID: 19826
  Gene Name: zinc finger protein 24
  Uniprot ID: P17028
  ENSP ID: ENSP00000467655
MSAQSVEEDSILIIPTPDEEEKILRVKLEEDPDGEEGSSIPWNHLPDPEIFRQRFRQFGYQDSPGPREAVSQLRELCRLWLRPETHTKEQILELVVLEQFVAILPKELQTWVRDHHPENGEEAVTVLEDLESELDDPGQPVSLRRRKREVLVEDMVSQEEAQGLPSSELDAVENQLKWASWELHSLRHCVIIP

SEQ ID NO: 99430 - protein, 96 aa, Homo sapiens
  Payload ID: 19826
  Gene Name: zinc finger protein 24
  ENSP ID: ENSP00000467924
MSAQSVEEDSILIIPTPDEEEKILRVKLEEDPDGEEGSSIPWNHLPDPEIFRQRFRQFGYQDSPGPREAVSQLRELCRLWLRPETHTKEQILELVV

SEQ ID NO: 99431 - protein, 579 aa, Homo sapiens
  Payload ID: 19827
  Gene Name: zinc finger protein 248
  Uniprot ID: Q8NDW4
  ENSP ID: ENSP00000349882
MNKSQEQVSFKDVCVDFTQEEWYLLDPAQKILYRDVILENYSNLVSVGYCITKPEVIFKIEQGEEPWILEKGFPSQCHPERKWKVDDVLESSQENEDDHFWELLFHNNKTVSVENGDRGSKTFNLGTDPVSLRNYPYKICDSCEMNLKNISGLIISKKNCSRKKPDEFNVCEKLLLDIRHEKIPIGEKSYKYDQKRNAINYHQDLSQPSFGQSFEYSKNGQGFHDEAAFFTNKRSQIGETVCKYNECGRTFIESLKLNISQRPHLEMEPYGCSICGKSFCMNLRFGHQRALTKDNPYEYNEYGEIFCDNSAFIIHQGAYTRKILREYKVSDKTWEKSALLKHQIVHMGGKSYDYNENGSNFSKKSHLTQLRRAHTGEKTFECGECGKTFWEKSNLTQHQRTHTGEKPYECTECGKAFCQKPHLTNHQRTHTGEKPYECKQCGKTFCVKSNLTEHQRTHTGEKPYECNACGKSFCHRSALTVHQRTHTGEKPFICNECGKSFCVKSNLIVHQRTHTGEKPYKCNECGKTFCEKSALTKHQRTHTGEKPYECNACGKTFSQRSVLTKHQRIHTRVKALSTS

SEQ ID NO: 99432 - protein, 119 aa, Homo sapiens
  Payload ID: 19827
  Gene Name: zinc finger protein 248
  Uniprot ID: Q8NDW4
  ENSP ID: ENSP00000363778
MNKSQEQVSFKDVCVDFTQEEWYLLDPAQKILYRDVILENYSNLVSVGYCITKPEVIFKIEQGEEPWILEKGFPSQCHPERKWKVDDVLESSQENEDDHFWELLFHNNKTWNLKLIKVE

SEQ ID NO: 99433 - protein, 579 aa, Homo sapiens; identical to SEQ ID NO: 99431
  Payload ID: 19827
  Gene Name: zinc finger protein 248
  Uniprot ID: Q8NDW4
  ENSP ID: ENSP00000379208

SEQ ID NO: 99434 - protein, 100 aa, Homo sapiens
  Payload ID: 19827
  Gene Name: zinc finger protein 248
  ENSP ID: ENSP00000379214
MNKSQEQVSFKDVCVDFTQEEWYLLDPAQKILYRDVILENYSNLVSVGYCITKPEVIFKIEQGEEPWILEKGFPSQCHPERKWKVDDVLESSQENEDDHF

SEQ ID NO: 99435 - protein, 69 aa, Homo sapiens
  Payload ID: 19827
  Gene Name: zinc finger protein 248
  ENSP ID: ENSP00000379215
MNKSQEQVSFKDVCVDFTQEEWYLLDPAQKILYRDVILENYSNLVSVGYCITKPEVIFKIEQGEEPWIL

SEQ ID NO: 99436 - protein, 111 aa, Homo sapiens
  Payload ID: 19827
  Gene Name: zinc finger protein 248
  ENSP ID: ENSP00000473904
MNKSQEQVSFKDVCVDFTQEEWYLLDPAQKILYRDVILENYSNLVSVGYCITKPEVIFKIEQGEEPWILEKGFPSQCHPERKWKVDDVLESSQENEDDHFWELLFHNNKTH

SEQ ID NO: 99437 - protein, 122 aa, Homo sapiens
  Payload ID: 19827
  Gene Name: zinc finger protein 248
  ENSP ID: ENSP00000477940
MNKSQEQVSFKDVCVDFTQEEWYLLDPAQKILYRDVILENYSNLVSVGYCITKPEVIFKIEQGEEPWILEKGFPSQCHPERKWKVDDVLESSQENEDDHFWELLFHNNKTLRFQLLGRKQFL

SEQ ID NO: 99438 - protein, 119 aa, Homo sapiens; identical to SEQ ID NO: 99432
  Payload ID: 19827
  Gene Name: zinc finger protein 248
  Uniprot ID: Q8NDW4
  ENSP ID: ENSP00000484191

SEQ ID NO: 99439 - protein, 456 aa, Homo sapiens
  Payload ID: 19828
  Gene Name: zinc finger protein 25
  Uniprot ID: P17030
  ENSP ID: ENSP00000302222
MNKFQGPVTLKDVIVEFTKEEWKLLTPAQRTLYKDVMLENYSHLVSVGYHVNKPNAVFKLKQGKEPWILEVEFPHRGFPEDLWSIHDLEARYQESQAGNSRNGELTKHQKTHTTEKACECKECGKFFCQKSALIVHQHTHSKGKSYDCDKCGKSFSKNEDLIRHQKIHTRDKTYECKECKKIFYHLSSLSRHLRTHAGEKPYECNQCEKSFYQKPHLTEHQKTHTGEKPFECTECGKFFYVKAYLMVHQKTHTGEKPYECKECGKAFSQKSHLTVHQRMHTGEKPYKCKECGKFFSRNSHLKTHQRSHTGEKPYECKECRKCFYQKSALTVHQRTHTGEKPFECNKCGKTFYYKSDLTKHQRKHTGEKPYECTECGKSFAVNSVLRLHQRTHTGEKPYACKECGKSFSQKSHFIIHQRKHTGEKPYECQECGETFIQKSQLTAHQKTHTKKRNAEK

SEQ ID NO: 99440 - protein, 560 aa, Homo sapiens
  Payload ID: 19829
  Gene Name: zinc finger protein 250
  Uniprot ID: P15622
  ENSP ID: ENSP00000292579
MAAARLLPVPAGPQPLSFQAKLTFEDVAVLLSQDEWDRLCPAQRGLYRNVMMETYGNVVSLGLPGSKPDIISQLERGEDPWVLDRKGAKKSQGLWSDYSDNLKYDHTTACTQQDSLSCPWECETKGESQNTDLSPKPLISEQTVILGKTPLGRIDQENNETKQSFCLSPNSVDHREVQVLSQSMPLTPHQAVPSGERPYMCVECGKCFGRSSHLLQHQRIHTGEKPYVCSVCGKAFSQSSVLSKHRRIHTGEKPYECNECGKAFRVSSDLAQHHKIHTGEKPHECLECRKAFTQLSHLIQHQRIHTGERPYVCPLCGKAFNHSTVLRSHQRVHTGEKPHRCNECGKTFSVKRTLLQHQRIHTGEKPYTCSECGKAFSDRSVLIQHHNVHTGEKPYECSECGKTFSHRSTLMNHERIHTEEKPYACYECGKAFVQHSHLIQHQRVHTGEKPYVCGECGHAFSARRSLIQHERIHTGEKPFQCTECGKAFSLKATLIVHLRTHTGEKPYECNSCGKAFSQYSVLIQHQRIHTGEKPYECGECGRAFNQHGHLIQHQKVHRKL

SEQ ID NO: 99441 - protein, 555 aa, Homo sapiens
  Payload ID: 19829
  Gene Name: zinc finger protein 250
  Uniprot ID: P15622
  ENSP ID: ENSP00000393442
MAAARLLPVPAGPQAKLTFEDVAVLLSQDEWDRLCPAQRGLYRNVMMETYGNVVSLGLPGSKPDIISQLERGEDPWVLDRKGAKKSQGLWSDYSDNLKYDHTTACTQQDSLSCPWECETKGESQNTDLSPKPLISEQTVILGKTPLGRIDQENNETKQSFCLSPNSVDHREVQVLSQSMPLTPHQAVPSGERPYMCVECGKCFGRSSHLLQHQRIHTGEKPYVCSVCGKAFSQSSVLSKHRRIHTGEKPYECNECGKAFRVSSDLAQHHKIHTGEKPHECLECRKAFTQLSHLIQHQRIHTGERPYVCPLCGKAFNHSTVLRSHQRVHTGEKPHRCNECGKTFSVKRTLLQHQRIHTGEKPYTCSECGKAFSDRSVLIQHHNVHTGEKPYECSECGKTFSHRSTLMNHERIHTEEKPYACYECGKAFVQHSHLIQHQRVHTGEKPYVCGECGHAFSARRSLIQHERIHTGEKPFQCTECGKAFSLKATLIVHLRTHTGEKPYECNSCGKAFSQYSVLIQHQRIHTGEKPYECGECGRAFNQHGHLIQHQKVHRKL

SEQ ID NO: 99442 - protein, 101 aa, Homo sapiens
  Payload ID: 19829
  Gene Name: zinc finger protein 250
  ENSP ID: ENSP00000431551
MAAARLLPVPAGPQAKLTFEDVAVLLSQDEWDRLCPAQRGLYRNVMMETYGNVVSLGLPGSKPDIISQLERGEDPWVLDRKGAKKSQGLWSDYSDPVPQKP

SEQ ID NO: 99443 - protein, 141 aa, Homo sapiens
  Payload ID: 19829
  Gene Name: zinc finger protein 250
  ENSP ID: ENSP00000432450
MAAARLLPVPAGPQAKLTFEDVAVLLSQDEWDRLCPAQRGLYRNVMMETYGNVVSLGLPGSKPDIISQLERGEDPWVLDRKGAKKSQGLWSDYSDNLKYDHTTACTQQDSLSCPWECETKGESQNTDLSPKPLISEQTVIL

SEQ ID NO: 99444 - protein, 122 aa, Homo sapiens
  Payload ID: 19829
  Gene Name: zinc finger protein 250
  ENSP ID: ENSP00000432611
MAAARLLPVPAGPQAKLTFEDVAVLLSQDEWDRLCPAQRGLYRNVMMETYGNVVSLGLPGSKPDIISQLERGEDPWVLDRKGAKKSQGLWSDYSDNLKYDHTTACTQQDSLSCPWDPVPQKP

SEQ ID NO: 99445 - protein, 171 aa, Homo sapiens
  Payload ID: 19829
  Gene Name: zinc finger protein 250
  ENSP ID: ENSP00000432702
MAAARLLPVPAGPQAKLTFEDVAVLLSQDEWDRLCPAQRGLYRNVMMETYGNVVSLGLPGSKPDIISQLERGEDPWVLDRKGAKKSQGLWSDYSECETKGESQNTDLSPKPLISEQTVILGKTPLGRIDQENNETKQSFCLSPNSVDHREVQVLSQSMPLTPHQAVPSGER

SEQ ID NO: 99446 - protein, 176 aa, Homo sapiens
  Payload ID: 19829
  Gene Name: zinc finger protein 250
  ENSP ID: ENSP00000433387
MAAARLLPVPAGPQAKLTFEDVAVLLSQDEWDRLCPAQRGLYRNVMMETYGNVVSLGLPGSKPDIISQLERGEDPWVLDRKGAKKSQGLWSDYSDNLKYDHTTACTQQDSLSCPWECETKGESQNTDLSPKPLISEQTVILGKTPLGRIDQENNETKQSFCLSPNSVDHREVQVLS

SEQ ID NO: 99447 - protein, 45 aa, Homo sapiens
  Payload ID: 19829
  Gene Name: zinc finger protein 250
  ENSP ID: ENSP00000433725
MAAARLLPVPAGPQAKLTFEDVAVLLSQDEWDRLCPAQRGLYRNV

SEQ ID NO: 99448 - protein, 127 aa, Homo sapiens
  Payload ID: 19829
  Gene Name: zinc finger protein 250
  ENSP ID: ENSP00000433920
MAAARLLPVPAGPQPLSFQAKLTFEDVAVLLSQDEWDRLCPAQRGLYRNVMMETYGNVVSLGLPGSKPDIISQLERGEDPWVLDRKGAKKSQGLWSDYSDNLKYDHTTACTQQDSLSCPWDPVPQKP

SEQ ID NO: 99449 - protein, 671 aa, Homo sapiens
  Payload ID: 19830
  Gene Name: zinc finger protein 251
  Uniprot ID: Q9BRH9
  ENSP ID: ENSP00000292562
MAATFQLPGHQEMPLTFQDVAVYFSQAEGRQLGPQQRALYRDVMLENYGNVASLGFPVPKPELISQLEQGKELWVLNLLGAEEPDILKSCQKDSEVGTKKELSILNQKFSEEVKTPEFVSRRLLRDNAQAAEFREAWGREGKLKERVGNSAGQSLNKPNIHKRVLTEATVGRERSLGERTQECSAFDRNLNLDQNVVRLQRNKTGERVFKCDICSKTFKYNSDLSRHQRSHTGEKPYECGRCGRAFTHSSNLVLHHHIHTGNKPFKCDECGKTFGLNSHLRLHRRIHTGEKPFGCGECGKAFSRSSTLIQHRIIHTGEKPYKCNECGRGFSQSPQLTQHQRIHTGEKPHECSHCGKAFSRSSSLIQHERIHTGEKPHKCNQCGKAFSQSSSLFLHHRVHTGEKPYVCNECGRAFGFNSHLTEHVRIHTGEKPYVCNECGKAFRRSSTLVQHRRVHTGEKPYQCVECGKAFSQSSQLTLHQRVHTGEKPYDCGDCGKAFSRRSTLIQHQKVHSGETRKCRKHGPAFVHGSSLTADGQIPTGEKHGRAFNHGANLILRWTVHTGEKSFGCNEYGKAFSPTSRPTEDQIMHAGEKPYKCQECGNAFSGKSTLIQHQVTHTGQKPCHCSVYGKAFSQSSQLTPPQQTRVGEKPALNDGSKRYFIHIKKIFQERHF

SEQ ID NO: 99450 - protein, 147 aa, Homo sapiens
  Payload ID: 19830
  Gene Name: zinc finger protein 251
  ENSP ID: ENSP00000431809
  MOD_RES (1)..(1): Any amino acid
XRFLGGFPGSSKQVSSGRLQARAVSCLLLETTAAHAHRMAATFQLPGHQEMPLTFQDVAVYFSQAEGRQLGPQQRALYRDVMLENYGNVASLGFPVPKPELISQLEQGKELWVLNLLGAEEPDILKSCQKGENGWDANPGSSLPILP

SEQ ID NO: 99451 - protein, 671 aa, Homo sapiens; identical to SEQ ID NO: 99449
  Payload ID: 19830
  Gene Name: zinc finger protein 251
  Uniprot ID: Q9BRH9
  ENSP ID: ENSP00000477765

SEQ ID NO: 99452 - protein, 147 aa, Homo sapiens; identical to SEQ ID NO: 99450
  Payload ID: 19830
  Gene Name: zinc finger protein 251
  ENSP ID: ENSP00000488718
  MOD_RES (1)..(1): Any amino acid

SEQ ID NO: 99453 - protein, 423 aa, Homo sapiens
  Payload ID: 19831
  Gene Name: zinc finger protein 253
  Uniprot ID: O75346
  ENSP ID: ENSP00000347868
MSSHFAQDLWPENIQNSFQIGMLRRYEECRHDNLQLKKGCKSVGEHKVHKGGYNGLNQCLTTTQKEIFQCDKYGKVFHKFSNSNTYKTRHTGINLFKCIICGKAFKRSSTLTTHKKIHTGEKPYRCEECGKAFNQSANLTTHKRIHTGEKPYRCEECGKAFKQSSNLTTHKKIHTGEKPYKCEECGKAFNRSTDLTTHKIVHTGEKPYKCEECGKAFKHPSHVTTHKKIHTRGKPYNCEECGKSFKHCSNLTIHKRIHTGEKPYKCEECGKAFHLSSHLTTHKILHTGEKPYRCRECGKAFNHSTTLFSHEKIHTGEKPYKCDECGKTFTWPSILSKHKRTHTGEKPYKCEECGKSFTASSTLTTHKRIHTGEKPYKCEECGKAFNWSSDLNKHKKIHIERKPYIVKNVTDLLNVPPLLISIR

SEQ ID NO: 99454 - protein, 214 aa, Homo sapiens
  Payload ID: 19831
  Gene Name: zinc finger protein 253
  ENSP ID: ENSP00000467235
MERHEMIAKPPVMSSHFAQDLWPENIQNSFQIGMLRRYEECRHDNLQLKKGCKSVGEHKVHKGGYNGLNQCLTTTQKEIFQCDKYGKVFHKFSNSNTYKTRHTGINLFKCIICGKAFKRSSTLTTHKKIHTGEKPYRCEECGKAFNQSANLTTHKRIHTGEKPYRCEECGKAFKQSSNLTTHKKIHTGEKPYKCEECGKAFNRSTDLTTHKIVH

SEQ ID NO: 99455 - protein, 499 aa, Homo sapiens
  Payload ID: 19831
  Gene Name: zinc finger protein 253
  Uniprot ID: O75346
  ENSP ID: ENSP00000468720
MGPLQFRDVAIEFSLEEWHCLDTAQRNLYRDVMLENYRNLVFLGIVVSKPDLVTCLEQGKKPLTMERHEMIAKPPVMSSHFAQDLWPENIQNSFQIGMLRRYEECRHDNLQLKKGCKSVGEHKVHKGGYNGLNQCLTTTQKEIFQCDKYGKVFHKFSNSNTYKTRHTGINLFKCIICGKAFKRSSTLTTHKKIHTGEKPYRCEECGKAFNQSANLTTHKRIHTGEKPYRCEECGKAFKQSSNLTTHKKIHTGEKPYKCEECGKAFNRSTDLTTHKIVHTGEKPYKCEECGKAFKHPSHVTTHKKIHTRGKPYNCEECGKSFKHCSNLTIHKRIHTGEKPYKCEECGKAFHLSSHLTTHKILHTGEKPYRCRECGKAFNHSTTLFSHEKIHTGEKPYKCDECGKTFTWPSILSKHKRTHTGEKPYKCEECGKSFTASSTLTTHKRIHTGEKPYKCEECGKAFNWSSDLNKHKKIHIERKPYIVKNVTDLLNVPPLLISIR

SEQ ID NO: 99456 - protein, 91 aa, Homo sapiens
  Payload ID: 19832
  Gene Name: zinc finger protein 254
  ENSP ID: ENSP00000341573
MPGPPRSLEMGLLTFRDVAIEFSLEEWQHLDIAQQNLYRNVMLENYRNLAFLGIAVSKPDLITCLEQGKEPWNMKRHEMVDEPPGLDFSLL

SEQ ID NO: 99457 - protein, 659 aa, Homo sapiens
  Payload ID: 19832
  Gene Name: zinc finger protein 254
  Uniprot ID: O75437
  ENSP ID: ENSP00000349494
MPGPPRSLEMGLLTFRDVAIEFSLEEWQHLDIAQQNLYRNVMLENYRNLAFLGIAVSKPDLITCLEQGKEPWNMKRHEMVDEPPGMCPHFAQDLWPEQGMEDSFQKAILRRYGKYGHENLQLRKGCKSVDEYKVNKEGYNGLNQCFTTAQSKVFQCDKYLKVFYKFLNSNRPKIRHTEKKSFKCKKRVKLFCMLSHKTQHKSIYHREKSYKCKECGKTFNWSSTLTNHRKIYTEEKPYKCEEYNKSPKQLSTLTTHEIIHAGEKLYKCEECGEAFNRSSNLTTHKIIHTGEKPYKCEECGKAFIWSSTLTEHKKIHTRKKPYKCEECGKAFIWSSTLTRHKRMHTGEKPYKCEECGKAFSQSSTLTTHKIIHTGEKRYKCLECGKAFKQLSTLTTHKIIHVGEKLYKCEECGKGFNRSSNLTTHKIIHTGEKPYKCEECGKAFIWSSTLTKHKRIHTREKPYKCEECGKAFIWSSTLTRHKRMHTGEKPYKCEECGKSFSQSSTLTTHKIIHTGEKPYKCEECGKAFNWSSTLTKHKIIHTEEKPYKCEKCGKAFKQSSILTNHKRIHTGEKPYKCEECGKSFNRSSTFTKHKVIHTGVKPYKCEECGKAFFWSSTLTKHKRIHTGEQPYKWEKFGKAFNRSSHLTTDKITHWREILQV

SEQ ID NO: 99458 - protein, 574 aa, Homo sapiens
  Payload ID: 19832
  Gene Name: zinc finger protein 254
  ENSP ID: ENSP00000445527
MCPHFAQDLWPEQGMEDSFQKAILRRYGKYGHENLQLRKGCKSVDEYKVNKEGYNGLNQCFTTAQSKVFQCDKYLKVFYKFLNSNRPKIRHTEKKSFKCKKRVKLFCMLSHKTQHKSIYHREKSYKCKECGKTFNWSSTLTNHRKIYTEEKPYKCEEYNKSPKQLSTLTTHEIIHAGEKLYKCEECGEAFNRSSNLTTHKIIHTGEKPYKCEECGKAFIWSSTLTEHKKIHTRKKPYKCEECGKAFIWSSTLTRHKRMHTGEKPYKCEECGKAFSQSSTLTTHKIIHTGEKRYKCLECGKAFKQLSTLTTHKIIHVGEKLYKCEECGKGFNRSSNLTTHKIIHTGEKPYKCEECGKAFIWSSTLTKHKRIHTREKPYKCEECGKAFIWSSTLTRHKRMHTGEKPYKCEECGKSFSQSSTLTTHKIIHTGEKPYKCEECGKAFNWSSTLTKHKIIHTEEKPYKCEKCGKAFKQSSILTNHKRIHTGEKPYKCEECGKSFNRSSTFTKHKVIHTGVKPYKCEECGKAFFWSSTLTKHKRIHTGEQPYKWEKFGKAFNRSSHLTTDKITHWREILQV

SEQ ID NO: 99459 - protein, 53 aa, Homo sapiens
  Payload ID: 19832
  Gene Name: zinc finger protein 254
  ENSP ID: ENSP00000470845
MPGPPRSLEMMESRSVGQAGVQRRNLSSLQALSPGFTPFSASRAAGTTGTVDI

SEQ ID NO: 99460 - protein, 75 aa, Homo sapiens
  Payload ID: 19832
  Gene Name: zinc finger protein 254
  ENSP ID: ENSP00000472863
MPGPPRSLEMMESRSVGQAGVQRRNLSSLQALSPGFTPFSASRAAGTTDGVSLCHPGWSQWHNLGSLQPLPPGFK

SEQ ID NO: 99461 - protein, 618 aa, Homo sapiens
  Payload ID: 19832
  Gene Name: zinc finger protein 254
  ENSP ID: ENSP00000482703
MLENYRNLAFLGIAVSKPDLITCLEQGKEPWNMKRHEMVDEPPGMCPHFAQDLWPEQGMEDSFQKAILRRYGKYGHENLQLRKGCKSVDEYKVNKEGYNGLNQCFTTAQSKVFQCDKYLKVFYKFLNSNRPKIRHTEKKSFKCKKRVKLFCMLSHKTQHKSIYHREKSYKCKECGKTFNWSSTLTNHRKIYTEEKPYKCEEYNKSPKQLSTLTTHEIIHAGEKLYKCEECGEAFNRSSNLTTHKIIHTGEKPYKCEECGKAFIWSSTLTEHKKIHTRKKPYKCEECGKAFIWSSTLTRHKRMHTGEKPYKCEECGKAFSQSSTLTTHKIIHTGEKRYKCLECGKAFKQLSTLTTHKIIHVGEKLYKCEECGKGFNRSSNLTTHKIIHTGEKPYKCEECGKAFIWSSTLTKHKRIHTREKPYKCEECGKAFIWSSTLTRHKRMHTGEKPYKCEECGKSFSQSSTLTTHKIIHTGEKPYKCEECGKAFNWSSTLTKHKIIHTEEKPYKCEKCGKAFKQSSILTNHKRIHTGEKPYKCEECGKSFNRSSTFTKHKVIHTGVKPYKCEECGKAFFWSSTLTKHKRIHTGEQPYKWEKFGKAFNRSSHLTTDKITHWREILQV

SEQ ID NO: 99462 - protein, 586 aa, Homo sapiens
  Payload ID: 19832
  Gene Name: zinc finger protein 254
  ENSP ID: ENSP00000483222
MKRHEMVDEPPGMCPHFAQDLWPEQGMEDSFQKAILRRYGKYGHENLQLRKGCKSVDEYKVNKEGYNGLNQCFTTAQSKVFQCDKYLKVFYKFLNSNRPKIRHTEKKSFKCKKRVKLFCMLSHKTQHKSIYHREKSYKCKECGKTFNWSSTLTNHRKIYTEEKPYKCEEYNKSPKQLSTLTTHEIIHAGEKLYKCEECGEAFNRSSNLTTHKIIHTGEKPYKCEECGKAFIWSSTLTEHKKIHTRKKPYKCEECGKAFIWSSTLTRHKRMHTGEKPYKCEECGKAFSQSSTLTTHKIIHTGEKRYKCLECGKAFKQLSTLTTHKIIHVGEKLYKCEECGKGFNRSSNLTTHKIIHTGEKPYKCEECGKAFIWSSTLTKHKRIHTREKPYKCEECGKAFIWSSTLTRHKRMHTGEKPYKCEECGKSFSQSSTLTTHKIIHTGEKPYKCEECGKAFNWSSTLTKHKIIHTEEKPYKCEKCGKAFKQSSILTNHKRIHTGEKPYKCEECGKSFNRSSTFTKHKVIHTGVKPYKCEECGKAFFWSSTLTKHKRIHTGEQPYKWEKFGKAFNRSSHLTTDKITHWREILQV

SEQ ID NO: 99463 - protein, 574 aa, Homo sapiens; identical to SEQ ID NO: 99458
  Payload ID: 19832
  Gene Name: zinc finger protein 254
  ENSP ID: ENSP00000484930

SEQ ID NO: 99464 - protein, 627 aa, Homo sapiens
  Payload ID: 19833
  Gene Name: zinc finger protein 256
  Uniprot ID: Q9Y2P7
  ENSP ID: ENSP00000282308
MAAAELTAPAQGIVTFEDVAVYFSWKEWGLLDEAQKCLYHDVMLENLTLTTSLGGSGAGDEEAPYQQSTSPQRVSQVRIPKALPSPQKTNPCEICGPVLRQILHLVEHQGTHHGQKLYTDGACRKQLQFTAYLHQHQKQHVGQKHFRSNGGRDMFLSSCTFEVSGKPFTCKEVGKDFLVRSRFLQQQAAHTRKKSNRTKSAVAFHSVKNHYNWGECVKAFSYKHVRVQHQGDLIRERSYMCSECGKSFSTSCSLSDHLRVHTSEKPYTCGECGKSYRQSSSLITHRRIHTGVRPHQCDECGKLFNRKYDLLIHQRVHTGERPYKCSECGKSFSHSSSLITHQRIHTGMRPYECSECGKSFIHSSSLITHQRVHTGTRPYMCSECGKSFSQSCHLIKHRRLHIGEGPYECSECGKLFTYRSRFFQHQRVHTGVRSHECHECGKLFSRKFDLIVHERVHTGERPYECSECGKSFTCKSYLISHWKVHTGARPYECGECGKSFTHSSTLLQHQRVHTGERPYECNECGKFFSQSSSLIRHRRSHTGERPYECSECWKSFSNHSSLVKHRRVHTGERPYECSECGKSFSQSSNLTNHQRIHSGERPYECSDCGKFFTFNSNLLKHQNVHKG

SEQ ID NO: 99465 - protein, 56 aa, Homo sapiens
  Payload ID: 19833
  Gene Name: zinc finger protein 256
  ENSP ID: ENSP00000472858
MAAAELTAPAQVVLEQGMRRHLISRALLHSGCHRLGFLRPFLLPRRPTPVRYVAQS

SEQ ID NO: 99466 - protein, 35 aa, Homo sapiens
  Payload ID: 19834
  Gene Name: zinc finger protein 257
  ENSP ID: ENSP00000406147
MMESCSVVRLECSGMISALCNLRLPGSSNSPASAS

SEQ ID NO: 99467 - protein, 136 aa, Homo sapiens
  Payload ID: 19834
  Gene Name: zinc finger protein 257
  ENSP ID: ENSP00000469454
MGPLTIRDVTVEFSLEEWHCLDTAQQNLYRDVMLENYRNLVFLGIAVSKPDLITCLEQGKEPCNMKRHEMVAKPPDGGSLFLPRLKCNGAVSAHRKLLLPGSSDSLASAFQVAGITGTRHHAWLIFVFLVDMGFHH

SEQ ID NO: 99468 - protein, 82 aa, Homo sapiens
  Payload ID: 19834
  Gene Name: zinc finger protein 257
  ENSP ID: ENSP00000469703
MGPLTIRDVTVEFSLEEWHCLDTAQQNLYRDVMLENYRNLVFLGIAVSKPDLITCLEQGKEPCNMKRHEMVAKPPAFYLMGE

SEQ ID NO: 99469 - protein, 563 aa, Homo sapiens
  Payload ID: 19834
  Gene Name: zinc finger protein 257
  Uniprot ID: Q9Y2Q1
  ENSP ID: ENSP00000470209
MGPLTIRDVTVEFSLEEWHCLDTAQQNLYRDVMLENYRNLVFLGIAVSKPDLITCLEQGKEPCNMKRHEMVAKPPVMCSHIAEDLCPERDIKYFFQKVILRRYDKCEHENLQLRKGCKSVDECKVCKGGYNGLNQCLITTQSKMYQCDKYVKVFYKFSNSDRHKIRHTEKKTCKCKECGKSFCMLSQLTRHKRIHIRENSHKCEECGKAFNQSSALTRHKMTHTGEKPYKCEECGKAFNRSSHLTQHKVIHTREKPYKCEECGKAFNRSSHITQHKRIHNREKPFKYDECCKAFKWSSALTTLTQHKRIHTGEKPYKCEECGKAFNQSSALTRHKMIHTGEKPFQCEECGKAFNRSSHLTQHKIIHTKEKPYKCEECGKAFNRSSHLTKHKRIHTREKAYKCDEYCKAFNWSSALTTLTQHKIIHTGEKPYKCEECGKAFNRSSYLIRHKIIHTGEKPYKCEECGKAFNQSSHLTQHKIIHTGEKPYKCEECGKAFNRSSHLSQHKIIHTGEKPYKCEECGKPFNRFSYLTVHKRIHAGENPNKYEECGKACNHSSNLTKHNS

SEQ ID NO: 99470 - protein, 132 aa, Homo sapiens
  Payload ID: 19834
  Gene Name: zinc finger protein 257
  ENSP ID: ENSP00000471334
MCSHIAEDLCPERDIKYFFQKVILRRYDKCEHENLQLRKGCKSVDECKVCKGGYNGLNQCLITTQSKMYQCDKYVKVFYKFSNSDRHKIRHTEKKTCKCKECGKSFCMLSQLTRHKRIHIRENSHKCEECGK

SEQ ID NO: 99471 - protein, 35 aa, Homo sapiens; identical to SEQ ID NO: 99466
  Payload ID: 19834
  Gene Name: zinc finger protein 257
  ENSP ID: ENSP00000472944

SEQ ID NO: 99472 - protein, 533 aa, Homo sapiens
  Payload ID: 19835
  Gene Name: zinc finger protein 26
  Uniprot ID: P17031
  ENSP ID: ENSP00000333725
MATSFRTASCWGLLSFKDISMEFTWDEWQLLDSTQKYLYRDVILENYHNLISVGYHGTKPDLIFKLEQGEDPWIINAKISRQSCPDGWEEWYQNNQDELESIERSYACSVLGRLNLSKTHDSSRQRLYNTRGKSLTQNSAPSRSYLRKNPDKFHGYEEPYFLKHQRAHSIEKNCVCSECGKAFRCKSQLIVHLRIHTGERPYECSKCERAFSAKSNLNAHQRVHTGEKPYSCSECEKVFSFRSQLIVHQEIHTGGKPYGCSECGKAYSWKSQLLLHQRSHTGVKPYECSECGKAFSLKSPFVVHQRTHTGVKPHKCSECGKAFRSKSYLLVHIRMHTGEKPYQCSDCGKAFNMKTQLIVHQGVHTGNNPYQCGECGKAFGRKEQLTAHLRAHAGEKPYGCSECGKAFSSKSYLVIHRRTHTGERPYECSLCERAFCGKSQLIIHQRTHSTEKPYECNECEKAYPRKASLQIHQKTHSGEKPFKCSECGKAFTQKSSLSEHQRVHTGEKPWKCSECGKSFCWNSGLRIHRKTHK

SEQ ID NO: 99473 - protein, 513 aa, Homo sapiens
  Payload ID: 19835
  Gene Name: zinc finger protein 26
  ENSP ID: ENSP00000437420
MEFTWDEWQLLDSTQKYLYRDVILENYHNLISVGYHGTKPDLIFKLEQGEDPWIINAKISRQSCPDGWEEWYQNNQDELESIERSYACSVLGRLNLSKTHDSSRQRLYNTRGKSLTQNSAPSRSYLRKNPDKFHGYEEPYFLKHQRAHSIEKNCVCSECGKAFRCKSQLIVHLRIHTGERPYECSKCERAFSAKSNLNAHQRVHTGEKPYSCSECEKVFSFRSQLIVHQEIHTGGKPYGCSECGKAYSWKSQLLLHQRSHTGVKPYECSECGKAFSLKSPFVVHQRTHTGVKPHKCSECGKAFRSKSYLLVHIRMHTGEKPYQCSDCGKAFNMKTQLIVHQGVHTGNNPYQCGECGKAFGRKEQLTAHLRAHAGEKPYGCSECGKAFSSKSYLVIHRRTHTGERPYECSLCERAFCGKSQLIIHQRTHSTEKPYECNECEKAYPRKASLQIHQKTHSGEKPFKCSECGKAFTQKSSLSEHQRVHTGEKPWKCSECGKSFCWNSGLRIHRKTHK

SEQ ID NO: 99474 - protein, 80 aa, Homo sapiens
  Payload ID: 19835
  Gene Name: zinc finger protein 26
  ENSP ID: ENSP00000443888
MATSFRTASCWGLLSFKDISMEFTWDEWQLLDSTQKYLYRDVILENYHNLISVDGWEEWYQNNQDELESIERSYACSVLG

SEQ ID NO: 99475 - protein, 153 aa, Homo sapiens
  Payload ID: 19835
  Gene Name: zinc finger protein 26
  ENSP ID: ENSP00000445494
MATSFRTASCWVVLLRRSLLMSSSVKFGNLLGVPWAQGNSALPEGLLSFKDISMEFTWDEWQLLDSTQKYLYRDVILENYHNLISVGYHGTKPDLIFKLEQGEDPWIINAKISRQSCPDGWEEWYQNNQDELESIERSYACSVLGRLNLSKTH

SEQ ID NO: 99476 - protein, 412 aa, Homo sapiens
  Payload ID: 19836
  Gene Name: zinc finger protein 260
  Uniprot ID: Q3ZCT1
  ENSP ID: ENSP00000429803
MIGMLESLQHESDLLQHDQIHTGEKPYECNECRKTFSLKQNLVEHKKMHTGEKSHECTECGKVCSRVSSLTLHLRSHTGKKAYKCNKCGKAFSQKENFLSHQKHHTGEKPYECEKVSIQMPTIIRHQKNHTGTKPYACKECGKAFNGKAYLTEHEKIHTGEKPFECNQCGRAFSQKQYLIKHQNIHTGKKPFKCSECGKAFSQKENLIIHQRIHTGEKPYECKGCGKAFIQKSSLIRHQRSHTGEKPYTCKECGKAFSGKSNLTEHEKIHIGEKPYKCNECGTIFRQKQYLIKHHNIHTGEKPYECNKCGKAFSRITSLIVHVRIHTGDKPYECKVCGKAFCQSSSLTVHMRSHTGEKPYGCNECGKAFSQFSTLALHMRIHTGEKPYQCSECGKAFSQKSHHIRHQRIHTH

SEQ ID NO: 99477 - protein, 412 aa, Homo sapiens; identical to SEQ ID NO: 99476
  Payload ID: 19836
  Gene Name: zinc finger protein 260
  Uniprot ID: Q3ZCT1
  ENSP ID: ENSP00000464964

SEQ ID NO: 99478 - protein, 412 aa, Homo sapiens; identical to SEQ ID NO: 99476
  Payload ID: 19836
  Gene Name: zinc finger protein 260
  Uniprot ID: Q3ZCT1
  ENSP ID: ENSP00000465834

SEQ ID NO: 99479 - protein, 412 aa, Homo sapiens; identical to SEQ ID NO: 99476
  Payload ID: 19836
  Gene Name: zinc finger protein 260
  Uniprot ID: Q3ZCT1
  ENSP ID: ENSP00000467219

SEQ ID NO: 99480 - protein, 683 aa, Homo sapiens
  Payload ID: 19837
  Gene Name: zinc finger protein 263
  Uniprot ID: O14978
  ENSP ID: ENSP00000219069
MASGPGSQEREGLLIVKLEEDCAWSQELPPPDPGPSPEASHLRFRRFRFQEAAGPREALSRLQELCHGWLRPEMRTKEQILELLVLEQFLTILPQEIQSRVQELHPESGEEAVTLVEDMQRELGRLRQQVTNHGRGTEVLLEEPLPLETARESPSFKLEPMETERSPGPRLQELLGPSPQRDPQAVKERALSAPWLSLFPPEGNMEDKEMTGPQLPESLEDVAMYISQEEWGHQDPSKRALSRDTVQESYENVDSLESHIPSQEVPGTQVGQGGKLWDPSVQSCKEGLSPRGPAPGEEKFENLEGVPSVCSENIHPQVLLPDQARGEVPWSPELGRPHDRSQGDWAPPPEGGMEQALAGASSGRELGRPKELQPKKLHLCPLCGKNFSNNSNLIRHQRIHAAERLCMGVDCTEIFGGNPRFLSLHRAHLGEEAHKCLECGKCFSQNTHLTRHQRTHTGEKPYQCNICGKCFSCNSNLHRHQRTHTGEKPYKCPECGEIFAHSSNLLRHQRIHTGERPYKCPECGKSFSRSSHLVIHERTHERERLYPFSECGEAVSDSTPFLTNHGAHKAEKKLFECLTCGKSFRQGMHLTRHQRTHTGEKPYKCTLCGENFSHRSNLIRHQRIHTGEKPYTCHECGDSFSHSSNRIRHLRTHTGERPYKCSECGESFSRSSRLMSHQRTHTG

SEQ ID NO: 99481 - protein, 331 aa, Homo sapiens
  Payload ID: 19837
  Gene Name: zinc finger protein 263
  ENSP ID: ENSP00000444497
MEQALAGASSGRELGRPKELQPKKLHLCPLCGKNFSNNSNLIRHQRIHAAERLCMGVDCTEIFGGNPRFLSLHRAHLGEEAHKCLECGKCFSQNTHLTRHQRTHTGEKPYQCNICGKCFSCNSNLHRHQRTHTGEKPYKCPECGEIFAHSSNLLRHQRIHTGERPYKCPECGKSFSRSSHLVIHERTHERERLYPFSECGEAVSDSTPFLTNHGAHKAEKKLFECLTCGKSFRQGMHLTRHQRTHTGEKPYKCTLCGENFSHRSNLIRHQRIHTGEKPYTCHECGDSFSHSSNRIRHLRTHTGERPYKCSECGESFSRSSRLMSHQRTHTG

SEQ ID NO: 99482 - protein, 115 aa, Homo sapiens
  Payload ID: 19837
  Gene Name: zinc finger protein 263
  ENSP ID: ENSP00000458214
  MOD_RES (1)..(1): Any amino acid
XFRFQEAAGPREALSRLQELCHGWLRPEMRTKEQILELLVLEQFLTILPQEIQSRVQELHPESGEEAVTLVEDMQRELGRLRQQSLTFPVRRSQAPRWDKEESYGIPVSRAARRA

SEQ ID NO: 99483 - protein, 226 aa, Homo sapiens
  Payload ID: 19837
  Gene Name: zinc finger protein 263
  ENSP ID: ENSP00000459998
MASGPGSQEREGLLIVKLEEDCAWSQELPPPDPGPSPEASHLRFRRFRFQEAAGPREALSRLQELCHGWLRPEMRTKEQILELLVLEQFLTILPQEIQSRVQELHPESGEEAVTLVEDMQRELGRLRQQEKRNLRTWKVFRLYALRTSTLRCCFLTRPEGRCPGVLSWEDLMTGRKGIGRLPQRVEWSRPWQEPQVAENWGDRRNCSQRNSIYVPCVAKISLTTQT

SEQ ID NO: 99484 - protein, 149 aa, Homo sapiens
  Payload ID: 19837
  Gene Name: zinc finger protein 263
  ENSP ID: ENSP00000460278
MASGPGSQEREGLLIVKLEEDCAWSQELPPPDPGPSPEASHLRFRRFRFQEAAGPREALSRLQELCHGWLRPEMRTKEQILELLVLEQFLTILPQEIQSRVQELHPESGEEAVTLVEDMQRELGRLRQQHYLLPGFLFFLLKGTWKTRR

SEQ ID NO: 99485 - protein, 115 aa, Homo sapiens
  Payload ID: 19837
  Gene Name: zinc finger protein 263
  ENSP ID: ENSP00000461146
  MOD_RES (1)..(1): Any amino acid
XAEKKLFECLTCGKSFRQGMHLTRHQRTHTGEKPYKCTLCGENFSHRSNLIRHQRIHTGEKPYTCHECGDSFSHSSNRIRHLRTHTGERPYKCSECGESFSRSSRLMSHQRTHTV

SEQ ID NO: 99486 - protein, 51 aa, Homo sapiens
  Payload ID: 19837
  Gene Name: zinc finger protein 263
  ENSP ID: ENSP00000461755
CHECGDSFSHSSNRIRHLRTHTGERPYKCSECGESFSRSSRLMSHQRTHTV

SEQ ID NO: 99487 - protein, 141 aa, Homo sapiens
  Payload ID: 19837
  Gene Name: zinc finger protein 263
  ENSP ID: ENSP00000461861
MASGPGSQEREGLLIVKLEEDCAWSQELPPPDPGPSPEASHLRFRRFRFQEAAGPREALSRLQELCHGWLRPEMRTKEQILELLVLEQFLTILPQEIQSRVQELHPESGEEAVTLVEDMQRELGRLRQQLPESLEDVAMYI

SEQ ID NO: 99488 - protein, 627 aa, Homo sapiens
  Payload ID: 19838
  Gene Name: zinc finger protein 264
  Uniprot ID: O43296
  ENSP ID: ENSP00000263095
MAAAVLTDRAQVSVTFDDVAVTFTKEEWGQLDLAQRTLYQEVMLENCGLLVSLGCPVPKAELICHLEHGQEPWTRKEDLSQDTCPGDKGKPKTTEPTTCEPALSEGISLQGQVTQGNSVDSQLGQAEDQDGLSEMQEGHFRPGIDPQEKSPGKMSPECDGLGTADGVCSRIGQEQVSPGDRVRSHNSCESGKDPMIQEEENNFKCSECGKVFNKKHLLAGHEKIHSGVKPYECTECGKTFIKSTHLLQHHMIHTGERPYECMECGKAFNRKSYLTQHQRIHSGEKPYKCNECGKAFTHRSNFVLHNRRHTGEKSFVCTECGQVFRHRPGFLRHYVVHSGENPYECLECGKVFKHRSYLMWHQQTHTGEKPYECSECGKVFLESAALIHHYVIHTGEKPFECLECGKAFNHRSYLKRHQRIHTGEKPFVCSECGKAFTHCSTFILHKRAHTGEKPFECKECGKAFSNRKDLIRHFSIHTGEKPYECVECGKAFTRMSGLTRHKRIHSGEKPYECVECGKSFCWSTNLIRHAIIHTGEKPYKCSECGKAFSRSSSLTQHQRMHTGKNPISVTDVGRPFTSGQTSVTLRELLLGKDFLNVTTEANILPEETSSSASDQPYQRETPQVSSL

SEQ ID NO: 99489 - protein, 627 aa, Homo sapiens; identical to SEQ ID NO: 99488
  Payload ID: 19838
  Gene Name: zinc finger protein 264
  Uniprot ID: O43296
  ENSP ID: ENSP00000440376

SEQ ID NO: 99490 - protein, 39 aa, Homo sapiens
  Payload ID: 19838
  Gene Name: zinc finger protein 264
  ENSP ID: ENSP00000469130
MAAAVLTDRAQVSVTFDDVAVTFTKEEWGQLDLAQRTLY

SEQ ID NO: 99491 - protein, 96 aa, Homo sapiens
  Payload ID: 19838
  Gene Name: zinc finger protein 264
  ENSP ID: ENSP00000470587
MAAAVLTDRAQVSVTFDDVAVTFTKEEWGQLDLAQRTLYQEVMLENCGLLVSLGDKGKPKTTEPTTCEPALSEGISLQGQVTQGNSVDSQLGQAED

SEQ ID NO: 99492 - protein, 84 aa, Homo sapiens
  Payload ID: 19838
  Gene Name: zinc finger protein 264
  ENSP ID: ENSP00000470759
MAAAVLTDRAQVSVTFDDVAVTFTKEEWGQLDLAQRTLYQEVMLENCGLLVSLAPLQTHPGSIRCILQSNQVDTLIKIPEHTEH

SEQ ID NO: 99493 - protein, 64 aa, Homo sapiens
  Payload ID: 19838
  Gene Name: zinc finger protein 264
  ENSP ID: ENSP00000471630
MAAAVLTDRAQVSVTFDDVAVTFTKEEWGQLDLAQRTLYQEVMLENCGLLVSLGKAFLPPPPCR

SEQ ID NO: 99494 - protein, 549 aa, Homo sapiens
  Payload ID: 19839
  Gene Name: zinc finger protein 266
  Uniprot ID: Q14584
  ENSP ID: ENSP00000466714
MLENYKNLATVGYQLFKPSLISWLEQEESRTVQRGDFQASEWKVQLKTKELALQQDVLGEPTSSGIQMIGSHNGGEVSDVKQCGDVSSEHSCLKTHVRTQNSENTFECYLYGVDFLTLHKKTSTGEQRSVFSQCGKAFSLNPDVVCQRTCTGEKAFDCSDSGKSFINHSHLQGHLRTHNGESLHEWKECGRGFIHSTDLAVRIQTHRSEKPYKCKECGKGFRYSAYLNIHMGTHTGDNPYECKECGKAFTRSCQLTQHRKTHTGEKPYKCKDCGRAFTVSSCLSQHMKIHVGEKPYECKECGIAFTRSSQLTEHLKTHTAKDPFECKICGKSFRNSSCLSDHFRIHTGIKPYKCKDCGKAFTQNSDLTKHARTHSGERPYECKECGKAFARSSRLSEHTRTHTGEKPFECVKCGKAFAISSNLSGHLRIHTGEKPFECLECGKAFTHSSSLNNHMRTHSAKKPFTCMECGKAFKFPTCVNLHMRIHTGEKPYKCKQCGKSFSYSNSFQLHERTHTGEKPYECKECGKAFSSSSSFRNHERRHADERLSA

SEQ ID NO: 99495 - protein, 549 aa, Homo sapiens; identical to SEQ ID NO: 99494
  Payload ID: 19839
  Gene Name: zinc finger protein 266
  Uniprot ID: Q14584
  ENSP ID: ENSP00000467151

SEQ ID NO: 99496 - protein, 549 aa, Homo sapiens; identical to SEQ ID NO: 99494
  Payload ID: 19839
  Gene Name: zinc finger protein 266
  Uniprot ID: Q14584
  ENSP ID: ENSP00000467315

SEQ ID NO: 99497 - protein, 549 aa, Homo sapiens; identical to SEQ ID NO: 99494
  Payload ID: 19839
  Gene Name: zinc finger protein 266
  Uniprot ID: Q14584
  ENSP ID: ENSP00000467403

SEQ ID NO: 99498 - protein, 72 aa, Homo sapiens
  Payload ID: 19839
  Gene Name: zinc finger protein 266
  ENSP ID: ENSP00000467923
MLENYKNLATVGYQLFKPSLISWLEQEESRTVQRGDFQASEWKVQLKTKELALQQDVLGEPTSSGIQMIGSH

SEQ ID NO: 99499 - protein, 549 aa, Homo sapiens; identical to SEQ ID NO: 99494
  Payload ID: 19839
  Gene Name: zinc finger protein 266
  Uniprot ID: Q14584
  ENSP ID: ENSP00000468491

SEQ ID NO: 99500 - protein, 743 aa, Homo sapiens
  Payload ID: 19840
  Gene Name: zinc finger protein 267
  Uniprot ID: Q14586
  ENSP ID: ENSP00000300870
MGLLTFRDVAVEFSLEEWEHLEPAQKNLYQDVMLENYRNLVSLGLVVSKPDLITFLEQRKEPWNVKSEETVAIQPDVFSHYNKDLLTEHCTEASFQKVISRRHGSCDLENLHLRKRWKREECEGHNGCYDEKTFKYDQFDESSVESLFHQQILSSCAKSYNFDQYRKVFTHSSLLNQQEEIDIWGKHHIYDKTSVLFRQVSTLNSYRNVFIGEKNYHCNNSEKTLNQSSSPKNHQENYFLEKQYKCKEFEEVFLQSMHGQEKQEQSYKCNKCVEVCTQSLKHIQHQTIHIRENSYSYNKYDKDLSQSSNLRKQIIHNEEKPYKCEKCGDSLNHSLHLTQHQIIPTEEKPCKWKECGKVFNLNCSLYLTKQQQIDTGENLYKCKACSKSFTRSSNLIVHQRIHTGEKPYKCKECGKAFRCSSYLTKHKRIHTGEKPYKCKECGKAFNRSSCLTQHQTTHTGEKLYKCKVCSKSYARSSNLIMHQRVHTGEKPYKCKECGKVFSRSSCLTQHRKIHTGENLYKCKVCAKPFTCFSNLIVHERIHTGEKPYKCKECGKAFPYSSHLIRHHRIHTGEKPYKCKACSKSFSDSSGLTVHRRTHTGEKPYTCKECGKAFSYSSDVIQHRRIHTGQRPYKCEECGKAFNYRSYLTTHQRSHTGERPYKCEECGKAFNSRSYLTTHRRRHTGERPYKCDECGKAFSYRSYLTTHRRSHSGERPYKCEECGKAFNSRSYLIAHQRSHTREKL

SEQ ID NO: 99501 - protein, 49 aa, Homo sapiens
  Payload ID: 19840
  Gene Name: zinc finger protein 267
  ENSP ID: ENSP00000454369
  MOD_RES (1)..(1): Any amino acid
XLRVFRSGRPRRLRVLRINRTSVALRLAGTGRFVAKTPGHPGSWEMGPV

SEQ ID NO: 99502 - protein, 51 aa, Homo sapiens
  Payload ID: 19840
  Gene Name: zinc finger protein 267
  ENSP ID: ENSP00000454753
  MOD_RES (1)..(1): Any amino acid
XQLRVFRSGRPRRLRVLRINRTSVALRLAGTGRFVAKTPGHPGSWEMNCLG

SEQ ID NO: 99503 - protein, 91 aa, Homo sapiens
  Payload ID: 19840
  Gene Name: zinc finger protein 267
  ENSP ID: ENSP00000455493
MLENYRNLVSLGLVVSKPDLITFLEQRKEPWNVKSEETVAIQPDVFSHYNKDLLTEHCTEASFQKVISRRHGSCDLENLHLRKRWKREECE

SEQ ID NO: 99504 - protein, 77 aa, Homo sapiens
  Payload ID: 19840
  Gene Name: zinc finger protein 267
  ENSP ID: ENSP00000461286
MGLLTFRDVAVEFSLEEWEHLEPAQKNLYQDVMLENYRNLVSLGLVVSKPDLITFLEQRKEPWNVKSEETVAIQPGH

SEQ ID NO: 99505 - protein, 947 aa, Homo sapiens
  Payload ID: 19841
  Gene Name: zinc finger protein 268
  Uniprot ID: Q14587
  ENSP ID: ENSP00000228289
MATRVRTASIWVPPLQERNSSWDRIRKLQGQESILGQGTPGLQPLPGTPRQKQKSRRIEKVLEWLFISQEQPKITKSWGPLSFMDVFVDFTWEEWQLLDPAQKCLYRSVMLENYSNLVSLGYQHTKPDIIFKLEQGEELCMVQAQVPNQTCPNTVWKIDDLMDWHQENKDKLGSTAKSFECTTFGKLCLLSTKYLSRQKPHKCGTHGKSLKYIDFTSDYARNNPNGFQVHGKSFFHSKHEQTVIGIKYCESIESGKTVNKKSQLMCQQMYMGEKPFGCSCCEKAFSSKSYLLVHQQTHAEEKPYGCNECGKDFSSKSYLIVHQRIHTGEKLHECSECRKTFSFHSQLVIHQRIHTGENPYECCECGKVFSRKDQLVSHQKTHSGQKPYVCNECGKAFGLKSQLIIHERIHTGEKPYECNECQKAFNTKSNLMVHQRTHTGEKPYVCSDCGKAFTFKSQLIVHQGIHTGVKPYGCIQCGKGFSLKSQLIVHQRSHTGMKPYVCNECGKAFRSKSYLIIHTRTHTGEKLHECNNCGKAFSFKSQLIIHQRIHTGENPYECHECGKAFSRKYQLISHQRTHAGEKPYECTDCGKAFGLKSQLIIHQRTHTGEKPFECSECQKAFNTKSNLIVHQRTHTGEKPYSCNECGKAFTFKSQLIVHKGVHTGVKPYGCSQCAKTFSLKSQLIVHQRSHTGVKPYGCSECGKAFRSKSYLIIHMRTHTGEKPHECRECGKSFSFNSQLIVHQRIHTGENPYECSECGKAFNRKDQLISHQRTHAGEKPYGCSECGKAFSSKSYLIIHMRTHSGEKPYECNECGKAFIWKSLLIVHERTHAGVNPYKCSQCEKSFSGKLRLLVHQRMHTREKPYECSECGKAFIRNSQLIVHQRTHSGEKPYGCNECGKTFSQKSILSAHQRTHTGEKPCKCTECGKAFCWKSQLIMHQRTHVDDKH

SEQ ID NO: 99506 - protein, 188 aa, Homo sapiens
  Payload ID: 19841
  Gene Name: zinc finger protein 268
  ENSP ID: ENSP00000409295
MATRVRTASIWVPPLQERNSSWDRIRKLQGQESILGQGTPGLQPLPGTPRQKQKSRRIEKVLEWLFISQEQPKITKSWGPLSFMDVFVDFTWEEWQLLDPAQKCLYRSVMLENYSNLVSLGYQHTKPDIIFKLEQGEELCMVQAQVPNQTCPILKAGKSKAKVLAGLVSGEGLLCASKMTPCCCILWR

SEQ ID NO: 99507 - protein, 38 aa, Homo sapiens
  Payload ID: 19841
  Gene Name: zinc finger protein 268
  ENSP ID: ENSP00000437410
MATRVRTASIWAGVQWLSLLTTTSASRVQVVLLPQPPE

SEQ ID NO: 99508 - protein, 100 aa, Homo sapiens
  Payload ID: 19841
  Gene Name: zinc finger protein 268
  ENSP ID: ENSP00000437858
MATRVRTASIWGTNTPNLISSSSWNKEKSCVWCRPKFQIRPVQTQSGKLMILWIGIRKIKTSWEVRQKALNALHLENYVFLVQSIFQDKNLINVARMERV

SEQ ID NO: 99509 - protein, 68 aa, Homo sapiens
  Payload ID: 19841
  Gene Name: zinc finger protein 268
  ENSP ID: ENSP00000438941
MATRVRTASIWTQSGKLMILWIGIRKIKTSWEVRQKALNALHLENYVFLVQSIFQDKNLINVARMERV

SEQ ID NO: 99510 - protein, 193 aa, Homo sapiens
  Payload ID: 19841
  Gene Name: zinc finger protein 268
  ENSP ID: ENSP00000439539
MATRVRTASIWVPPLQERNSSWDRIRKLQGQESILGQGTPGLQPLPGTPRQKQKSRRIEKVLEWLFISQEQPKITKSWGPLSFMDVFVDFTWEEWQLLDPAQKCLYRSVMLENYSNLVSLGYQHTKPDIIFKLEQGEELCMVQAQVPNQTCPILKAGKSKAKVLAGLVSGEGLLCASKMTPCCCILWRHSLEN

SEQ ID NO: 99511 - protein, 167 aa, Homo sapiens
  Payload ID: 19841
  Gene Name: zinc finger protein 268
  ENSP ID: ENSP00000442446
MATRVRTASIWVPPLQERNSSWDRIRKLQGQESILGQGTPGLQPLPGTPRQKQKSRRIEKVLEWLFISQEQPKITKSWGTNTPNLISSSSWNKEKSCVWCRPKFQIRPVQTQSGKLMILWIGIRKIKTSWEVRQKALNALHLENYVFLVQSIFQDKNLINVARMERV

SEQ ID NO: 99512 - protein, 178 aa, Homo sapiens
  Payload ID: 19841
  Gene Name: zinc finger protein 268
  ENSP ID: ENSP00000443721
MATRVRTASIWVPPLQERNSSWDRIRKLQGQESILGQGTPGLQPLPGTPRQKQKSRRIEKVLEWLFISQEQPKITKSWEWQLLDPAQKCLYRSVMLENYSNLVSLGYQHTKPDIIFKLEQGEELCMVQAQVPNQTCPILKAGKSKAKVLAGLVSGEGLLCASKMTPCCCILWRHSLEN

SEQ ID NO: 99513 - protein, 947 aa, Homo sapiens; identical to SEQ ID NO: 99505
  Payload ID: 19841
  Gene Name: zinc finger protein 268
  Uniprot ID: Q14587
  ENSP ID: ENSP00000444412

SEQ ID NO: 99514 - protein, 35 aa, Homo sapiens
  Payload ID: 19841
  Gene Name: zinc finger protein 268
  ENSP ID: ENSP00000446153
MDVFVDFTWEEWQLLDPAQKCLYRSVMLENYSNLV

SEQ ID NO: 99515 - protein, 111 aa, Homo sapiens
  Payload ID: 19841
  Gene Name: zinc finger protein 268
  ENSP ID: ENSP00000464721
  MOD_RES (1)..(1): Any amino acid
XSFMDVFVDFTWEEWQLLDPAQKCLYRSVMLENYSNLVSLGYQHTKPDIIFKLEQGEELCMVQAQVPNQTCPILKAGKSKAKVLAGLVSGEGLLCASKMTPCCCILWSLEN

SEQ ID NO: 99516 - protein, 44 aa, Homo sapiens
  Payload ID: 19841
  Gene Name: zinc finger protein 268
  Uniprot ID: Q14587
  ENSP ID: ENSP00000466622
MATRVRTASIWGTNTPNLISSSSWNKEKSCVWCRPKFQIRPVQF

SEQ ID NO: 99517 - protein, 94 aa, Homo sapiens
  Payload ID: 19841
  Gene Name: zinc finger protein 268
  ENSP ID: ENSP00000466629
MDVFVDFTWEEWQLLDPAQKCLYRSVMLENYSNLVSLGYQHTKPDIIFKLEQGEELCMVQAQVPNQTCPNTVWKIDDLMDWHQENKDKLGSTAK

SEQ ID NO: 99518 - protein, 135 aa, Homo sapiens
  Payload ID: 19841
  Gene Name: zinc finger protein 268
  Uniprot ID: Q14587
  ENSP ID: ENSP00000467781
MATRVRTASIWVPPLQERNSSWDRIRKLQGQESILGQGTPGLQPLPGTPRQKQKSRRIEKVLEWLFISQEQPKITKSWTQSGKLMILWIGIRKIKTSWEVRQKALNALHLENYVFLVQSIFQDKNLINVARMERV

SEQ ID NO: 99519 - protein, 126 aa, Homo sapiens
  Payload ID: 19841
  Gene Name: zinc finger protein 268
  ENSP ID: ENSP00000467922
MATRVRTASIWGPLSFMDVFVDFTWEEWQLLDPAQKCLYRSVMLENYSNLVSLGYQHTKPDIIFKLEQGEELCMVQAQVPNQTCPILKAGKSKAKVLAGLVSGEGLLCASKMTPCCCILWRHSLEN

SEQ ID NO: 99520 - protein, 121 aa, Homo sapiens
  Payload ID: 19841
  Gene Name: zinc finger protein 268
  ENSP ID: ENSP00000479191
MATRVRTASIWGPLSFMDVFVDFTWEEWQLLDPAQKCLYRSVMLENYSNLVSLGYQHTKPDIIFKLEQGEELCMVQAQVPNQTCPILKAGKSKAKVLAGLVSGEGLLCASKMTPCCCILWR

SEQ ID NO: 99521 - protein, 569 aa, Homo sapiens
  Payload ID: 19842
  Gene Name: zinc finger protein 273
  Uniprot ID: Q14593
  ENSP ID: ENSP00000418719
MSSAPRGPPSVAPLPAGIGRSTAKTPGLPGSLEMGPLTFRDVAIEFSLEEWQCLDTSQQNLYRNVMLDNYRNLVFLGIAVSKPDLITCLEQGKEPCNMKRHAMVAKPPVVCSHFAQDLWPKQGLKDSFQKVILRRYGKYGHENLQLRKGCKSADEHKVHKRGYNGLNQCLTTTQSKIFQCDKYVKVLHKFSNSNIHKKRQTGKKPFKCKECGKSCCILSQLTQHKKTATRVNFYKCKTCGKAFNQFSNLTKHKIIHPEVNPYKCEECGKAFNQSLTLTKHKKIHTEEKPYKCEDCGKVFSVFSVLTKHKIIHTGTKPYNCEECGKGFSIFSTLTKHKIIHTGEKPYKCNECGKAFNWSSTLTKHKRIHTGEKPYKCEECGKAFNQSSTLTRHKIVHTGEKPYKCEECGKAFKRSTTLTKHKRIYTKEKPYKCEECGKAFSVFSTLTKHKIIHTGAKPYKCEECGSAFRAFSTLTEHKRVHTGEKPYKCNECGKAFNWSSTLTKHKRIHTGEKPYKCEECGKAFNRSSNLTRHKKIHTGEKPYKPKRCDSAFDNTPNFSRHKRNHMGEKS

SEQ ID NO: 99522 - protein, 66 aa, Homo sapiens
  Payload ID: 19842
  Gene Name: zinc finger protein 273
  ENSP ID: ENSP00000433382
MSSAPRGPPSVAPLPAGIGRSTAKTPGLPGSLEMARKTGKITGSSTYWMFDKIFFLGQKHWHYWDH

SEQ ID NO: 99523 - protein, 621 aa, Homo sapiens
  Payload ID: 19843
  Gene Name: zinc finger protein 274
  Uniprot ID: Q96GC6
  ENSP ID: ENSP00000321187
MASRLPTAWSCEPVTFEDVTLGFTPEEWGLLDLKQKSLYREVMLENYRNLVSVEYPELQLDPKLDPLPAESPLMNIEVVEVLTLNQEVAGPRNAQIQALYAEDGSLSADAPSEQVQQQGKHPGDPEAARQRFRQFRYKDMTGPREALDQLRELCHQWLQPKARSKEQILELLVLEQFLGALPVKLRTWVESQHPENCQEVVALVEGVTWMSEEEVLPAGQPAEGTTCCLEVTAQQEEKQEDAAICPVTVLPEEPVTFQDVAVDFSREEWGLLGPTQRTEYRDVMLETFGHLVSVGWETTLENKELAPNSDIPEEEPAPSLKVQESSRDCALSSTLEDTLQGGVQEVQDTVLKQMESAQEKDLPQKKHFDNRESQANSGALDTNQVSLQKIDNPESQANSGALDTNQVLLHKIPPRKRLRKRDSQVKSMKHNSRVKIHQKSCERQKAKEGNGCRKTFSRSTKQITFIRIHKGSQVCRCSECGKIFRNPRYFSVHKKIHTGERPYVCQDCGKGFVQSSSLTQHQRVHSGERPFECQECGRTFNDRSAISQHLRTHTGAKPYKCQDCGKAFRQSSHLIRHQRTHTGERPYACNKCGKAFTQSSHLIGHQRTHNRTKRKKKQPTS

SEQ ID NO: 99524 - protein, 611 aa, Homo sapiens
  Payload ID: 19843
  Gene Name: zinc finger protein 274
  ENSP ID: ENSP00000321209
MLENYRNLVSVEHQLSKPDVVSQLEEAEDFWPVERGIPQDTIPEYPELQLDPKLDPLPAESPLMNIEVVEVLTLNQEVAGPRNAQIQALYAEDGSLSADAPSEQVQQQGKHPGDPEAARQRFRQFRYKDMTGPREALDQLRELCHQWLQPKARSKEQILELLVLEQFLGALPVKLRTWVESQHPENCQEVVALVEGVTWMSEEEVLPAGQPAEGTTCCLEVTAQQEEKQEDAAICPVTVLPEEPVTFQDVAVDFSREEWGLLGPTQRTEYRDVMLETFGHLVSVGWETTLENKELAPNSDIPEEEPAPSLKVQESSRDCALSSTLEDTLQGGVQEVQDTVLKQMESAQEKDLPQKKHFDNRESQANSGALDTNQVSLQKIDNPESQANSGALDTNQVLLHKIPPRKRLRKRDSQVKSMKHNSRVKIHQKSCERQKAKEGNGCRKTFSRSTKQITFIRIHKGSQVCRCSECGKIFRNPRYFSVHKKIHTGERPYVCQDCGKGFVQSSSLTQHQRVHSGERPFECQECGRTFNDRSAISQHLRTHTGAKPYKCQDCGKAFRQSSHLIRHQRTHTGERPYACNKCGKAFTQSSHLIGHQRTHNRTKRKKKQPTS

SEQ ID NO: 99525 - protein, 548 aa, Homo sapiens
  Payload ID: 19843
  Gene Name: zinc finger protein 274
  Uniprot ID: Q96GC6
  ENSP ID: ENSP00000409872
MNIEVVEVLTLNQEVAGPRNAQIQALYAEDGSLSADAPSEQVQQQGKHPGDPEAARQRFRQFRYKDMTGPREALDQLRELCHQWLQPKARSKEQILELLVLEQFLGALPVKLRTWVESQHPENCQEVVALVEGVTWMSEEEVLPAGQPAEGTTCCLEVTAQQEEKQEDAAICPVTVLPEEPVTFQDVAVDFSREEWGLLGPTQRTEYRDVMLETFGHLVSVGWETTLENKELAPNSDIPEEEPAPSLKVQESSRDCALSSTLEDTLQGGVQEVQDTVLKQMESAQEKDLPQKKHFDNRESQANSGALDTNQVSLQKIDNPESQANSGALDTNQVLLHKIPPRKRLRKRDSQVKSMKHNSRVKIHQKSCERQKAKEGNGCRKTFSRSTKQITFIRIHKGSQVCRCSECGKIFRNPRYFSVHKKIHTGERPYVCQDCGKGFVQSSSLTQHQRVHSGERPFECQECGRTFNDRSAISQHLRTHTGAKPYKCQDCGKAFRQSSHLIRHQRTHTGERPYACNKCGKAFTQSSHLIGHQRTHNRTKRKKKQPTS

SEQ ID NO: 99526 - protein, 103 aa, Homo sapiens
  Payload ID: 19843
  Gene Name: zinc finger protein 274
  ENSP ID: ENSP00000469427
MNIEVVEVLTLNQEVAGPRNAQIQALYAEDGSLSADAPSEQVQQQGKHPGDPEAARQRFRQFRYKDMTGPREALDQLRELCHQWLQPKARSKEQILELLVLEQ

SEQ ID NO: 99527 - protein, 79 aa, Homo sapiens
  Payload ID: 19843
  Gene Name: zinc finger protein 274
  ENSP ID: ENSP00000469546
MASRLPTAWSCEPVTFEDVTLGFTPEEWGLLDLKQKSLYREVMLENYRNLVSVEHQLSKPDVVSQLEEAEDFWPVERGI

SEQ ID NO: 99528 - protein, 653 aa, Homo sapiens
  Payload ID: 19843
  Gene Name: zinc finger protein 274
  Uniprot ID: Q96GC6
  ENSP ID: ENSP00000478533
MASRLPTAWSCEPVTFEDVTLGFTPEEWGLLDLKQKSLYREVMLENYRNLVSVEHQLSKPDVVSQLEEAEDFWPVERGIPQDTIPEYPELQLDPKLDPLPAESPLMNIEVVEVLTLNQEVAGPRNAQIQALYAEDGSLSADAPSEQVQQQGKHPGDPEAARQRFRQFRYKDMTGPREALDQLRELCHQWLQPKARSKEQILELLVLEQFLGALPVKLRTWVESQHPENCQEVVALVEGVTWMSEEEVLPAGQPAEGTTCCLEVTAQQEEKQEDAAICPVTVLPEEPVTFQDVAVDFSREEWGLLGPTQRTEYRDVMLETFGHLVSVGWETTLENKELAPNSDIPEEEPAPSLKVQESSRDCALSSTLEDTLQGGVQEVQDTVLKQMESAQEKDLPQKKHFDNRESQANSGALDTNQVSLQKIDNPESQANSGALDTNQVLLHKIPPRKRLRKRDSQVKSMKHNSRVKIHQKSCERQKAKEGNGCRKTFSRSTKQITFIRIHKGSQVCRCSECGKIFRNPRYFSVHKKIHTGERPYVCQDCGKGFVQSSSLTQHQRVHSGERPFECQECGRTFNDRSAISQHLRTHTGAKPYKCQDCGKAFRQSSHLIRHQRTHTGERPYACNKCGKAFTQSSHLIGHQRTHNRTKRKKKQPTS

SEQ ID NO: 99529 - protein, 653 aa, Homo sapiens; identical to SEQ ID NO: 99528
  Payload ID: 19843
  Gene Name: zinc finger protein 274
  Uniprot ID: Q96GC6
  ENSP ID: ENSP00000484810

SEQ ID NO: 99530 - protein, 376 aa, Homo sapiens
  Payload ID: 19844
  Gene Name: zinc finger protein 275
  Uniprot ID: Q9NSD4
  ENSP ID: ENSP00000359269
MKGEDAQPQEMASTSFPRASGPSPEFRQHGDSDGKRGSPQNLPIEHHFACKECGDTFRLKVLLVQHQRVHSEEKGWECGDCGKVFRGVAEFNEHRKSHVAAEPQPGPSRALENAAEKREQMEREAKPFECEECGKRFKKNAGLSQHLRVHSREKPFDCEECGRSFKVNTHLFRHQKLHTSEKPFACKACSRDFLDRQELLKHQRMHTGHLPFDCDDCGKSFRGVNGLAEHQRIHSGAKPYGCPHCGKLFRRSSELTKHRRIHTGEKPYACGQCGKAFRQSSSLLEHARIHSGERPYACGECGKAFRGPSDLIKHRRIHSGLKPYECDKCGKAFRRSSGLSRHRRIHSGARRCECSQCGRVFKRRSALQKHQPTHHE

SEQ ID NO: 99531 - protein, 329 aa, Homo sapiens
  Payload ID: 19844
  Gene Name: zinc finger protein 275
  ENSP ID: ENSP00000359271
MMSHPCVSLLGVPVLNPALVPHLAQGQVLLVSDPSPNTDPAKYSESTSATRHQMKGEDAQPQEMASTSFPRASGPSPEFRQHGDSDGKRGSPQNLPIEHHFACKECGDTFRLKVLLVQHQRVHSEEKGWECGDCGKVFRGVAEFNEHRKSHVAAEPQPGPSRALENAAEKREQMEREAKPFECEECGKRFKKNAGLSQHLRVHSREKPFDCEECGRSFKVNTHLFRHQKLHTSEKPFACKACSRDFLDRQELLKHQRMHTGHLPFDCDDCGKSFRGVNGLAEHQRIHSGAKPYGCPHCGKLFRRSSELTKHRRIHTGEKPYACGLPWAL

SEQ ID NO: 99532 - protein, 539 aa, Homo sapiens
  Payload ID: 19845
  Gene Name: zinc finger protein 276
  Uniprot ID: Q8N554
  ENSP ID: ENSP00000289816
MGHCRLCHGKFSSRSLRSISERAPGASMERPSAEERVLVRDFQRLLGVAVRQDPTLSPFVCKSCHAQFYQCHSLLKSFLQRVNASPAGRRKPCAKVGAQPPTGAEEGACLVDLITSSPQCLHGLVGWVHGHAASCGALPHLQRTLSSEYCGVIQVVWGCDQGHDYTMDTSSSCKAFLLDSALAVKWPWDKETAPRLPQHRGWNPGDAPQTSQGRGTGTPVGAETKTLPSTDVAQPPSDSDAVGPRSGFPPQPSLPLCRAPGQLGEKQLPSSTSDDRVKDEFSDLSEGDVLSEDENDKKQNAQSSDESFEPYPERKVSGKKSESKEAKKSEEPRIRKKPGPKPGWKKKLRCEREELPTIYKCPYQGCTAVYRGADGMKKHIKEHHEEVRERPCPHPGCNKVFMIDRYLQRHVKLIHTEVRNYICDECGQTFKQRKHLLVHQMRHSGAKPLQCEVCGFQCRQRASLKYHMTKHKAETELDFACDQCGRRFEKAHNLNVHMSMVHPLTQTQDKALPLEAEPPPGPPSPSVTTEGQAVKPEPT

SEQ ID NO: 99533 - protein, 614 aa, Homo sapiens
  Payload ID: 19845
  Gene Name: zinc finger protein 276
  Uniprot ID: Q8N554
  ENSP ID: ENSP00000415836
MKRDRLGRFLSPGSSRQCGASDGGGGVSRTRGRPSLSGGPRVDGATARRAWGPVGSCGDAGEDGADEAGAGRALAMGHCRLCHGKFSSRSLRSISERAPGASMERPSAEERVLVRDFQRLLGVAVRQDPTLSPFVCKSCHAQFYQCHSLLKSFLQRVNASPAGRRKPCAKVGAQPPTGAEEGACLVDLITSSPQCLHGLVGWVHGHAASCGALPHLQRTLSSEYCGVIQVVWGCDQGHDYTMDTSSSCKAFLLDSALAVKWPWDKETAPRLPQHRGWNPGDAPQTSQGRGTGTPVGAETKTLPSTDVAQPPSDSDAVGPRSGFPPQPSLPLCRAPGQLGEKQLPSSTSDDRVKDEFSDLSEGDVLSEDENDKKQNAQSSDESFEPYPERKVSGKKSESKEAKKSEEPRIRKKPGPKPGWKKKLRCEREELPTIYKCPYQGCTAVYRGADGMKKHIKEHHEEVRERPCPHPGCNKVFMIDRYLQRHVKLIHTEVRNYICDECGQTFKQRKHLLVHQMRHSGAKPLQCEVCGFQCRQRASLKYHMTKHKAETELDFACDQCGRRFEKAHNLNVHMSMVHPLTQTQDKALPLEAEPPPGPPSPSVTTEGQAVKPEPT

SEQ ID NO: 99534 - protein, 94 aa, Homo sapiens
  Payload ID: 19845
  Gene Name: zinc finger protein 276
  ENSP ID: ENSP00000455345
  MOD_RES (1)..(1): Any amino acid
XWDKETAPRLPQHRGWNPGDAPQTSQGRGTGTPVGAETKTLPSTDVAQPPSDSDAVGPRSGFPPQPSLPLCRAPGQLGEKQLPSSTSDDRRRLE

SEQ ID NO: 99535 - protein, 280 aa, Homo sapiens
  Payload ID: 19845
  Gene Name: zinc finger protein 276
  ENSP ID: ENSP00000455466
MGHCRLCHGKFSSRSLRSISERAPGASMERPSAEERVLVRDFQRLLGVAVRQDPTLSPFVCKSCHAQFYQCHSLLKSFLQRVNASPAGRRKPCAKVGAQPPTGAEEGACLVDLITSSPQCLHGLVGWVHGHAASCGALPHLQRTLSSEYCGVIQVVWGCDQGHDYTMDTSSSCKAFLLDSALAVKWPWDKETAPRLPQHRGWNPGDAPQTSQGRGTGTPVGAETKTLPSTDVAQPPSDSDAVGPRSGFPPQPSLPLCRAPGQLGEKQLPSSTSDDRRRLE

SEQ ID NO: 99536 - protein, 433 aa, Homo sapiens
  Payload ID: 19845
  Gene Name: zinc finger protein 276
  ENSP ID: ENSP00000457210
MGHCRLCHGKFSSRSLRSISERAPGASMERPSAEERVLVRDFQRLLGVAVRQDPTLSPFVCKSCHAQFYQCHSLLKSFLQRVNASPAGRRKPCAKVGAQPPTGAEEGACLAPSACTAWWGGCMDMRPAAGPCPTFRGHCPPSTAASSRSCGAATRATTTPWIPAPAARPSCWTVRWQSSGHGTKRRRHGCPSTEGGTLGMPLRPPRVEGQGPQLGLRPRPCPARMWPSLLRTATRWGPGRASHLSQACPFAGPQGSWVRSSFHLQPRMIGDVLSEDENDKKQNAQSSDESFEPYPERKVSGKKSESKEAKKSEEPRIRKKPGPKPGWKKKLRCEREELPTIYKCPYQGCTAVYRGADGMKKHIKEHHEEVRERPCPHPGCNKVFMIDRYLQRHVKLIHTEVRNYICDECGQTFKQRKHLLVHQMRHSGAKPLQ

SEQ ID NO: 99537 - protein, 355 aa, Homo sapiens
  Payload ID: 19845
  Gene Name: zinc finger protein 276
  ENSP ID: ENSP00000457313
MKRDRLGRFLSPGSSRQCGASDGGGGVSRTRGRPSLSGGPRVDGATARRAWGPVGSCGDAGEDGADEAGAGRALAMGHCRLCHGKFSSRSLRSISERAPGASMERPSAEERVLVRDFQRLLGVAVRQDPTLSPFVCKSCHAQFYQCHSLLKSFLQRVNASPAGRRKPCAKVGAQPPTGAEEGACLVDLITSSPQCLHGLVGWVHGHAASCGALPHLQRTLSSEYCGVIQVVWGCDQGHDYTMDTSSSCKAFLLDSALAVKWPWDKETAPRLPQHRGWNPGDAPQTSQGRGTGTPVGAETKTLPSTDVAQPPSDSDAVGPRSGFPPQPSLPLCRAPGQLGEKQLPSSTSDDRRRLE

SEQ ID NO: 99538 - protein, 450 aa, Homo sapiens
  Payload ID: 19846
  Gene Name: zinc finger protein 277
  Uniprot ID: Q9NRM2
  ENSP ID: ENSP00000354501
MAASKTQGAVARMQEDRDGSCSTVGGVGYGDSKDCILEPLSLPESPGGTTTLEGSPSVPCIFCEEHFPVAEQDKLLKHMIIEHKIVIADVKLVADFQRYILYWRKRFTEQPITDFCSVIRINSTAPFEEQENYFLLCDVLPEDRILREELQKQRLREILEQQQQERNDTNFHGVCMFCNEEFLGNRSVILNHMAREHAFNIGLPDNIVNCNEFLCTLQKKLDNLQCLYCEKTFRDKNTLKDHMRKKQHRKINPKNREYDRFYVINYLELGKSWEEVQLEDDRELLDHQEDDWSDWEEHPASAVCLFCEKQAETIEKLYVHMEDAHEFDLLKIKSELGLNFYQQVKLVNFIRRQVHQCRCYGCHVKFKSKADLRTHMEETKHTSLLPDRKTWDQLEYYFPTYENDTLLCTLSDSESDLTAQEQNENVPIISEDTSKLYALKQSSILNQLLL

SEQ ID NO: 99539 - protein, 50 aa, Homo sapiens
  Payload ID: 19846
  Gene Name: zinc finger protein 277
  ENSP ID: ENSP00000355043
MAASKTQGAVARMQEDRDGSCSTVGGVGYGVRIVSWSRFPCQKVQVAPPL

SEQ ID NO: 99540 - protein, 199 aa, Homo sapiens
  Payload ID: 19846
  Gene Name: zinc finger protein 277
  ENSP ID: ENSP00000390359
MAASKTQGAVARMQEDRDGSCSTVGGVGYGDSKDCILEPLSLPESPGGTTTLEGSPSVPCIFCEEHFPVAEQDKLLKHMIIEHKIVIADVKLVADFQRSVILNHMAREHAFNIGLPDNIVNCNEFLCTLQKKLDNLQCLYCEKTFRDKNTLKDHMRKKQHRKINPKNREYDRFYVINYLELGKSWEEVQLEDDRELLDH

SEQ ID NO: 99541 - protein, 290 aa, Homo sapiens
  Payload ID: 19846
  Gene Name: zinc finger protein 277
  ENSP ID: ENSP00000402292
MAASKTQGAVARMQEDRDGSCSTVGGVGYGDSKDCILEPLSLPESPGGTTTLEGSPSVPCIFCEEHFPVAEQDKLLKHMIIEHKIVIADVKLVADFQRYILYWRKRFTEQPITDFCSVIRINSTAPFEEQENYFLLCDVLPEDRILREELQKQRLREILEQQQQERNDTNFHGVCMFCNEEFLGNRSVILNHMAREHAFNIGLPDNIVNCNEFLCTLQKKLDNLQCLYCEKTFRDKNTLKDHMRKKQHRKINPKNREYDRFYVINYLVRLSFHNLKFDCSTANKIFLRTN

SEQ ID NO: 99542 - protein, 107 aa, Homo sapiens
  Payload ID: 19846
  Gene Name: zinc finger protein 277
  ENSP ID: ENSP00000402846
MAASKTQGAVARMQEDRDGSCSTVGGVGYGDSKDCILEPLSLPESPGGTTTLEGSPSVPCIFCEEHFPVAEQDKLLKHMIIEHKIVIADVKLVADFQRRTRELFFVM

SEQ ID NO: 99543 - protein, 98 aa, Homo sapiens
  Payload ID: 19846
  Gene Name: zinc finger protein 277
  ENSP ID: ENSP00000410538
MAASKTQGAVARMQEDRDGSCSTVGGVGYGDSKDCILEPLSLPESPGGTTTLEGSPSVPCIFCEEHFPVAEQDKLLKHMIIEHKIVIADVKLVADFQR

SEQ ID NO: 99544 - protein, 118 aa, Homo sapiens
  Payload ID: 19846
  Gene Name: zinc finger protein 277
  ENSP ID: ENSP00000415735
SDWSDWEEHPASAVCLFCEKQAETIEKLYVHMEDAHEFDLLKIKSELGLNFYQQVKLVNFIRRYYFPTYENDTLLCTLSDSESDLTAQEQNENVPIISEDTSKLYALKQSSILNQLLL

SEQ ID NO: 99545 - protein, 79 aa, Homo sapiens
  Payload ID: 19847
  Gene Name: zinc finger protein 28
  ENSP ID: ENSP00000344777
MLENYRNLVSLDFRSVTQAKVQWCHLGSLQPPLPRFKQFSCLSLPSSWDYRARQYRSVPHRDIAKTSKSSHWRFLLPEN

SEQ ID NO: 99546 - protein, 546 aa, Homo sapiens
  Payload ID: 19847
  Gene Name: zinc finger protein 28
  ENSP ID: ENSP00000375661
MMKTFFSTGQGNTEAFHTGTLQRQASHHIGDFCFQKIEKDIHGFQFQWKEDETNDHAAPMTEIKELTGSTGQHDQRHAGNKHIKDQLGLSFHSHLPELHIFQPEGKIGNQVEKSINNASSVSTSQRICCRPKTHISNKYGNNSLHSSLLTQKRNVHMREKSFQCIESGKSFNCSSLLKKHQITHLEEKQCKCDVYGKVFNQKRYLACHRRSHIDEKPYKCNECGKIFGHNTSLFLHKALHTADKPYECEECDKVFSRKSHLETHKIIYTGGKPYKCKVCDKAFTCNSYLAKHTIIHTGEKPYKCNECGKVFNRLSTLARHRRLHTGEKPYECEECEKVFSRKSHLERHKRIHTGEKPYKCKVCDKAFAYNSYLAKHSIIHTGEKPYKCNECGKVFNQQSTLARHHRLHTAEKPYKCEECDKVFRCKSHLERHRRIHTGEKPYKCKVCDKAFRSDSCLTEHQRVHTGEKPYMCNECGKVFSTKANLACHHKLHTAEKPYKCEECEKVFSRKSHMERHRRIHTGEKPYKCKVCDKAFRRDSHLAQHQR

SEQ ID NO: 99547 - protein, 718 aa, Homo sapiens
  Payload ID: 19847
  Gene Name: zinc finger protein 28
  Uniprot ID: P17035
  ENSP ID: ENSP00000397693
MALPQGLLTFRDVAIEFSQEEWKCLDPAQRTLYRDVMLENYRNLVSLDISSKCMMKTFFSTGQGNTEAFHTGTLQRQASHHIGDFCFQKIEKDIHGFQFQWKEDETNDHAAPMTEIKELTGSTGQHDQRHAGNKHIKDQLGLSFHSHLPELHIFQPEGKIGNQVEKSINNASSVSTSQRICCRPKTHISNKYGNNSLHSSLLTQKRNVHMREKSFQCIESGKSFNCSSLLKKHQITHLEEKQCKCDVYGKVFNQKRYLACHRRSHIDEKPYKCNECGKIFGHNTSLFLHKALHTADKPYECEECDKVFSRKSHLETHKIIYTGGKPYKCKVCDKAFTCNSYLAKHTIIHTGEKPYKCNECGKVFNRLSTLARHRRLHTGEKPYECEECEKVFSRKSHLERHKRIHTGEKPYKCKVCDKAFAYNSYLAKHSIIHTGEKPYKCNECGKVFNQQSTLARHHRLHTAEKPYKCEECDKVFRCKSHLERHRRIHTGEKPYKCKVCDKAFRSDSCLTEHQRVHTGEKPYMCNECGKVFSTKANLACHHKLHTAEKPYKCEECEKVFSRKSHMERHRRIHTGEKPYKCKVCDKAFRRDSHLAQHQRVHTGEKPYKCNECGKTFRQTSSLIIHRRLHTGEKPYKCNECGKTFSQMSSLVYHHRLHSGEKPYKCNECGKVFNQQAHLAQHQRVHTGEKPYKCNECGKTFSQMSNLVYHHRLHSGEKP

SEQ ID NO: 99548 - protein, 665 aa, Homo sapiens
  Payload ID: 19847
  Gene Name: zinc finger protein 28
  Uniprot ID: P17035
  ENSP ID: ENSP00000412143
MMKTFFSTGQGNTEAFHTGTLQRQASHHIGDFCFQKIEKDIHGFQFQWKEDETNDHAAPMTEIKELTGSTGQHDQRHAGNKHIKDQLGLSFHSHLPELHIFQPEGKIGNQVEKSINNASSVSTSQRICCRPKTHISNKYGNNSLHSSLLTQKRNVHMREKSFQCIESGKSFNCSSLLKKHQITHLEEKQCKCDVYGKVFNQKRYLACHRRSHIDEKPYKCNECGKIFGHNTSLFLHKALHTADKPYECEECDKVFSRKSHLETHKIIYTGGKPYKCKVCDKAFTCNSYLAKHTIIHTGEKPYKCNECGKVFNRLSTLARHRRLHTGEKPYECEECEKVFSRKSHLERHKRIHTGEKPYKCKVCDKAFAYNSYLAKHSIIHTGEKPYKCNECGKVFNQQSTLARHHRLHTAEKPYKCEECDKVFRCKSHLERHRRIHTGEKPYKCKVCDKAFRSDSCLTEHQRVHTGEKPYMCNECGKVFSTKANLACHHKLHTAEKPYKCEECEKVFSRKSHMERHRRIHTGEKPYKCKVCDKAFRRDSHLAQHQRVHTGEKPYKCNECGKTFRQTSSLIIHRRLHTGEKPYKCNECGKTFSQMSSLVYHHRLHSGEKPYKCNECGKVFNQQAHLAQHQRVHTGEKPYKCNECGKTFSQMSNLVYHHRLHSGEKP

SEQ ID NO: 99549 - protein, 129 aa, Homo sapiens
  Payload ID: 19847
  Gene Name: zinc finger protein 28
  ENSP ID: ENSP00000469381
MALPQGLLTFRDVAIEFSQEEWKCLDPAQRTLYRDVMLENYRNLVSLDFRSVTQAKVQWCHLGSLQPPLPRFKQFSCLSLPSSWDYRYLFQMHDEDILLNRARQYRSVPHRDIAKTSKSSHWRFLLPEN

SEQ ID NO: 99550 - protein, 175 aa, Homo sapiens
  Payload ID: 19847
  Gene Name: zinc finger protein 28
  ENSP ID: ENSP00000471448
MALPQIFGLSPRLKCSGVTSAHCNLHFPGSSNSPASAFQVAGTTDISSKCMMKTFFSTGQGNTEAFHTGTLQRQASHHIGDFCFQKIEKDIHGFQFQWKEDETNDHAAPMTEIKELTGSTGQHDQRHAGNKHIKDQLGLSFHSHLPELHIFQPEGKIGNQVEKSINNASSVSTSQ

SEQ ID NO: 99551 - protein, 542 aa, Homo sapiens
  Payload ID: 19848
  Gene Name: zinc finger protein 280A
  Uniprot ID: P59817
  ENSP ID: ENSP00000302855
MGDIFLCKKVESPKKNLRESKQREEDDEDPDLIYVGVEHVHRDAEVLFVGMISNSKPVVSNILNRVTPGSNSRRKKGHFRQYPAHVSQPANHVTSMAKAIMPVSLSEGRSTDSPVTMKSSSEPGYKMSSPQVVSPSSSDSLPPGTQCLVGAMVSGGGRNESSPDSKRLSTSDINSRDSKRVKLRDGIPGVPSLAVVPSDMSSTISTNTPSQGICNSSNHVQNGVTFPWPDANGKAHFNLTDPERASESALAMTDISSLASQNKTFDPKKENPIVLLSDFYYGQHKGDGQPEQKTHTTFKCLSCVKVLKNIKFMNHMKHHLEFEKQRNDSWEDHTTCQHCHRQFPTPFQLQCHIDSVHIAMGPSAVCKICELSFETDQVLLQHMKDHHKPGEMPYVCQVCHYRSSVFADVETHFRTCHENTKNLLCLFCLKLFKTAIPYMNHCWRHSRRRVLQCSKCRLQFLTLKEEIEHKTKDHQTFKKPEQLQGLPSETKVIIQTSVQPGSSGMASVIVSNTDPQSSPVKTKKKTAMNTRDSRLPCSKDSS

SEQ ID NO: 99552 - protein, 542 aa, Homo sapiens; identical to SEQ ID NO: 99551
  Payload ID: 19848
  Gene Name: zinc finger protein 280A
  ENSP ID: ENSP00000480861

SEQ ID NO: 99553 - protein, 543 aa, Homo sapiens
  Payload ID: 19849
  Gene Name: zinc finger protein 280B
  ENSP ID: ENSP00000478801
MEQSCEEEKEPEPQKNIQETKQVDDEDAELIFVGVEHVNEDAELIFVGVTSNSKPVVSNILNRVTPGSWSRRKKYDHLRKDTARKLQPKSHETVTSEAVTVLPASQLESRSTDSPIIIEPLSKPDYRNSSPQVVPNNSSELPSPLITFTDSLHHPVSTALSVGGINESPRVSKQLSTFEVNSINPKRAKLRDGIIEGNSSASFPSDTFHTMNTQQSTPSNNVHTSLSHVQNGAPFPAAFPKDNIHFKPINTNLDRANELAKTDILSLTSQNKTFDPKKENPIVLLSDFYYGQHKGEGQPEQKTHTTFKCLSCVKVLKNVKFMNHVKHHLEFEKQRNDSWENHTTCQHCHRQFPTPFQLQCHIENVHTAQEPSTVCKICELSFETDQVLLQHMKDHHKPGEMPYVCQVCHYRSSVFADVETHFRTCHENTKNLLCPFCLKIFKTATPYMCHYRGHWGKSAHQCSKCRLQFLTFKEKMEHKTQCHQMFKKPKQLEGLPPETKVTIQVSLEPLQPGSVDVASITVSTSDSEPSLPRSKSKISKKSH

SEQ ID NO: 99554 - protein, 543 aa, Homo sapiens; identical to SEQ ID NO: 99553
  Payload ID: 19849
  Gene Name: zinc finger protein 280B
  Uniprot ID: Q86YH2
  ENSP ID: ENSP00000480958

SEQ ID NO: 99555 - protein, 543 aa, Homo sapiens; identical to SEQ ID NO: 99553
  Payload ID: 19849
  Gene Name: zinc finger protein 280B
  Uniprot ID: Q86YH2
  ENSP ID: ENSP00000481008

SEQ ID NO: 99556 - protein, 543 aa, Homo sapiens; identical to SEQ ID NO: 99553
  Payload ID: 19849
  Gene Name: zinc finger protein 280B
  ENSP ID: ENSP00000485750

SEQ ID NO: 99557 - protein, 543 aa, Homo sapiens; identical to SEQ ID NO: 99553
  Payload ID: 19849
  Gene Name: zinc finger protein 280B
  ENSP ID: ENSP00000486772

SEQ ID NO: 99558 - protein, 543 aa, Homo sapiens; identical to SEQ ID NO: 99553
  Payload ID: 19849
  Gene Name: zinc finger protein 280B
  ENSP ID: ENSP00000486860

SEQ ID NO: 99559 - protein, 737 aa, Homo sapiens
  Payload ID: 19850
  Gene Name: zinc finger protein 280C
  Uniprot ID: Q8ND82
  ENSP ID: ENSP00000360017
MDDDKPFQPKNISKMAELFMECEEEELEPWQKKVEETQDEDDDELIFVGEISSSKPAISNILNRGHSSSSSKGIKSEPHSPGIPEIFRTASQRCRDPPSNPVAASPRFHLVSKSSQSSVTVENASKPDFTKNSQVGSDNSSILLFDSTQESLPPSQDIPAIFREGMKNTSYVLKHPSTSKVNSVTPKKPKTSEDVPQINPSTSLPLIGSPPVTSSQVMLSKGTNTSSPYDAGADYLRACPKCNVQFNLLDPLKYHMKHCCPDMITKFLGVIVKSERPCDEDKTDSETGKLIMLVNEFYYGRHEGVTEKEPKTYTTFKCFSCSKVLKNNIRFMNHMKHHLELEKQNNESWENHTTCQHCYRQYPTPFQLQCHIESTHTPHEFSTICKICELSFETEHILLQHMKDTHKPGEMPYVCQVCQFRSSTFSDVEAHFRAAHENTKNLLCPFCLKVSKMATPYMNHYMKHQKKGVHRCPKCRLQFLTSKEKAEHKAQHRTFIKPKELEGLPPGAKVTIRASLGPLQSKLPTAPFGCAPGTSFLQVTPPTSQNTTARNPRKSNASRSKTSKLHATTSTASKVNTSKPRGRIAKSKAKPSYKQKRQRNRKNKMSLALKNIRCRRGIHKCIECHSKIKDFASHFSIYIHCSFCKYNTNCNKAFVNHMMSSHSNHPGKRFCIFKKHSGTLRGITLVCLKCDFLADSSGLDRMAKHLSQRKTHTCQVIIENVSKSTSTSEPTTGCSLK

SEQ ID NO: 99560 - protein, 610 aa, Homo sapiens
  Payload ID: 19850
  Gene Name: zinc finger protein 280C
  ENSP ID: ENSP00000408521
MDDDKPFQPKNISKMAELFMECEEEELEPWQKKVEETQDEDDDELIFVGEISSSKPAISNILNRGHSSSSSKGIKSEPHSPGIPEIFRTASQRCRDPPSNPVAASPRFHLVSKSSQSSVTVENASKPDFTKNSQVGSDNSSILLFDSTQESLPPSQDIPAIFREGMKNTSYVLKHPSTSKVNSVTPKKPKTSEDVPQINPSTSLPLIGSPPVTSSQVMLSKGTNTSSPYDAGADYLRACPKCNVQFNLLDPLKYHMKHCCPDMITKFLGVIVKSERPCDEDKTDSETGKLIMLVNEFYYGRHEGVTEKEPKTYTTFKCFSCSKVLKNNIRFMNHMKHHLELEKQNNESWENHTTCQHCYRQYPTPFQLQCHIESTHTPHEFSTICKICELSFETEHILLQHMKDTHKPGEMPYVCQKKGVHRCPKCRLQFLTSKEKAEHKAQHRTFIKPKELEGLPPGAKVTIRASLGPLQSKLPTAPFGCAPGTSFLQVTPPTSQNTTARNPRKSNASRSKTSKLHATTSTASKVNTSKPRGRIAKSKAKPSYKQKRQRNRKNKMSLALKNIRCRRGIHKCIECHSKIKDFASHFSIYIHCSFCKYNTNCNKAFVNHMM

SEQ ID NO: 99561 - protein, 979 aa, Homo sapiens
  Payload ID: 19851
  Gene Name: zinc finger protein 280D
  Uniprot ID: Q6N043
  ENSP ID: ENSP00000267807
MGDNPFQPKSNSKMAELFMECEEEELEPWQKKVKEVEDDDDDEPIFVGEISSSKPAISNILNRVNPSSYSRGLKNGALSRGITAAFKPTSQHYTNPTSNPVPASPINFHPESRSSDSSVIVQPFSKPGYITNSSRVVSNKSSELLFDLTQDTGLSHYQGGPTLSMAGMSESSFLSKRPSTSEVNNVNPKKPKPSESVSGANSSAVLPSVKSPSVTSSQAMLAKGTNTSSNQSKNGTPFPRACPKCNIHFNLLDPLKNHMKYCCPDMINNFLGLAKTEFSSTVNKNTTIDSEKGKLIMLVNDFYYGKHEGDVQEEQKTHTTFKCFSCLKILKNNIRFMNHMKHHLELEKQSSESWENHTTCQHCYRQFPTPFQLQCHIESTHTPHEFSTICKICELSFETEHVLLQHMKDNHKPGEMPYVCQVCNYRSSSFSDVETHFRTSHENTKNLLCPFCLKVIKIATPYMHHYMKHQKKGIHRCTKCRLQFLTCKEKMDHKTQHHRTFIKPKQLEGLPPGTKVTIRASVGPLQSGASPTPSISASASTLQLSPPRTKNITAKNPAKSNTSKPNTVKSNASKPNTSKPNGSKSKYKPKISNMQKKQSTLASSNKKSKVNTALRNLRYRRGIHKCIECCSEIKDFANHFPTYVHCSFCRYNTSCSKAYVNHMMSFHSNRPSKRFCIFKKHSENLRGITLVCLNCDFLSDVSGLDNMATHLSQHKTHTCQVVMQKVSVCIPTSEHLSELKKEAPAKEQEPVSKEIARPNMAERETETSNSESKQDKAASSKEKNGCNANSFEGSSTTKSEESITVSDKENETCLADQETGSKNIVSCDSNIGADKVEKKKQIQHVCQEMELKMCQSSENIILSDQIKDHNSSEARFSSKNIKDLRLASDNVSIDQFLRKRHEPESVSSDVSEQGSIHLEPLTPSEVLEYEATEILQKGSGDPSAKTDEVVSDQTDDIPGGNNPSTTEATVDLEDEKERS

SEQ ID NO: 99562 - protein, 747 aa, Homo sapiens
  Payload ID: 19851
  Gene Name: zinc finger protein 280D
  ENSP ID: ENSP00000453045
MAELFMECEEEELEPWQKKVKEVEDDDDDEPIFVGEISSSKPAISNILNRVNPSSYSRGLKNGALSRGITAAFKPTSQHYTNPTSNPVPASPINFHPESRSSDSSVIVQPFSKPGYITNSSRVVSNKSSELLFDLTQDTGLSHYQGGPTLSMAGMSESSFLSKRPSTSEVNNVNPKKPKPSESVSGANSSAVLPSVKSPSVTSSQAMLAKGTNTSSNQSKNGTPFPRACPKCNIHFNLLDPLKNHMKYCCPDMINNFLGLAKTEFSSTVNKNTTIDSEKGKLIMLVNDFYYGKHEGDVQEEQKTHTTFKCFSCLKILKNNIRFMNHMKHHLELEKQSSESWENHTTCQHCYRQFPTPFQLQCHIESTHTPHEFSTICKICELSFETEHVLLQHMKDNHKPGEMPYVCQVCNYRSSSFSDVETHFRTSHENTKNLLCPFCLKVIKIATPYMHHYMKHQKKGIHRCTKCRLQFLTCKEKMDHKTQHHRTFIKPKQLEGLPPGTKVTIRASVGPLQSGASPTPSISASASTLQLSPPRTKNITAKNPAKSNTSKPNTVKSNASKPNTSKPNGSKSKYKPKISNMQKKQSTLASSNKKSKVNTALRNLRYRRGIHKCIECCSEIKDFANHFPTYVHCSFCRYNTSCSKAYVNHMMSFHSNRPSKRFCIFKKHSENLRGITLVCLNCDFLSDVSGLDNMATHLSQHKTHTCQVVMQKDAEAAQRFQKISRVYLDSVPLRWTQLMPVLSFQGM

SEQ ID NO: 99563 - protein, 535 aa, Homo sapiens
  Payload ID: 19851
  Gene Name: zinc finger protein 280D
  ENSP ID: ENSP00000453124
MGDNPFQPKSNSKMAELFMECEEEELEPWQKKVKEVEDDDDDEPIFVGEISSSKPAISNILNRVNPSSYSRGLKNGALSRGITAAFKPTSQHYTNPTSNPVPASPINFHPESRSSDSSVIVQPFSKPGYITNSSRVVSNKSSELLFDLTQDTGLSHYQGGPTLSMAGMSESSFLSKRPSTSEVNNVNPKKPKPSESVSGANSSAVLPSVKSPSVTSSQAMLAKGTNTSSNQSKNGTPFPRACPKCNIHFNLLDPLKNHMKYCCPDMINNFLGLAKTEFSSTVNKNTTIDSEKGKLIMLVNDFYYGKHEGDVQEEQKTHTTFKCFSCLKILKNNIRFMNHMKHHLELEKQSSESWENHTTCQHCYRQFPTPFQLQCHIESTHTPHEFSTICKICELSFETEHVLLQHMKDNHKPGEMPYVCQVCNYRSSSFSDVETHFRTSHENTKNLLCPFCLKVIKIATPYMHHYMKHQKKGIHRCTKCRLQFLTCKEKMDHKTQHHRTFIKPKQLEGLPPGTKSALEYLLQWRETEAWIIQSE

SEQ ID NO: 99564 - protein, 592 aa, Homo sapiens
  Payload ID: 19851
  Gene Name: zinc finger protein 280D
  Uniprot ID: Q6N043
  ENSP ID: ENSP00000453636
MGDNPFQPKSNSKMAELFMECEEEELEPWQKKVKEVEDDDDDEPIFVGEISSSKPAISNILNRVNPSSYSRGLKNGALSRGITAAFKPTSQHYTNPTSNPVPASPINFHPESRSSDSSVIVQPFSKPGYITNSSRVVSNKSSELLFDLTQDTGLSHYQGGPTLSMAGMSESSFLSKRPSTSEVNNVNPKKPKPSESVSGANSSAVLPSVKSPSVTSSQAMLAKGTNTSSNQSKNGTPFPRACPKCNIHFNLLDPLKNHMKYCCPDMINNFLGLAKTEFSSTVNKNTTIDSEKGKLIMLVNDFYYGKHEGDVQEEQKTHTTFKCFSCLKILKNNIRFMNHMKHHLELEKQSSESWENHTTCQHCYRQFPTPFQLQCHIESTHTPHEFSTICKICELSFETEHVLLQHMKDNHKPGEMPYVCQVCNYRSSSFSDVETHFRTSHENTKNLLCPFCLKVIKIATPYMHHYMKHQKKGIHRCTKCRLQFLTCKEKMDHKTQHHRTFIKPKQLEGLPPGTKVTIRASVGPLQSGASPTPSISASASTLQLSPPRTKNITAKNPAKSNTSKPNTVKSNASKPNTSIVGAFTNALSVVPK

SEQ ID NO: 99565 - protein, 158 aa, Homo sapiens
  Payload ID: 19851
  Gene Name: zinc finger protein 280D
  Uniprot ID: Q6N043
  ENSP ID: ENSP00000453706
MGDNPFQPKSNSKMAELFMECEEEELEPWQKKVKEVEDDDDDEPIFVGEISSSKPAISNILNRVNPSSYSRGLKNGALSRGITAAFKPTSQHYTNPTSNPVPASPINFHPESRSSDSSVIVQPFSKPVSVSKTIRPAQGSIGCCLSISTVPSYNSGLS

SEQ ID NO: 99566 - protein, 80 aa, Homo sapiens
  Payload ID: 19851
  Gene Name: zinc finger protein 280D
  ENSP ID: ENSP00000453912
MGDNPFQPKSNSKMAELFMECEEEELEPWQKKVKEVEDDDDDEPIFVGEISSSKPAISNILNRVNPSSYSRGLKNGALSR

SEQ ID NO: 99567 - protein, 966 aa, Homo sapiens
  Payload ID: 19851
  Gene Name: zinc finger protein 280D
  Uniprot ID: Q6N043
  ENSP ID: ENSP00000454111
MAELFMECEEEELEPWQKKVKEVEDDDDDEPIFVGEISSSKPAISNILNRVNPSSYSRGLKNGALSRGITAAFKPTSQHYTNPTSNPVPASPINFHPESRSSDSSVIVQPFSKPGYITNSSRVVSNKSSELLFDLTQDTGLSHYQGGPTLSMAGMSESSFLSKRPSTSEVNNVNPKKPKPSESVSGANSSAVLPSVKSPSVTSSQAMLAKGTNTSSNQSKNGTPFPRACPKCNIHFNLLDPLKNHMKYCCPDMINNFLGLAKTEFSSTVNKNTTIDSEKGKLIMLVNDFYYGKHEGDVQEEQKTHTTFKCFSCLKILKNNIRFMNHMKHHLELEKQSSESWENHTTCQHCYRQFPTPFQLQCHIESTHTPHEFSTICKICELSFETEHVLLQHMKDNHKPGEMPYVCQVCNYRSSSFSDVETHFRTSHENTKNLLCPFCLKVIKIATPYMHHYMKHQKKGIHRCTKCRLQFLTCKEKMDHKTQHHRTFIKPKQLEGLPPGTKVTIRASVGPLQSGASPTPSISASASTLQLSPPRTKNITAKNPAKSNTSKPNTVKSNASKPNTSKPNGSKSKYKPKISNMQKKQSTLASSNKKSKVNTALRNLRYRRGIHKCIECCSEIKDFANHFPTYVHCSFCRYNTSCSKAYVNHMMSFHSNRPSKRFCIFKKHSENLRGITLVCLNCDFLSDVSGLDNMATHLSQHKTHTCQVVMQKVSVCIPTSEHLSELKKEAPAKEQEPVSKEIARPNMAERETETSNSESKQDKAASSKEKNGCNANSFEGSSTTKSEESITVSDKENETCLADQETGSKNIVSCDSNIGADKVEKKKQIQHVCQEMELKMCQSSENIILSDQIKDHNSSEARFSSKNIKDLRLASDNVSIDQFLRKRHEPESVSSDVSEQGSIHLEPLTPSEVLEYEATEILQKGSGDPSAKTDEVVSDQTDDIPGGNNPSTTEATVDLEDEKERS

SEQ ID NO: 99568 - protein, 421 aa, Homo sapiens
  Payload ID: 19851
  Gene Name: zinc finger protein 280D
  Uniprot ID: Q6N043
  ENSP ID: ENSP00000454173
MLVNDFYYGKHEGDVQEEQKTHTTFKCFSCLKILKNNIRFMNHMKHHLELEKQSSESWENHTTCQHCYRQFPTPFQLQCHIESTHTPHEFSTICKICELSFETEHVLLQHMKDNHKPGEMPYVCQVCNYRSSSFSDVETHFRTSHENTKNLLCPFCLKVIKIATPYMHHYMKHQKKGIHRCTKCRLQFLTCKEKMDHKTQHHRTFIKPKQLEGLPPGTKVTIRASVGPLQSGASPTPSISASASTLQLSPPRTKNITAKNPAKSNTSKPNTVKSNASKPNTSKPNGSKSKYKPKISNMQKKQSTLASSNKKSKVNTALRNLRYRRGIHKCIECCSEIKDFANHFPTYVHCSFCRYNTSCSKAYVNHMMSFHSNRPSKRFCIFKKHSENLRCVGGQIECDLPKLHKLVVEPRLTLGLLTPNF

SEQ ID NO: 99569 - protein, 895 aa, Homo sapiens
  Payload ID: 19852
  Gene Name: zinc finger protein 281
  Uniprot ID: Q9Y2X9
  ENSP ID: ENSP00000294740
MKIGSGFLSGGGGTGSSGGSGSGGGGSGGGGGGGSSGRRAEMEPTFPQGMVMFNHRLPPVTSFTRPAGSAAPPPQCVLSSSTSAAPAAEPPPPPAPDMTFKKEPAASAAAFPSQRTSWGFLQSLVSIKQEKPADPEEQQSHHHHHHHHYGGLFAGAEERSPGLGGGEGGSHGVIQDLSILHQHVQQQPAQHHRDVLLSSSSRTDDHHGTEEPKQDTNVKKAKRPKPESQGIKAKRKPSASSKPSLVGDGEGAILSPSQKPHICDHCSAAFRSSYHLRRHVLIHTGERPFQCSQCSMGFIQKYLLQRHEKIHSREKPFGCDQCSMKFIQKYHMERHKRTHSGEKPYKCDTCQQYFSRTDRLLKHRRTCGEVIVKGATSAEPGSSNHTNMGNLAVLSQGNTSSSRRKTKSKSIAIENKEQKTGKTNESQISNNINMQSYSVEMPTVSSSGGIIGTGIDELQKRVPKLIFKKGSRKNTDKNYLNFVSPLPDIVGQKSLSGKPSGSLGIVSNNSVETIGLLQSTSGKQGQISSNYDDAMQFSKKRRYLPTASSNSAFSINVGHMVSQQSVIQSAGVSVLDNEAPLSLIDSSALNAEIKSCHDKSGIPDEVLQSILDQYSNKSESQKEDPFNIAEPRVDLHTSGEHSELVQEENLSPGTQTPSNDKASMLQEYSKYLQQAFEKSTNASFTLGHGFQFVSLSSPLHNHTLFPEKQIYTTSPLECGFGQSVTSVLPSSLPKPPFGMLFGSQPGLYLSALDATHQQLTPSQELDDLIDSQKNLETSSAFQSSSQKLTSQKEQKNLESSTGFQIPSQELASQIDPQKDIEPRTTYQIENFAQAFGSQFKSGSRVPMTFITNSNGEVDHRVRTSVSDFSGYTNMMSDVSEPCSTRVKTPTSQSYR

SEQ ID NO: 99570 - protein, 859 aa, Homo sapiens
  Payload ID: 19852
  Gene Name: zinc finger protein 281
  Uniprot ID: Q9Y2X9
  ENSP ID: ENSP00000356321
MKIGSGFLSGGGGTGSSGGSGSGGGGSGGGGGGGSSGRRAEMEPTFPQAPAAEPPPPPAPDMTFKKEPAASAAAFPSQRTSWGFLQSLVSIKQEKPADPEEQQSHHHHHHHHYGGLFAGAEERSPGLGGGEGGSHGVIQDLSILHQHVQQQPAQHHRDVLLSSSSRTDDHHGTEEPKQDTNVKKAKRPKPESQGIKAKRKPSASSKPSLVGDGEGAILSPSQKPHICDHCSAAFRSSYHLRRHVLIHTGERPFQCSQCSMGFIQKYLLQRHEKIHSREKPFGCDQCSMKFIQKYHMERHKRTHSGEKPYKCDTCQQYFSRTDRLLKHRRTCGEVIVKGATSAEPGSSNHTNMGNLAVLSQGNTSSSRRKTKSKSIAIENKEQKTGKTNESQISNNINMQSYSVEMPTVSSSGGIIGTGIDELQKRVPKLIFKKGSRKNTDKNYLNFVSPLPDIVGQKSLSGKPSGSLGIVSNNSVETIGLLQSTSGKQGQISSNYDDAMQFSKKRRYLPTASSNSAFSINVGHMVSQQSVIQSAGVSVLDNEAPLSLIDSSALNAEIKSCHDKSGIPDEVLQSILDQYSNKSESQKEDPFNIAEPRVDLHTSGEHSELVQEENLSPGTQTPSNDKASMLQEYSKYLQQAFEKSTNASFTLGHGFQFVSLSSPLHNHTLFPEKQIYTTSPLECGFGQSVTSVLPSSLPKPPFGMLFGSQPGLYLSALDATHQQLTPSQELDDLIDSQKNLETSSAFQSSSQKLTSQKEQKNLESSTGFQIPSQELASQIDPQKDIEPRTTYQIENFAQAFGSQFKSGSRVPMTFITNSNGEVDHRVRTSVSDFSGYTNMMSDVSEPCSTRVKTPTSQSYR

SEQ ID NO: 99571 - protein, 895 aa, Homo sapiens; identical to SEQ ID NO: 99569
  Payload ID: 19852
  Gene Name: zinc finger protein 281
  Uniprot ID: Q9Y2X9
  ENSP ID: ENSP00000356322

SEQ ID NO: 99572 - protein, 463 aa, Homo sapiens
  Payload ID: 19853
  Gene Name: zinc finger protein 282
  Uniprot ID: Q9UDV7
  ENSP ID: ENSP00000418840
MQFVSTRPQPQQLGIQGLGLDSGSWSWAQALPPEEVCHQEPALRGEMAEGMPPMQAQEWDMDARRPMPFQFPPFPDRAPVFPDRMMREPQLPTAEISLWTVVAAIQAVERKVDAQASQLLNLEGRTGTAEKKLADCEKTAVEFGNHMESKWAVLGTLLQEYGLLQRRLENLENLLRNRNFWVLRLPPGSKGEAPKVPVTFVDIAVYFSEDEWKNLDEWQKELYNNLVKENYKTLMSLDAEGSVPKPDAPVQAEPREEPCVWEQRHPEEREIPMDPEAGAEPLVPAQDASSQVKREDTLCVRGQRGLEERAIPTESITDSPISAQDLLSRIKQEEHQCVWDQQDLADRDIPTDPNSESLISAHDILSWIKQEEQPYPWGPRDSMDGELGLDSGPSDSLLMVKNPPPAPPQPQPQPQPPQPQLQSQPQPQSLPPIAVAENPGGPPSRGLLDDGFQPHQGAALRVR

SEQ ID NO: 99573 - protein, 671 aa, Homo sapiens
  Payload ID: 19853
  Gene Name: zinc finger protein 282
  Uniprot ID: Q9UDV7
  ENSP ID: ENSP00000477841
MQFVSTRPQPQQLGIQGLGLDSGSWSWAQALPPEEVCHQEPALRGEMAEGMPPMQAQEWDMDARRPMPFQFPPFPDRAPVFPDRMMREPQLPTAEISLWTVVAAIQAVERKVDAQASQLLNLEGRTGTAEKKLADCEKTAVEFGNHMESKWAVLGTLLQEYGLLQRRLENLENLLRNRNFWVLRLPPGSKGEAPKVPVTFVDIAVYFSEDEWKNLDEWQKELYNNLVKENYKTLMSLDAEGSVPKPDAPVQAEPREEPCVWEQRHPEEREIPMDPEAGAEPLVPAQDASSQVKREDTLCVRGQRGLEERAIPTESITDSPISAQDLLSRIKQEEHQCVWDQQDLADRDIPTDPNSESLISAHDILSWIKQEEQPYPWGPRDSMDGELGLDSGPSDSLLMVKNPPPAPPQPQPQPQPPQPQLQSQPQPQSLPPIAVAENPGGPPSRGLLDDGFQVLPGERGSGEAPPGGDRSTGGGGGDGGGGGGGAEAGTGAGGGCGSCCPGGLRRSLLLHGARSKPYSCPECGKSFGVRKSLIIHHRSHTKERPYECAECEKSFNCHSGLIRHQMTHRGERPYKCSECEKTYSRKEHLQNHQRLHTGERPFQCALCGKSFIRKQNLLKHQRIHTGERPYTCGECGKSFRYKESLKDHLRVHSGGPGPGAPRQLPPPPERD

SEQ ID NO: 99574 - protein, 679 aa, Homo sapiens
  Payload ID: 19854
  Gene Name: zinc finger protein 283
  Uniprot ID: Q8N7M2
  ENSP ID: ENSP00000327314
MESRSVAQAGVQWCDLGSLQAPPPGFTLFSCLSLLSSWDYSSGFSGFCASPIEESHGALISSCNSRTMTDGLVTFRDVAIDFSQEEWECLDPAQRDLYVDVMLENYSNLVSLDLESKTYETKKIFSENDIFEINFSQWEMKDKSKTLGLEASIFRNNWKCKSIFEGLKGHQEGYFSQMIISYEKIPSYRKSKSLTPHQRIHNTEKSYVCKECGKACSHGSKLVQHERTHTAEKHFECKECGKNYLSAYQLNVHQRFHTGEKPYECKECGKTFSWGSSLVKHERIHTGEKPYECKECGKAFSRGYHLTQHQKIHTGVKSYKCKECGKAFFWGSSLAKHEIIHTGEKPYKCKECGKAFSRGYQLTQHQKIHTGKKPYECKICGKAFCWGYQLTRHQIFHTGEKPYECKECGKAFNCGSSLIQHERIHTGEKPYECKECGKAFSRGYHLSQHQKIHTGEKPFECKECGKAFSWGSSLVKHERVHTGEKSHECKECGKTFCSGYQLTRHQVFHTGEKPYECKECGKAFNCGSSLVQHERIHTGEKPYECKECGKAFSRGYHLTQHQKIHTGEKPFKCKECGKAFSWGSSLVKHERVHTNEKSYECKDCGKAFGSGYQLSVHQRFHTGEKLYQRKEFGKTFTCGSKLVHERTHSNDKPYKYNECGEAFLWTTYSNEKIDTDETL

SEQ ID NO: 99575 - protein, 79 aa, Homo sapiens
  Payload ID: 19854
  Gene Name: zinc finger protein 283
  ENSP ID: ENSP00000465054
MCLITLNNSYRMFESCSGFSGFCASPIEESHGALISSCNSRTMTDGLVTFRDVAIDFSQEEWECLDPAQRDFRDEVSPC

SEQ ID NO: 99576 - protein, 45 aa, Homo sapiens
  Payload ID: 19854
  Gene Name: zinc finger protein 283
  ENSP ID: ENSP00000465942
MTDGLVTFRDVAIDFSQEEWECLDPAQRDLYVDVMLENYSNLVSL

SEQ ID NO: 99577 - protein, 94 aa, Homo sapiens [sequence omitted]

SEQ ID NO: 99578 - protein, 107 aa, Homo sapiens
  Payload ID: 19854
  Gene Name: zinc finger protein 283
  ENSP ID: ENSP00000468508
MESRSVAQAGVQWCDLGSLQAPPPGFTLFSCLSLLSSWDYSSGFSGFCASPIEESHGALISSCNSRTMTDGLVTFRDVAIDFSQEEWECLDPAQRDFFLHWKLQGYL

SEQ ID NO: 99579 - protein, 540 aa, Homo sapiens
  Payload ID: 19854
  Gene Name: zinc finger protein 283
  ENSP ID: ENSP00000468708
MKDKSKTLGLEASIFRNNWKCKSIFEGLKGHQEGYFSQMIISYEKIPSYRKSKSLTPHQRIHNTEKSYVCKECGKACSHGSKLVQHERTHTAEKHFECKECGKNYLSAYQLNVHQRFHTGEKPYECKECGKTFSWGSSLVKHERIHTGEKPYECKECGKAFSRGYHLTQHQKIHTGVKSYKCKECGKAFFWGSSLAKHEIIHTGEKPYKCKECGKAFSRGYQLTQHQKIHTGKKPYECKICGKAFCWGYQLTRHQIFHTGEKPYECKECGKAFNCGSSLIQHERIHTGEKPYECKECGKAFSRGYHLSQHQKIHTGEKPFECKECGKAFSWGSSLVKHERVHTGEKSHECKECGKTFCSGYQLTRHQVFHTGEKPYECKECGKAFNCGSSLVQHERIHTGEKPYECKECGKAFSRGYHLTQHQKIHTGEKPFKCKECGKAFSWGSSLVKHERVHTNEKSYECKDCGKAFGSGYQLSVHQRFHTGEKLYQRKEFGKTFTCGSKLVHERTHSNDKPYKYNECGEAFLWTTYSNEKIDTDETL

SEQ ID NO: 99580 - protein, 679 aa, Homo sapiens; identical to SEQ ID NO: 99574
  Payload ID: 19854
  Gene Name: zinc finger protein 283
  Uniprot ID: Q8N7M2
  ENSP ID: ENSP00000484852

SEQ ID NO: 99581 - protein, 593 aa, Homo sapiens
  Payload ID: 19855
  Gene Name: zinc finger protein 284
  Uniprot ID: Q2VY69
  ENSP ID: ENSP00000411032
MTMFKEAVTFKDVAVVFTEEELGLLDVSQRKLYRDVMLENFRNLLSVGHQLSHRDTFHFQREEKFWIMETATQREGNSGGKIQTELESVPETGPHEEWSCQQIWEQTASELTRPQDSISSSQFSTQGDVPSQVDAGLSIIHIGETPSEHGKCKKFFSDVSILDLHQQLHSGKISHTCNEYRKRFCYSSALCLHQKVHMGEKRYKCDVCSKAFSQNSQLQTHQRIHTGEKPFKCEQCGKSFSRRSGMYVHCKLHTGEKPHICEECGKAFIHNSQLREHQRIHTGEKPFKCYICGKSFHSRSNLNRHSMVHMQEKSFRCDTCSNSFGQRSALNSHCMDHTKEKLYKCEECGRSFTCRQDLCKHQMDHTGDKPYNCNVCGKGFRWSSCLSRHQRVHNGETTFKCDGCGKRFYMNSQGHSHQRAYREEELYKCQKCGKGYISKFNLDLHQRVHTGERPYNCKECGKSFRWASGILRHKRLHTGEKPFKCEECGKRFTENSKLRFHQRIHTGEKPYKCEECGKGFRWASTHLTHQRLHSREKLFQCEDCGKSSEHSSCLQDQQSDHSGEKTSKCEDCGKRYERRLNLDMILSLFLNDI

SEQ ID NO: 99582 - protein, 590 aa, Homo sapiens
  Payload ID: 19856
  Gene Name: zinc finger protein 285
  Uniprot ID: Q96NJ3
  ENSP ID: ENSP00000439431
MIKFQERVTFKDVAVVFTKEELALLDKAQINLYQDVMLENFRNLMLVRDGIKNNILNLQAKGLSYLSQEVLHCWQIWKQRIRDLTVSQDYIVNLQEECSPHLEDVSLSEEWAGISLQISENENYVVNAIIKNQDITAWQSLTQVLTPESWRKANIMTEPQNSQGRYKGIYMEEKLYRRAQHDDSLSWTSCDHHESQECKGEDPGRHPSCGKNLGMKSTVEKRNAAHVLPQPFPCNNCGVAFADDTDPHVHHSTHLGEKSYKCDQYGKNFSQSQDLIVHCKTHSGKTPYEFHEWPMGCKQSSDLPRYQKVSSGDKPYKCKECGKGFRRSSSLHNHHRVHTGEMPYKCDECGKGFGFRSLLCIHQGVHTGKKPYKCEECGKGFDQSSNLLVHQRVHTGEKPYKCSECGKCFSSSSVLQVHWRFHTGEKPYRCGECGKGFSQCTHLHIHQRVHTGEKPYKCNVCGKDFAYSSVLHTHQRVHTGEKPYKCEVCGKCFSYSSYFHLHQRDHIREKPYKCDECGKGFSRNSDLNVHLRVHTGERPYKCKACGKGFSRNSYLLAHQRVHIDETQYTHCERGKDLLTHQRLHEQRETL

SEQ ID NO: 99583 - protein, 597 aa, Homo sapiens
  Payload ID: 19856
  Gene Name: zinc finger protein 285
  ENSP ID: ENSP00000464788
MIKFQIQGIHVQERVTFKDVAVVFTKEELALLDKAQINLYQDVMLENFRNLMLVRDGIKNNILNLQAKGLSYLSQEVLHCWQIWKQRIRDLTVSQDYIVNLQEECSPHLEDVSLSEEWAGISLQISENENYVVNAIIKNQDITAWQSLTQVLTPESWRKANIMTEPQNSQGRYKGIYMEEKLYRRAQHDDSLSWTSCDHHESQECKGEDPGRHPSCGKNLGMKSTVEKRNAAHVLPQPFPCNNCGVAFADDTDPHVHHSTHLGEKSYKCDQYGKNFSQSQDLIVHCKTHSGKTPYEFHEWPMGCKQSSDLPRYQKVSSGDKPYKCKECGKGFRRSSSLHNHHRVHTGEMPYKCDECGKGFGFRSLLCIHQGVHTGKKPYKCEECGKGFDQSSNLLVHQRVHTGEKPYKCSECGKCFSSSSVLQVHWRFHTGEKPYRCGECGKGFSQCTHLHIHQRVHTGEKPYKCNVCGKDFAYSSVLHTHQRVHTGEKPYKCEVCGKCFSYSSYFHLHQRDHIREKPYKCDECGKGFSRNSDLNVHLRVHTGERPYKCKACGKGFSRNSYLLAHQRVHIDETQYTHCERGKDLLTHQRLHEQRETL

SEQ ID NO: 99584 - protein, 56 aa, Homo sapiens
  Payload ID: 19856
  Gene Name: zinc finger protein 285
  ENSP ID: ENSP00000467795
MIKFQIQGIHVQERVTFKDVAVVFTKEELALLDKAQINLYQDVMLENFRNLMLVSE

SEQ ID NO: 99585 - protein, 39 aa, Homo sapiens
  Payload ID: 19856
  Gene Name: zinc finger protein 285
  ENSP ID: ENSP00000468399
MTEPQNSQGRYKGIYMEEKLYRRAQHDDSLSWTSCDHHE

SEQ ID NO: 99586 - protein, 590 aa, Homo sapiens; identical to SEQ ID NO: 99582
  Payload ID: 19856
  Gene Name: zinc finger protein 285
  Uniprot ID: Q96NJ3
  ENSP ID: ENSP00000483662

SEQ ID NO: 99587 - protein, 141 aa, Homo sapiens
  Payload ID: 19857
  Gene Name: zinc finger protein 286A
  ENSP ID: ENSP00000379230
METDLAEMPEKGALSSQDSPHFQEKSTEEGEVAALRLTARSQETVTFKDVAMDFTPEEWGKLDPAQRDVMLENYRNLVSLWLPVSKPESYNLENGKEPLKLERKAPKSSYSAVAVIILFLIPYVHLESWFREITGRRISRS

SEQ ID NO: 99588 - protein, 116 aa, Homo sapiens
  Payload ID: 19857
  Gene Name: zinc finger protein 286A
  ENSP ID: ENSP00000379231
METDLAEMPEKGALSSQDSPHFQEKSTEEGEVAALRLTARSQETVTFKDVAMDFTPEEWGKLDPAQRDVMLENYRNLVSLWLPVSKPESYNLENGKEPLKLERKAPKSSYSELPFC

SEQ ID NO: 99589 - protein, 521 aa, Homo sapiens; identical to SEQ ID NO: 87095
  Payload ID: 19857
  Gene Name: zinc finger protein 286A
  Uniprot ID: Q9HBT8
  ENSP ID: ENSP00000397163

SEQ ID NO: 99590 - protein, 60 aa, Homo sapiens
  Payload ID: 19857
  Gene Name: zinc finger protein 286A
  ENSP ID: ENSP00000461939
METDLAEMPEKGALSSQDSPHFQEKSTEEGEVAALRLTARSQNCLFVEHRKRRKFAFPMS

SEQ ID NO: 99591 - protein, 106 aa, Homo sapiens
  Payload ID: 19857
  Gene Name: zinc finger protein 286A
  ENSP ID: ENSP00000461982
MGALSSQDSPHFQEKSTEEGEVAALRLTARSQETVTFKDVAMDFTPEEWGKLDPAQRDVMLENYRNLVSLWLPVSKPESYNLENGKEPLKLERKAPKSSYSELPFC

SEQ ID NO: 99592 - protein, 60 aa, Homo sapiens
  Payload ID: 19857
  Gene Name: zinc finger protein 286A
  ENSP ID: ENSP00000462182
METDLAEMPEKGALSSQDSPHFQEKSTEEGEVAALRLTARSQGFQFPNLRATTWRMEKNH

SEQ ID NO: 99593 - protein, 171 aa, Homo sapiens
  Payload ID: 19857
  Gene Name: zinc finger protein 286A
  ENSP ID: ENSP00000462509
MGEPRREGRKWDHEARGASNSSGQGDLNWGEEQNLQNKEEVVIMETDLAEMPEKGALSSQDSPHFQEKSTEEGEVAALRLTARSQETVTFKDVAMDFTPEEWGKLDPAQRDVMLENYRNLVSLWLPVSKPESYNLENGKEPLKLERKAPKSSYSDMETRPQSKDSTSVQDF

SEQ ID NO: 99594 - protein, 116 aa, Homo sapiens; identical to SEQ ID NO: 99588
  Payload ID: 19857
  Gene Name: zinc finger protein 286A
  ENSP ID: ENSP00000462679

SEQ ID NO: 99595 - protein, 50 aa, Homo sapiens
  Payload ID: 19857
  Gene Name: zinc finger protein 286A
  ENSP ID: ENSP00000463915
MGALSSQDSPHFQEKSTEEGEVAALRLTARSQGFQFPNLRATTWRMEKNH

SEQ ID NO: 99596 - protein, 521 aa, Homo sapiens; identical to SEQ ID NO: 87095
  Payload ID: 19857
  Gene Name: zinc finger protein 286A
  Uniprot ID: Q9HBT8
  ENSP ID: ENSP00000464063

SEQ ID NO: 99597 - protein, 521 aa, Homo sapiens; identical to SEQ ID NO: 87095
  Payload ID: 19857
  Gene Name: zinc finger protein 286A
  Uniprot ID: Q9HBT8
  ENSP ID: ENSP00000464218

SEQ ID NO: 99598 - protein, 511 aa, Homo sapiens; identical to SEQ ID NO: 87092
  Payload ID: 19857
  Gene Name: zinc finger protein 286A
  Uniprot ID: Q9HBT8
  ENSP ID: ENSP00000466154

SEQ ID NO: 99599 - protein, 92 aa, Homo sapiens
  Payload ID: 19857
  Gene Name: zinc finger protein 286A
  ENSP ID: ENSP00000467116
EGEVAALRLTARSQETVTFKDVAMDFTPEEWGKLDPAQRDVMLENYRNLVSLWLPVSKPESYNLENGKEPLKLERKAPKSSYSGEPDRWESS

SEQ ID NO: 99600 - protein, 119 aa, Homo sapiens
  Payload ID: 19857
  Gene Name: zinc finger protein 286A
  ENSP ID: ENSP00000467718
METRPQSKDSTSVQDFSKAESCKVAIIDRLTRNSVYDSNLEAALECENWLENQQGNQERHLREMFTHMNSLSEETDHKHDVYWKSFNQKSVLITEDRVPKGSYAFHTLEKSLKQKSNLM

SEQ ID NO: 99601 - protein, 65 aa, Homo sapiens
  Payload ID: 19858
  Gene Name: zinc finger protein 286B
  ENSP ID: ENSP00000460210
METDLAEMPEKGVLSSQDSPHFQEKSTEEGEVAALRLTARSQNCLFVEHRKRRKFAFPMSFRRGD

SEQ ID NO: 99602 - protein, 112 aa, Homo sapiens
  Payload ID: 19858
  Gene Name: zinc finger protein 286B
  ENSP ID: ENSP00000460736
METDLAEMPEKGGENCGRVELVAWKDEIPAPEGKTVGSGEVALGWLSPLSWGWMGFLSETEELGMGAPPFPWQLGTQWTLQSYPQNFCLPRILPISKRRAQKREKWLLCASR

SEQ ID NO: 99603 - protein, 522 aa, Homo sapiens
  Payload ID: 19858
  Gene Name: zinc finger protein 286B
  Uniprot ID: P0CG31
  ENSP ID: ENSP00000461413
METDLAEMPEKGVLSSQDSPHFQEKSTEEGEVAALRLTARSQAAAAAAAPGSRSLRGVHVPPPLHPAPAREEIKSTCSLKACFSLSLTLTYYRTAFLLSTENEGNLHFQCPSDVETRPQSKDSTSVQDFSKAESCKVAIIDRLTRNSVYDSNLEAALECENWLEKQQGNQERHLREMFTHMNSLSEETDHEHDVYWKSFNQKSVLITEDRVPKGSYAFHTLEKSLKQKSNLMKKQRTYKEKKPHKCNDCGELFTCHSVHIQHQRVHTGEKPYTCNECGKSFSHRANLTKHQRTHTRILFECRECKKTFTESSSLATHQRIHVGERPYECNECGKGFNRSTHLVQHQLIHTGVRPYECNECDKAFIHSSALIKHQRTHTGEKPYKCQECGKAFSHCSSLTKHQRVHTGEKPYECSECGKTFSQSTHLVQHQRIHTGEKPYECSECGKTFSQSSNFAKHQRIHIGKKPYKCSECGKAFIHSSALIQHQRTHTGEKPFRCNECGKSFKCSSSLIRHQRVHTEEQP

SEQ ID NO: 99604 - protein, 129 aa, Homo sapiens
  Payload ID: 19858
  Gene Name: zinc finger protein 286B
  ENSP ID: ENSP00000462368
METDLAEMPEKGVLSSQDSPHFQEKSTEEGEVAALRLTARSQAAAAAAAPGSRSLRGVHVPPPLHPAPAREESARTPAAAGRAAKMAEAPASPAPLSPLEVELDPEFEPQSRPRSCTWPLQRPELQASP

SEQ ID NO: 99605 - protein, 106 aa, Homo sapiens
  Payload ID: 19858
  Gene Name: zinc finger protein 286B
  ENSP ID: ENSP00000463300
METDLAEMPEKGVLSSQDSPHFQEKSTEEGEVAALRLTARSQAAAAAAAPGSRSLRGVHVPPPLHPAPAREESARTPAAAGRAAKMAEAPASPAPLSPLEVELDPE

SEQ ID NO: 99606 - protein, 761 aa, Homo sapiens
  Payload ID: 19859
  Gene Name: zinc finger protein 287
  Uniprot ID: Q9HBT7
  ENSP ID: ENSP00000379168
MLASSKRMNSSSRSQILLRWKSDKAQSGPYNVEKEILTSRFLRDTETCRQNFRNFPYPDLAGPRKALSQLRELCLKWLRPEIHSKEQILELLVLEQFLTILPGEVRTWVKSQYPESSEEAVTLVEDLTQILEEEAPQNSTLSQDTPEEDPRGKHAFQTGWLNDLVTKESMTFKDVAVDITQEDWELMRPVQKELYKTVTLQNYWNMVSLGLTVYRPTVIPILEEPWMVIKEILEGPSPEWETKAQACTPVEDMSKLTKEETHTIKLEDSYDYDDRLERRGKGGFWKIHTDERGFSLKSVLSQEYDPTEECLSKYDIYRNNFEKHSNLIVQFDTQLDNKTSVYNEGRATFNHVSYGIVHRKILPGEKPYKCNVCGKKFRKYPSLLKHQSTHAKEKSYECEECGKEFRHISSLIAHQRMHTGEKPYECHQCGKAFSQRAHLTIHQRIHTGEKPYKCDDCGKDFSQRAHLTIHQRTHTGEKPYKCLECGKTFSHSSSLINHQRVHTGEKPYICNECGKTFSQSTHLLQHQKIHTGKKPYKCNECWKVFSQSTYLIRHQRIHSGEKCYKCNECGKAFAHSSTLIQHQTTHTGEKSYICNICGKAFSQSANLTQHHRTHTGEKPYKCSVCGKAFSQSVHLTQHQRIHNGEKPFKCNICGKAYRQGANLTQHQRIHTGEKPYKCNECGKAFIYSSSLNQHQRTHTGERPYKCNECDKDFSQRTCLIQHQRIHTGEKPYACRICGKTFTQSTNLIQHQRVHTGAKHRN

SEQ ID NO: 99607 - protein, 761 aa, Homo sapiens; identical to SEQ ID NO: 99606
  Payload ID: 19859
  Gene Name: zinc finger protein 287
  Uniprot ID: Q9HBT7
  ENSP ID: ENSP00000379169

SEQ ID NO: 99608 - protein, 57 aa, Homo sapiens
  Payload ID: 19859
  Gene Name: zinc finger protein 287
  ENSP ID: ENSP00000406051
MLASSKRMNSSSRSQILLRWKSDKAQSGPYNVEKEILTSRFLRDTETCRQNFRNFPY

SEQ ID NO: 99609 - protein, 2718 aa, Homo sapiens
  Payload ID: 19860
  Gene Name: zinc finger protein 292
  ENSP ID: ENSP00000342847
MADEEAEQERLSCGEGGCVAELQRLGERLQELELQLRESRVPAVEAATDYCQQLCQTLLEYAEKWKTSEDPLPLLEVYTVAIQSYVKARPYLTSECENVALVLERLALSCVELLLCLPVELSDKQWEQFQTLVQVAHEKLMENGSCELHFLATLAQETGVWKNPVLCTILSQEPLDKDKAFEGPILLDMRIKHLIKTNQLSQATALAKLCSDHPEIGIKGSFKQTYLVCLCTSSPNGKLIEEISEVDCKDALEMICNLESEGDEKSALVLCTAFLSRQLQQGDMYCAWELTLFWSKLQQRVEPSIQVYLERCRQLSLLTKTVYHIFFLIKVINSETEGAGLATCIELCVKALRLESTENTEVKISICKTISCLLPDDLEVKRACQLSEFLIEPTVDAYYAVEMLYNQPDQKYDEENLPIPNSLRCELLLVLKTQWPFDPEFWDWKTLKRQCLALMGEEASIVSSIDELNDSEVYEKVVDYQEESKETSMNGLSGGVGANSGLLKDIGDEKQKKREIKQLRERGFISARFRNWQAYMQYCVLCDKEFLGHRIVRHAQKHYKDGIYSCPICAKNFNSKETFVPHVTLHVKQSSKERLAAMKPLRRLGRPPKITTTNENQKTNTVAKQEQRPIKKNSLYSTDFIVFNDNDGSDDENDDKDKSYEPEVIPVQKPVPVNEFNCPVTFCKKGFKYFKNLIAHVKGHKDNEDAKRFLEMQSKKVICQYCRRHFVSVTHLNDHLQMHCGSKPYICIQMKCKAGFNSYAELLTHRKEHQVFRAKCMFPKCGRIFSEAYLLYDHEAQHYNTYTCKFTGCGKVYRSQGELEKHLDDHSTPPEKVLPPEAQLNSSGDSIQPSEVNQNTAENIEKERSMLPSENNIENSLLADRSDAWDKSKAESAVTKQDQISASELRQANGPLSNGLENPATTPLLQSSEVAVSIKVSLNQGIEDNFGKQENSTVEGSGEALVTDLHTPVEDTCNDLCHPGFQERKEQDCFNDAHVTQNSLVNSETLKIGDLTPQNLERQVNNLMTFSVQNQAAFQNNLPTSKFECGDNVKTSSNLYNLPLKTLESIAFVPPQSDLSNSLGTPSVPPKAPVQKFSCQVEGCTRTYNSSQSIGKHMKTAHPDQYAAFKMQRKSKKGQKANNLNTPNNGKFVYFLPSPVNSSNPFFTSQTKANGNPACSAQLQHVSPPIFPAHLASVSTPLLSSMESVINPNITSQDKNEQGGMLCSQMENLPSTALPAQMEDLTKTVLPLNIDSGSDPFLPLPAESSSMSLFPSPADSGTNSVFSQLENNTNHYSSQIEGNTNSSFLKGGNGENAVFPSQVNVANNFSSTNAQQSAPEKVKKDRGRGPNGKERKPKHNKRAKWPAIIRDGKFICSRCYRAFTNPRSLGGHLSKRSYCKPLDGAEIAQELLQSNGQPSLLASMILSTNAVNLQQPQQSTFNPEACFKDPSFLQLLAENRSPAFLPNTFPRSGVTNFNTSVSQEGSEIIKQALETAGIPSTFEGAEMLSHVSTGCVSDASQVNATVMPNPTVPPLLHTVCHPNTLLTNQNRTSNSKTSSIEECSSLPVFPTNDLLLKTVENGLCSSSFPNSGGPSQNFTSNSSRVSVISGPQNTRSSHLNKKGNSASKRRKKVAPPLIAPNASQNLVTSDLTTMGLIAKSVEIPTTNLHSNVIPTCEPQSLVENLTQKLNNVNNQLFMTDVKENFKTSLESHTVLAPLTLKTENGDSQMMALNSCTTSINSDLQISEDNVIQNFEKTLEIIKTAMNSQILEVKSGSQGAGETSQNAQINYNIQLPSVNTVQNNKLPDSSPFSSFISVMPTKSNIPQSEVSHKEDQIQEILEGLQKLKLENDLSTPASQCVLINTSVTLTPTPVKSTADITVIQPVSEMINIQFNDKVNKPFVCQNQGCNYSAMTKDALFKHYGKIHQYTPEMILEIKKNQLKFAPFKCVVPTCTKTFTRNSNLRAHCQLVHHFTTEEMVKLKIKRPYGRKSQSENVPASRSTQVKKQLAMTEENKKESQPALELRAETQNTHSNVAVIPEKQLVEKKSPDKTESSLQVITVTSEQCNTNALTNTQTKGRKIRRHKKEKEEKKRKKPVSQSLEFPTRYSPYRPYRCVHQGCFAAFTIQQNLILHYQAVHKSDLPAFSAEVEEESEAGKESEETETKQTLKEFRCQVSDCSRIFQAITGLIQHYMKLHEMTPEEIESMTASVDVGKFPCDQLECKSSFTTYLNYVVHLEADHGIGLRASKTEEDGVYKCDCEGCDRIYATRSNLLRHIFNKHNDKHKAHLIRPRRLTPGQENMSSKANQEKSKSKHRGTKHSRCGKEGIKMPKTKRKKKNNLENKNAKIVQIEENKPYSLKRGKHVYSIKARNDALSECTSRFVTQYPCMIKGCTSVVTSESNIIRHYKCHKLSKAFTSQHRNLLIVFKRCCNSQVKETSEQEGAKNDVKDSDTCVSESNDNSRTTATVSQKEVEKNEKDEMDELTELFITKLINEDSTSVETQANTSSNVSNDFQEDNLCQSERQKASNLKRVNKEKNVSQNKKRKVEKAEPASAAELSSVRKEEETAVAIQTIEEHPASFDWSSFKPMGFEVSFLKFLEESAVKQKKNTDKDHPNTGNKKGSHSNSRKNIDKTAVTSGNHVCPCKESETFVQFANPSQLQCSDNVKIVLDKNLKDCTELVLKQLQEMKPTVSLKKLEVHSNDPDMSVMKDISIGKATGRGQY

SEQ ID NO: 99610 - protein, 2723 aa, Homo sapiens
  Payload ID: 19860
  Gene Name: zinc finger protein 292
  Uniprot ID: O60281
  ENSP ID: ENSP00000358590
MADEEAEQERLSCGEGGCVAELQRLGERLQELELQLRESRVPAVEAATDYCQQLCQTLLEYAEKWKTSEDPLPLLEVYTVAIQSYVKARPYLTSECENVALVLERLALSCVELLLCLPVELSDKQWEQFQTLVQVAHEKLMENGSCELHFLATLAQETGVWKNPVLCTILSQEPLDKDKVNEFLAFEGPILLDMRIKHLIKTNQLSQATALAKLCSDHPEIGIKGSFKQTYLVCLCTSSPNGKLIEEISEVDCKDALEMICNLESEGDEKSALVLCTAFLSRQLQQGDMYCAWELTLFWSKLQQRVEPSIQVYLERCRQLSLLTKTVYHIFFLIKVINSETEGAGLATCIELCVKALRLESTENTEVKISICKTISCLLPDDLEVKRACQLSEFLIEPTVDAYYAVEMLYNQPDQKYDEENLPIPNSLRCELLLVLKTQWPFDPEFWDWKTLKRQCLALMGEEASIVSSIDELNDSEVYEKVVDYQEESKETSMNGLSGGVGANSGLLKDIGDEKQKKREIKQLRERGFISARFRNWQAYMQYCVLCDKEFLGHRIVRHAQKHYKDGIYSCPICAKNFNSKETFVPHVTLHVKQSSKERLAAMKPLRRLGRPPKITTTNENQKTNTVAKQEQRPIKKNSLYSTDFIVFNDNDGSDDENDDKDKSYEPEVIPVQKPVPVNEFNCPVTFCKKGFKYFKNLIAHVKGHKDNEDAKRFLEMQSKKVICQYCRRHFVSVTHLNDHLQMHCGSKPYICIQMKCKAGFNSYAELLTHRKEHQVFRAKCMFPKCGRIFSEAYLLYDHEAQHYNTYTCKFTGCGKVYRSQGELEKHLDDHSTPPEKVLPPEAQLNSSGDSIQPSEVNQNTAENIEKERSMLPSENNIENSLLADRSDAWDKSKAESAVTKQDQISASELRQANGPLSNGLENPATTPLLQSSEVAVSIKVSLNQGIEDNFGKQENSTVEGSGEALVTDLHTPVEDTCNDLCHPGFQERKEQDCFNDAHVTQNSLVNSETLKIGDLTPQNLERQVNNLMTFSVQNQAAFQNNLPTSKFECGDNVKTSSNLYNLPLKTLESIAFVPPQSDLSNSLGTPSVPPKAPVQKFSCQVEGCTRTYNSSQSIGKHMKTAHPDQYAAFKMQRKSKKGQKANNLNTPNNGKFVYFLPSPVNSSNPFFTSQTKANGNPACSAQLQHVSPPIFPAHLASVSTPLLSSMESVINPNITSQDKNEQGGMLCSQMENLPSTALPAQMEDLTKTVLPLNIDSGSDPFLPLPAESSSMSLFPSPADSGTNSVFSQLENNTNHYSSQIEGNTNSSFLKGGNGENAVFPSQVNVANNFSSTNAQQSAPEKVKKDRGRGPNGKERKPKHNKRAKWPAIIRDGKFICSRCYRAFTNPRSLGGHLSKRSYCKPLDGAEIAQELLQSNGQPSLLASMILSTNAVNLQQPQQSTFNPEACFKDPSFLQLLAENRSPAFLPNTFPRSGVTNFNTSVSQEGSEIIKQALETAGIPSTFEGAEMLSHVSTGCVSDASQVNATVMPNPTVPPLLHTVCHPNTLLTNQNRTSNSKTSSIEECSSLPVFPTNDLLLKTVENGLCSSSFPNSGGPSQNFTSNSSRVSVISGPQNTRSSHLNKKGNSASKRRKKVAPPLIAPNASQNLVTSDLTTMGLIAKSVEIPTTNLHSNVIPTCEPQSLVENLTQKLNNVNNQLFMTDVKENFKTSLESHTVLAPLTLKTENGDSQMMALNSCTTSINSDLQISEDNVIQNFEKTLEIIKTAMNSQILEVKSGSQGAGETSQNAQINYNIQLPSVNTVQNNKLPDSSPFSSFISVMPTKSNIPQSEVSHKEDQIQEILEGLQKLKLENDLSTPASQCVLINTSVTLTPTPVKSTADITVIQPVSEMINIQFNDKVNKPFVCQNQGCNYSAMTKDALFKHYGKIHQYTPEMILEIKKNQLKFAPFKCVVPTCTKTFTRNSNLRAHCQLVHHFTTEEMVKLKIKRPYGRKSQSENVPASRSTQVKKQLAMTEENKKESQPALELRAETQNTHSNVAVIPEKQLVEKKSPDKTESSLQVITVTSEQCNTNALTNTQTKGRKIRRHKKEKEEKKRKKPVSQSLEFPTRYSPYRPYRCVHQGCFAAFTIQQNLILHYQAVHKSDLPAFSAEVEEESEAGKESEETETKQTLKEFRCQVSDCSRIFQAITGLIQHYMKLHEMTPEEIESMTASVDVGKFPCDQLECKSSFTTYLNYVVHLEADHGIGLRASKTEEDGVYKCDCEGCDRIYATRSNLLRHIFNKHNDKHKAHLIRPRRLTPGQENMSSKANQEKSKSKHRGTKHSRCGKEGIKMPKTKRKKKNNLENKNAKIVQIEENKPYSLKRGKHVYSIKARNDALSECTSRFVTQYPCMIKGCTSVVTSESNIIRHYKCHKLSKAFTSQHRNLLIVFKRCCNSQVKETSEQEGAKNDVKDSDTCVSESNDNSRTTATVSQKEVEKNEKDEMDELTELFITKLINEDSTSVETQANTSSNVSNDFQEDNLCQSERQKASNLKRVNKEKNVSQNKKRKVEKAEPASAAELSSVRKEEETAVAIQTIEEHPASFDWSSFKPMGFEVSFLKFLEESAVKQKKNTDKDHPNTGNKKGSHSNSRKNIDKTAVTSGNHVCPCKESETFVQFANPSQLQCSDNVKIVLDKNLKDCTELVLKQLQEMKPTVSLKKLEVHSNDPDMSVMKDISIGKATGRGQY

SEQ ID NO: 99611 - protein, 132 aa, Homo sapiens
  Payload ID: 19860
  Gene Name: zinc finger protein 292
  ENSP ID: ENSP00000428073
  MOD_RES (1)..(1): Any amino acid
XEISEVDCKDALEMICNLESEGDEKSALVLCTAFLSRQLQQGDMYCAWELTLFWSKLQQRVEPSIQVYLERCRQLSLLTKTVYHIFFLIKVINSERWGLTILPRFISNSWAQVILRALAFQSGGITGMSHHT

SEQ ID NO: 99612 - protein, 256 aa, Homo sapiens
  Payload ID: 19860
  Gene Name: zinc finger protein 292
  ENSP ID: ENSP00000428857
VELRRRRLRRGAAAPGRAAPGAGATAAGEPGTGRGSGHRLLSAAVPDTPRICREMENFRRSFTFIGEVEEESEAGKESEETETKQTLKEFRCQVSDCSRIFQAITGLIQHYMKLHEMTPEEIESMTASVDVGKFPCDQLECKSSFTTYLNYVVHLEADHGIGLRASKTEEDGVYKCDCEGCDRIYATRSNLLRHIFNKHNDKHKAHLIRPRRLTPGQENMSSKANQEKSKSKHRGTKHSRCGKEGIKMPKTKRKKK

SEQ ID NO: 99613 - protein, 87 aa, Homo sapiens
  Payload ID: 19860
  Gene Name: zinc finger protein 292
  ENSP ID: ENSP00000428925
MADEEAEQERLSCGEGGCVAELQRLGERLQELELQLRESRVPAVEAATDYCQQLCQISEVDCKDALEMICNLESEGDEKSALVLCTA

SEQ ID NO: 99614 - protein, 66 aa, Homo sapiens
  Payload ID: 19860
  Gene Name: zinc finger protein 292
  ENSP ID: ENSP00000430569
MADEEAEQERLSCGEGGCVAELQRLGERLQELELQLRESRVPAVEAATDYCQQLCQGLTVTQAGMQ

SEQ ID NO: 99615 - protein, 475 aa, Homo sapiens
  Payload ID: 19861
  Gene Name: zinc finger protein 296
  Uniprot ID: Q8WUU4
  ENSP ID: ENSP00000302770
MSRRKAGSAPRRVEPAPAANPDDEMEMQDLVIELKPEPDAQPQQAPRLGPFSPKEVSSAGRFGGEPHHSPGPMPAGAALLALGPRNPWTLWTPLTPNYPDRQPWTDKHPDLLTCGRCLQTFPLEAITAFMDHKKLGCQLFRGPSRGQGSEREELKALSCLRCGKQFTVAWKLLRHAQWDHGLSIYQTESEAPEAPLLGLAEVAAAVSAVVGPAAEAKSPRASGSGLTRRSPTCPVCKKTLSSFSNLKVHMRSHTGERPYACDQCPYACAQSSKLNRHKKTHRQVPPQSPLMADTSQEQASAAPPEPAVHAAAPTSTLPCSGGEGAGAAATAGVQEPGAPGSGAQAGPGGDTWGAITTEQRTDPANSQKASPKKMPKSGGKSRGPGGSCEFCGKHFTNSSNLTVHRRSHTGERPYTCEFCNYACAQSSKLNRHRRMHGMTPGSTRFECPHCHVPFGLRATLDKHLRQKHPEAAGEA

SEQ ID NO: 99616 - protein, 451 aa, Homo sapiens
  Payload ID: 19861
  Gene Name: zinc finger protein 296
  ENSP ID: ENSP00000479435
MEMQDLVIELKPEPDAQPQQAPRLGPFSPKEVSSAGRFGGEPHHSPGPMPAGAALLALGPRNPWTLWTPLTPNYPDRQPWTDKHPDLLTCGRCLQTFPLEAITAFMDHKKLGCQLFRGPSRGQGSEREELKALSCLRCGKQFTVAWKLLRHAQWDHGLSIYQTESEAPEAPLLGLAEVAAAVSAVVGPAAEAKSPRASGSGLTRRSPTCPVCKKTLSSFSNLKVHMRSHTGERPYACDQCPYACAQSSKLNRHKKTHRQVPPQSPLMADTSQEQASAAPPEPAVHAAAPTSTLPCSGGEGAGAAATAGVQEPGAPGSGAQAGPGGDTWGAITTEQRTDPANSQKASPKKMPKSGGKSRGPGGSCEFCGKHFTNSSNLTVHRRSHTGERPYTCEFCNYACAQSSKLNRHRRMHGMTPGSTRFECPHCHVPFGLRATLDKHLRQKHPEAAGEA

SEQ ID NO: 99617 - protein, 20 aa, Homo sapiens
  Payload ID: 19862
  Gene Name: zinc finger protein 3
  ENSP ID: ENSP00000292393
MLAAALLKAKSQELVTFEDV

SEQ ID NO: 99618 - protein, 446 aa, Homo sapiens
  Payload ID: 19862
  Gene Name: zinc finger protein 3
  Uniprot ID: P17036
  ENSP ID: ENSP00000299667
METQADLVSQEPQALLDSALPSKVPAFSDKDSLGDEMLAAALLKAKSQELVTFEDVAVYFIRKEWKRLEPAQRDLYRDVMLENYGNVFSLDRETRTENDQEISEDTRSHGVLLGRFQKDISQGLKFKEAYEREVSLKRPLGNSPGERLNRKMPDFGQVTVEEKLTPRGERSEKYNDFGNSFTVNSNLISHQRLPVGDRPHKCDECSKSFNRTSDLIQHQRIHTGEKPYECNECGKAFSQSSHLIQHQRIHTGEKPYECSDCGKTFSCSSALILHRRIHTGEKPYECNECGKTFSWSSTLTHHQRIHTGEKPYACNECGKAFSRSSTLIHHQRIHTGEKPYECNECGKAFSQSSHLYQHQRIHTGEKPYECMECGGKFTYSSGLIQHQRIHTGENPYECSECGKAFRYSSALVRHQRIHTGEKPLNGIGMSKSSLRVTTELNIREST

SEQ ID NO: 99619 - protein, 446 aa, Homo sapiens; identical to SEQ ID NO: 99618
  Payload ID: 19862
  Gene Name: zinc finger protein 3
  Uniprot ID: P17036
  ENSP ID: ENSP00000306372

SEQ ID NO: 99620 - protein, 184 aa, Homo sapiens
  Payload ID: 19862
  Gene Name: zinc finger protein 3
  ENSP ID: ENSP00000388042
METQADLVSQEPQALLDSALPSKVPAFSDKDSLGDEMLAAALLKAKSQELVTFEDVAVYFIRKEWKRLEPAQRDLYRDVMLENYGNVFSLDRETRTENDQEISEDTRSHGVLLGRFQKDISQGLKFKEAYEREVSLKRPLGNSPGERLNRKMPDFGQVTVEEKLTPRGERSEKYNDFGNSFTVN

SEQ ID NO: 99621 - protein, 98 aa, Homo sapiens
  Payload ID: 19862
  Gene Name: zinc finger protein 3
  ENSP ID: ENSP00000394113
MLAAALLKAKSQELVTFEDVAVYFIRKEWKRLEPAQRDLYRDVMLENYGNVFSLDRETRTENDQEISEDTRSHGVLLGRFQKDISQGLKFKEAYEREV

SEQ ID NO: 99622 - protein, 131 aa, Homo sapiens
  Payload ID: 19862
  Gene Name: zinc finger protein 3
  Uniprot ID: P17036
  ENSP ID: ENSP00000399951
METQADLVSQEPQALLDSALPSKVPAFSDKDSLGDEMLAAALLKAKSQELVTFEDVAVYFIRKEWKRLEPAQRDLYRDVMLENYGNVFSLDWIHVCLTTQKVMLAWLTGTLSVAKGLCSSELASVEPPDTF

SEQ ID NO: 99623 - protein, 184 aa, Homo sapiens; identical to SEQ ID NO: 99620
  Payload ID: 19862
  Gene Name: zinc finger protein 3
  ENSP ID: ENSP00000405970

SEQ ID NO: 99624 - protein, 446 aa, Homo sapiens; identical to SEQ ID NO: 99618
  Payload ID: 19862
  Gene Name: zinc finger protein 3
  Uniprot ID: P17036
  ENSP ID: ENSP00000415358

SEQ ID NO: 99625 - protein, 148 aa, Homo sapiens
  Payload ID: 19862
  Gene Name: zinc finger protein 3
  ENSP ID: ENSP00000416088
MLAAALLKAKSQELVTFEDVAVYFIRKEWKRLEPAQRDLYRDVMLENYGNVFSLDRETRTENDQEISEDTRSHGVLLGRFQKDISQGLKFKEAYEREVSLKRPLGNSPGERLNRKMPDFGQVTVEEKLTPRGERSEKYNDFGNSFTVN

SEQ ID NO: 99626 - protein, 104 aa, Homo sapiens
  Payload ID: 19862
  Gene Name: zinc finger protein 3
  ENSP ID: ENSP00000416686
METQADLVSQEPQALLDSALPSKVPAFSDKDSLGDEMLAAALLKAKSQELVTFEDVAVYFIRKEWKRLEPAQRDLYRDVMLENYGNVFSLDRETRTENDQEISE

SEQ ID NO: 99627 - protein, 624 aa, Homo sapiens
  Payload ID: 19863
  Gene Name: zinc finger protein 30
  Uniprot ID: P17039
  ENSP ID: ENSP00000303889
MAHKYVGLQYHGSVTFEDVAIAFSQQEWESLDSSQRGLYRDVMLENYRNLVSMAGHSRSKPHVIALLEQWKEPEVTVRKDGRRWCTDLQLEDDTIGCKEMPTSENCPSFALHQKISRQKPRECQEYGKTLCQDSKPVQHERIHSSEKPNRCKECGKNFSNGHQLTIHQRLHVGEKPYKYEKCGKAFISGSAFVKHGRIHTGEKPLKCKQCGKTISGSYQLTVHKSIHTGKKPYECGECGKAFLVYGKLTRHQSTHTGEKPFGCEECGKAFSTFSYLVQHQRIHTSEKPYECKECGKAFSTSSPLAKHQRIHTGEKPYECKECGKSFTVYGQLTRHQSIHTGEKPFECKECGKAFRLSSFLHAHQRIHAEIKPYGCKECGRTFSRASYLVQHGRLHTGEKPYECKECGKAFSTGSYLVQHQRIHTGEKPYECKECGKAFISRHQLTVHQRVHTGEKPYECKECGKAFRVHVHLTQHRKIHTDVKPYECKECGKTFSRASYLVQHSRIHTGKKPYECKECGKAFSSGSYLVQHQRIHTGEKPYECNKCGKAFTVYGQLIGHQSVHTGEKPFECKECGKAFRLNSFLTEHQRVHTGEKPFKCKKCGKTFRYSSALKVHLRKHMSVIP

SEQ ID NO: 99628 - protein, 624 aa, Homo sapiens; identical to SEQ ID NO: 99627
  Payload ID: 19863
  Gene Name: zinc finger protein 30
  Uniprot ID: P17039
  ENSP ID: ENSP00000403441

SEQ ID NO: 99629 - protein, 623 aa, Homo sapiens
  Payload ID: 19863
  Gene Name: zinc finger protein 30
  Uniprot ID: P17039
  ENSP ID: ENSP00000469954
MAHKYVGLQYHGSVTFEDVAIAFSQQEWESLDSSQRGLYRDVMLENYRNLVSMGHSRSKPHVIALLEQWKEPEVTVRKDGRRWCTDLQLEDDTIGCKEMPTSENCPSFALHQKISRQKPRECQEYGKTLCQDSKPVQHERIHSSEKPNRCKECGKNFSNGHQLTIHQRLHVGEKPYKYEKCGKAFISGSAFVKHGRIHTGEKPLKCKQCGKTISGSYQLTVHKSIHTGKKPYECGECGKAFLVYGKLTRHQSTHTGEKPFGCEECGKAFSTFSYLVQHQRIHTSEKPYECKECGKAFSTSSPLAKHQRIHTGEKPYECKECGKSFTVYGQLTRHQSIHTGEKPFECKECGKAFRLSSFLHAHQRIHAEIKPYGCKECGRTFSRASYLVQHGRLHTGEKPYECKECGKAFSTGSYLVQHQRIHTGEKPYECKECGKAFISRHQLTVHQRVHTGEKPYECKECGKAFRVHVHLTQHRKIHTDVKPYECKECGKTFSRASYLVQHSRIHTGKKPYECKECGKAFSSGSYLVQHQRIHTGEKPYECNKCGKAFTVYGQLIGHQSVHTGEKPFECKECGKAFRLNSFLTEHQRVHTGEKPFKCKKCGKTFRYSSALKVHLRKHMSVIP

SEQ ID NO: 99630 - protein, 86 aa, Homo sapiens
  Payload ID: 19863
  Gene Name: zinc finger protein 30
  Uniprot ID: P17039
  ENSP ID: ENSP00000470094
MAHKYVGLQYHGSVTFEDVAIAFSQQEWESLDSSQRGLYRDVMLENYRNLVSMGHSRSKPHVIALLEQWKEPEVTVRKDGRRWCTG

SEQ ID NO: 99631 - protein, 86 aa, Homo sapiens
  Payload ID: 19863
  Gene Name: zinc finger protein 30
  ENSP ID: ENSP00000476813
MAHKYVGLQYHGSVTFEDVAIAFSQQEWESLDSSQRGLYRDVMLENYRNLVSMAGHSRSKPHVIALLEQWKEPEVTVRKDGRRWCT

SEQ ID NO: 99632 - protein, 604 aa, Homo sapiens
  Payload ID: 19864
  Gene Name: zinc finger protein 300
  Uniprot ID: Q96RE9
  ENSP ID: ENSP00000274599
MMKSQGLVSFKDVAVDFTQEEWQQLDPSQRTLYRDVMLENYSHLVSMGYPVSKPDVISKLEQGEEPWIIKGDISNWIYPDEYQADGRQDRKSNLHNSQSCILGTVSFHHKILKGVTRDGSLCSILKVCQGDGQLQRFLENQDKLFRQVTFVNSKTVTEASGHKYNPLGKIFQECIETDISIQRFHKYDAFKKNLKPNIDLPSCYKSNSRKKPDQSFGGGKSSSQSEPNSNLEKIHNGVIPFDDNQCGNVFRNTQSLIQYQNVETKEKSCVCVTCGKAFAKKSQLIVHQRIHTGKKPYDCGACGKAFSEKFHLVVHQRTHTGEKPYDCSECGKAFSQKSSLIIHQRVHTGEKPYECSECGKAFSQKSPLIIHQRIHTGEKPYECRECGKAFSQKSQLIIHHRAHTGEKPYECTECGKAFCEKSHLIIHKRIHTGEKPYKCAQCEEAFSRKTELITHQLVHTGEKPYECTECGKTFSRKSQLIIHQRTHTGEKPYKCSECGKAFCQKSHLIGHQRIHTGEKPYICTECGKAFSQKSHLPGHQRIHTGEKPYICAECGKAFSQKSDLVLHQRIHTGERPYQCAICGKAFIQKSQLTVHQRIHTVVKS

SEQ ID NO: 99633 - protein, 604 aa, Homo sapiens [sequence omitted]

SEQ ID NO: 99634 - protein, 568 aa, Homo sapiens
  Payload ID: 19864
  Gene Name: zinc finger protein 300
  Uniprot ID: Q96RE9
  ENSP ID: ENSP00000392593
MLENYSHLVSMGYPVSKPDVISKLEQGEEPWIIKGDISNWIYPDEYQADGRQDRKSNLHNSQSCILGTVSFHHKILKGVTRDGSLCSILKVCQGDGQLQRFLENQDKLFRQVTFVNSKTVTEASGHKYNPLGKIFQECIETDISIQRFHKYDAFKKNLKPNIDLPSCYKSNSRKKPDQSFGGGKSSSQSEPNSNLEKIHNGVIPFDDNQCGNVFRNTQSLIQYQNVETKEKSCVCVTCGKAFAKKSQLIVHQRIHTGKKPYDCGACGKAFSEKFHLVVHQRTHTGEKPYDCSECGKAFSQKSSLIIHQRVHTGEKPYECSECGKAFSQKSPLIIHQRIHTGEKPYECRECGKAFSQKSQLIIHHRAHTGEKPYECTECGKAFCEKSHLIIHKRIHTGEKPYKCAQCEEAFSRKTELITHQLVHTGEKPYECTECGKTFSRKSQLIIHQRTHTGEKPYKCSECGKAFCQKSHLIGHQRIHTGEKPYICTECGKAFSQKSHLPGHQRIHTGEKPYICAECGKAFSQKSDLVLHQRIHTGERPYQCAICGKAFIQKSQLTVHQRIHTVVKS

SEQ ID NO: 99635 - protein, 620 aa, Homo sapiens
  Payload ID: 19864
  Gene Name: zinc finger protein 300
  Uniprot ID: Q96RE9
  ENSP ID: ENSP00000397178
MVPAETSSSGLLEEQKMMKSQGLVSFKDVAVDFTQEEWQQLDPSQRTLYRDVMLENYSHLVSMGYPVSKPDVISKLEQGEEPWIIKGDISNWIYPDEYQADGRQDRKSNLHNSQSCILGTVSFHHKILKGVTRDGSLCSILKVCQGDGQLQRFLENQDKLFRQVTFVNSKTVTEASGHKYNPLGKIFQECIETDISIQRFHKYDAFKKNLKPNIDLPSCYKSNSRKKPDQSFGGGKSSSQSEPNSNLEKIHNGVIPFDDNQCGNVFRNTQSLIQYQNVETKEKSCVCVTCGKAFAKKSQLIVHQRIHTGKKPYDCGACGKAFSEKFHLVVHQRTHTGEKPYDCSECGKAFSQKSSLIIHQRVHTGEKPYECSECGKAFSQKSPLIIHQRIHTGEKPYECRECGKAFSQKSQLIIHHRAHTGEKPYECTECGKAFCEKSHLIIHKRIHTGEKPYKCAQCEEAFSRKTELITHQLVHTGEKPYECTECGKTFSRKSQLIIHQRTHTGEKPYKCSECGKAFCQKSHLIGHQRIHTGEKPYICTECGKAFSQKSHLPGHQRIHTGEKPYICAECGKAFSQKSDLVLHQRIHTGERPYQCAICGKAFIQKSQLTVHQRIHTVVKS

SEQ ID NO: 99636 - protein, 90 aa, Homo sapiens
  Payload ID: 19864
  Gene Name: zinc finger protein 300
  ENSP ID: ENSP00000414195
MMKSQGLVSFKDVAVDFTQEEWQQLDPSQRTLYRDVMLENYSHLVSMGYPVSKPDVISKLEQGEEPWIIKGDISNWIYPDEYQADGRQGK

SEQ ID NO: 99637 - protein, 399 aa, Homo sapiens
  Payload ID: 19865
  Gene Name: zinc finger protein 302
  Uniprot ID: Q9NR11
  ENSP ID: ENSP00000391067
MSQVTFSDVAIDFSHEEWACLDSAQRDLYKDVMVQNYENLVSVGLSVTKPYVIMLLEDGKEPWMMEKKLSKDWESRWENKELSTKKDIYDEDSPQPVTMEKVVKQSYEFSNSNKNLEYTECDTFRSTFHSKSTLSEPQNNSAEGNSHKYDILKKNLSKKSVIKSERINGGKKLLNSNKSGAAFNQSKSLTLPQTCNREKIYTCSECGKAFGKQSILSRHWRIHTGEKPYECRECGKTFSHGSSLTRHQISHSGEKPYKCIECGKAFSHGSSLTNHQSTHTGEKPYECMNCGKSFSRVSLLIQHLRIHTQEKRYECRICGKAFIHSSSLIHHQKSHTGEKPYECRECGKAFCCSSHLTQHQRIHSMKKKYECNKCLKVFSSFSFLVQHQSIHTEEKPFEV

SEQ ID NO: 99638 - protein, 443 aa, Homo sapiens
  Payload ID: 19865
  Gene Name: zinc finger protein 302
  ENSP ID: ENSP00000396379
MSQRQYPECYLAPNGCLVSNCGVNKMSNEELVGQNHGMEGEACTGGDVTFSDVAIDFSHEEWACLDSAQRDLYKDVMVQNYENLVSVGLSVTKPYVIMLLEDGKEPWMMEKKLSKDWESRWENKELSTKKDIYDEDSPQPVTMEKVVKQSYEFSNSNKNLEYTECDTFRSTFHSKSTLSEPQNNSAEGNSHKYDILKKNLSKKSVIKSERINGGKKLLNSNKSGAAFNQSKSLTLPQTCNREKIYTCSECGKAFGKQSILSRHWRIHTGEKPYECRECGKTFSHGSSLTRHQISHSGEKPYKCIECGKAFSHGSSLTNHQSTHTGEKPYECMNCGKSFSRVSLLIQHLRIHTQEKRYECRICGKAFIHSSSLIHHQKSHTGEKPYECRECGKAFCCSSHLTQHQRIHSMKKKYECNKCLKVFSSFSFLVQHQSIHTEEKPFEV

SEQ ID NO: 99639 - protein, 399 aa, Homo sapiens; identical to SEQ ID NO: 99637
  Payload ID: 19865
  Gene Name: zinc finger protein 302
  Uniprot ID: Q9NR11
  ENSP ID: ENSP00000405219

SEQ ID NO: 99640 - protein, 399 aa, Homo sapiens; identical to SEQ ID NO: 99637
  Payload ID: 19865
  Gene Name: zinc finger protein 302
  Uniprot ID: Q9NR11
  ENSP ID: ENSP00000421028

SEQ ID NO: 99641 - protein, 132 aa, Homo sapiens
  Payload ID: 19865
  Gene Name: zinc finger protein 302
  ENSP ID: ENSP00000421201
MSQVTFSDVAIDFSHEEWACLDSAQRDLYKDVMVQNYENLVSVAGLSVTKPYVIMLLEDGKEPWMMEKKLSKAYPFPLSHSVPASVNFGFSALFEHCSEVTEIFELSELCVFWVLHFLSNSPNSTVEAFFKK

SEQ ID NO: 99642 - protein, 142 aa, Homo sapiens
  Payload ID: 19865
  Gene Name: zinc finger protein 302
  ENSP ID: ENSP00000421696
MSQVTFSDVAIDFSHEEWACLDSAQRDLYKDVMVQNYENLVSVGLSVTKPYVIMLLEDGKEPWMMEKKLSKDWESRWENKELSTKKDIYDEDSPQPVTMEKVVKQSYEFSNSNKNLEYTECDTFRSTFHSKSTLSEPQNNSA

SEQ ID NO: 99643 - protein, 131 aa, Homo sapiens
  Payload ID: 19865
  Gene Name: zinc finger protein 302
  ENSP ID: ENSP00000423235
MSQVTFSDVAIDFSHEEWACLDSAQRDLYKDVMVQNYENLVSVGLSVTKPYVIMLLEDGKEPWMMEKKLSKAYPFPLSHSVPASVNFGFSALFEHCSEVTEIFELSELCVFWVLHFLSNSPNSTVEAFFKK

SEQ ID NO: 99644 - protein, 120 aa, Homo sapiens
  Payload ID: 19865
  Gene Name: zinc finger protein 302
  ENSP ID: ENSP00000423460
MSQVTFSDVAIDFSHEEWACLDSAQRDLYKDVMVQNYENLVSVGLSVTKPYVIMLLEDGKEPWMMEKKLSKAYPFPLSHSVPASVNFGFSALFEHCSEVTEIFELSELCVFWVLHFLSNS

SEQ ID NO: 99645 - protein, 132 aa, Homo sapiens; identical to SEQ ID NO: 99641
  Payload ID: 19865
  Gene Name: zinc finger protein 302
  ENSP ID: ENSP00000424292

SEQ ID NO: 99646 - protein, 28 aa, Homo sapiens
  Payload ID: 19865
  Gene Name: zinc finger protein 302
  ENSP ID: ENSP00000477197
MSQIGNQDGKTRNYQQRRIFMMKIHPNQ

SEQ ID NO: 99647 - protein, 400 aa, Homo sapiens
  Payload ID: 19865
  Gene Name: zinc finger protein 302
  ENSP ID: ENSP00000481754
MSQVTFSDVAIDFSHEEWACLDSAQRDLYKDVMVQNYENLVSVAGLSVTKPYVIMLLEDGKEPWMMEKKLSKDWESRWENKELSTKKDIYDEDSPQPVTMEKVVKQSYEFSNSNKNLEYTECDTFRSTFHSKSTLSEPQNNSAEGNSHKYDILKKNLSKKSVIKSERINGGKKLLNSNKSGAAFNQSKSLTLPQTCNREKIYTCSECGKAFGKQSILSRHWRIHTGEKPYECRECGKTFSHGSSLTRHQISHSGEKPYKCIECGKAFSHGSSLTNHQSTHTGEKPYECMNCGKSFSRVSLLIQHLRIHTQEKRYECRICGKAFIHSSSLIHHQKSHTGEKPYECRECGKAFCCSSHLTQHQRIHSMKKKYECNKCLKVFSSFSFLVQHQSIHTEEKPFEV

SEQ ID NO: 99648 - protein, 478 aa, Homo sapiens
  Payload ID: 19865
  Gene Name: zinc finger protein 302
  ENSP ID: ENSP00000486577
MSQVTFSDVAIDFSHEEWACLDSAQRDLYKDVMVQNYENLVSVAGLSVTKPYVIMLLEDGKEPWMMEKKLSKAYPFPLSHSVPASVNFGFSALFEHCSEVTEIFELSELCVFWVLHFLSNSPNSTVEAFFKKKKKKKKKKKRQCFAFLIYFRLGIKMGKQGIINKEGYLEDSPQPVTMEKVVKQSYEFSNSNKNLEYTECDTFRSTFHSKSTLSEPQNNSAEGNSHKYDILKKNLSKKSVIKSERINGGKKLLNSNKSGAAFNQSKSLTLPQTCNREKIYTCSECGKAFGKQSILSRHWRIHTGEKPYECRECGKTFSHGSSLTRHQISHSGEKPYKCIECGKAFSHGSSLTNHQSTHTGEKPYECMNCGKSFSRVSLLIQHLRIHTQEKRYECRICGKAFIHSSSLIHHQKSHTGEKPYECRECGKAFCCSSHLTQHQRIHSMKKKYECNKCLKVFSSFSFLVQHQSIHTEEKPFEV

SEQ ID NO: 99649 - protein, 659 aa, Homo sapiens
  Payload ID: 19866
  Gene Name: zinc finger protein 304
  Uniprot ID: Q9HCX3
  ENSP ID: ENSP00000282286
MAAAVLMDRVQSCVTFEDVFVYFSREEWELLEEAQRFLYRDVMLENFALVATLGFWCEAEHEAPSEQSVSVEGVSQVRTAESGLFQKAHPCEMCDPLLKDILHLAEHQGSHLTQKLCTRGLCRRRFSFSANFYQHQKQHNGENCFRGDDGGASFVKSCTVHMLGRSFTCREEGMDLPDSSGLFQHQTTYNRVSPCRRTECMESFPHSSSLRQHQGDYDGQMLFSCGDEGKAFLDTFTLLDSQMTHAEVRPFRCLPCGNVFKEKSALINHRKIHSGEISHVCKECGKAFIHLHHLKMHQKFHTGKRHYTCSECGKAFSRKDTLVQHQRVHTGERSYDCSECGKAYSRSSHLVQHQRIHTGERPYKCNKCGKAFSRKDTLVQHQRFHTGERPYECSECGKFFSQSSHLIEHWRIHTGARPYECIECGKFFSHNSSLIKHRRVHTGARSYVCSKCGKAFGCKDTLVQHQIIHTGARPYECSECGKAFSRKDTLVQHQKIHTGERPYECGECGKFFSHSSNLIVHQRIHTGAKPYECNECGKCFSHNSSLILHQRVHTGARPYVCSECGKAYISSSHLVQHKKVHTGARPYECSECGKFFSRNSGLILHQRVHTGEKPYVCSECGKAYSRSSHLVRHQKAHTGERAHECNSFGGPLAASLKLV

SEQ ID NO: 99650 - protein, 659 aa, Homo sapiens; identical to SEQ ID NO: 99649
  Payload ID: 19866
  Gene Name: zinc finger protein 304
  Uniprot ID: Q9HCX3
  ENSP ID: ENSP00000375586

SEQ ID NO: 99651 - protein, 706 aa, Homo sapiens
  Payload ID: 19866
  Gene Name: zinc finger protein 304
  ENSP ID: ENSP00000401642
MAAAVLMDRVQSCVTFEDVFVYFSREEWELLEEAQRFLYRDVMLENFALVATLAFIFPVPCSCAVGGGRKPWVPDRADITAATVKETYRGHGPAEWELEEGFWCEAEHEAPSEQSVSVEGVSQVRTAESGLFQKAHPCEMCDPLLKDILHLAEHQGSHLTQKLCTRGLCRRRFSFSANFYQHQKQHNGENCFRGDDGGASFVKSCTVHMLGRSFTCREEGMDLPDSSGLFQHQTTYNRVSPCRRTECMESFPHSSSLRQHQGDYDGQMLFSCGDEGKAFLDTFTLLDSQMTHAEVRPFRCLPCGNVFKEKSALINHRKIHSGEISHVCKECGKAFIHLHHLKMHQKFHTGKRHYTCSECGKAFSRKDTLVQHQRVHTGERSYDCSECGKAYSRSSHLVQHQRIHTGERPYKCNKCGKAFSRKDTLVQHQRFHTGERPYECSECGKFFSQSSHLIEHWRIHTGARPYECIECGKFFSHNSSLIKHRRVHTGARSYVCSKCGKAFGCKDTLVQHQIIHTGARPYECSECGKAFSRKDTLVQHQKIHTGERPYECGECGKFFSHSSNLIVHQRIHTGAKPYECNECGKCFSHNSSLILHQRVHTGARPYVCSECGKAYISSSHLVQHKKVHTGARPYECSECGKFFSRNSGLILHQRVHTGEKPYVCSECGKAYSRSSHLVRHQKAHTGERAHECNSFGGPLAASLKLV

SEQ ID NO: 99652 - protein, 617 aa, Homo sapiens
  Payload ID: 19866
  Gene Name: zinc finger protein 304
  ENSP ID: ENSP00000470319
MLENFALVATLGFWCEAEHEAPSEQSVSVEGVSQVRTAESGLFQKAHPCEMCDPLLKDILHLAEHQGSHLTQKLCTRGLCRRRFSFSANFYQHQKQHNGENCFRGDDGGASFVKSCTVHMLGRSFTCREEGMDLPDSSGLFQHQTTYNRVSPCRRTECMESFPHSSSLRQHQGDYDGQMLFSCGDEGKAFLDTFTLLDSQMTHAEVRPFRCLPCGNVFKEKSALINHRKIHSGEISHVCKECGKAFIHLHHLKMHQKFHTGKRHYTCSECGKAFSRKDTLVQHQRVHTGERSYDCSECGKAYSRSSHLVQHQRIHTGERPYKCNKCGKAFSRKDTLVQHQRFHTGERPYECSECGKFFSQSSHLIEHWRIHTGARPYECIECGKFFSHNSSLIKHRRVHTGARSYVCSKCGKAFGCKDTLVQHQIIHTGARPYECSECGKAFSRKDTLVQHQKIHTGERPYECGECGKFFSHSSNLIVHQRIHTGAKPYECNECGKCFSHNSSLILHQRVHTGARPYVCSECGKAYISSSHLVQHKKVHTGARPYECSECGKFFSRNSGLILHQRVHTGEKPYVCSECGKAYSRSSHLVRHQKAHTGERAHECNSFGGPLAASLKLV

SEQ ID NO: 99653 - protein, 666 aa, Homo sapiens
  Payload ID: 19867
  Gene Name: zinc finger protein 311
  Uniprot ID: Q5JNZ3
  ENSP ID: ENSP00000366384
MQEVVLLDESSGPPSQLLWTRQDTQLPQESALLPAPYPAFTKDGSQGNLPQADITLMSQAQESVTFEDVAVNFTNREWQCLTYAQRHLYKDVMLENYGNMVSLGFPFPKPPLISHLEREVDPCVQDPQDRESLSCSYPVSADKMWPENEKASSQQEIFENGEAYWMKFNSLLKVDSRDPKVREVCVQDVKLENQWETSIREKLREEKEGSEEVTCKKGKNQKVLSKNLNPNSKHSQCNKVLIAQKLHECARCGKNFSWHSDLILHEQIHSGEKPHVCNECGKAFKTRNQLSMHRIIHTGEKPFNCTQCGKAFNSRSALCRHKKTHSGEKPHECRDCGKAFKTRNRLCMHQLIHTGEKPYKCNCCGKAFQFKHSLTIHGRIHTGEKPYECEECGKAFSGSSDLTKHIRIHTGERPYECSKCGRAFSRSSDLSKHKRIHTREKHYGCPQCGKDFSIKAELTKHRRIHTEEKRYRCEECGKAFRHNCKRRAHEREHTGEKPYQCRDCGKTFQDKHCLTIHQRIHTGEKPYKCLECGKAFSGKSNLTNHRRIHTGEKPHKCEVCGMAFHHSSVLRQHKRIHTGEKPYTCSECGTSFRQGSALIGHKRVHTGEKPYECEECGKAFRVSSNLTGHKKRKHQVWSTHELDGSRKSLSPVTVSQTSVVSILTSA

SEQ ID NO: 99654 - protein, 666 aa, Homo sapiens; identical to SEQ ID NO: 99653
  Payload ID: 19867
  Gene Name: zinc finger protein 311
  Uniprot ID: Q5JNZ3
  ENSP ID: ENSP00000373151

SEQ ID NO: 99655 - protein, 666 aa, Homo sapiens
  Payload ID: 19867
  Gene Name: zinc finger protein 311
  Uniprot ID: Q5JNZ3
  ENSP ID: ENSP00000398440
MQEVVLLDESSGPPSQLLWTRQDTQLPQESALLPAPYPAFTKDGSQGNLPQADITLMSQAQESVTFEDVAVNFTNREWQCLTYAQRHLYKDVMLENYGNMVSLGFPFPKPPLISHLEREVDPCVQDPQDRESLSCSYPVSADKMWPENEKASSQQEIFENGEAYWMKFNSLLKVDSRDPKVREVCVQDVKLENQWETSIREKLREEKEGSEEVTCKKGKNQKVLSKNLNPNSKHSQCNKVLIAQKLHECARCGKNFSWHSDLILHEQIHSGEKPHVCNECGKAFKTRNQLSMHRIIHTGEKPFNCTQCGKAFNSRSALCRHKKTHSGEKPHECRDCGKAFKTRNRLCMHQLIHTGEKPYKCNCCGKAFQFKHSLTIHGRIHTGEKPYECEECGKAFSGSSDLTKHIRIHTGERPYECSKCGRAFSRSSDLSKHKRIHTREKHYGCPQCGKDFSIKAELTKHRRIHTEEKRYRCEECGKAFRHNCKRRAHEREHTGEKPYQCRDCGKTFQDQHCLTIHQRIHTGEKPYKCLECGKAFSGKSNLTNHRRIHTGEKPHKCEVCGMAFHHSSVLRQHKRIHTGEKPYTCSECGTSFRQGSALIGHKRVHTGEKPYECEECGKAFRVSSNLTGHKKRKHQVWSTHELDGSRKSLSPVTVSQTSVVSILTSA

SEQ ID NO: 99656 - protein, 666 aa, Homo sapiens; identical to SEQ ID NO: 99653
  Payload ID: 19867
  Gene Name: zinc finger protein 311
  Uniprot ID: Q5JNZ3
  ENSP ID: ENSP00000398983

SEQ ID NO: 99657 - protein, 666 aa, Homo sapiens; identical to SEQ ID NO: 99653
  Payload ID: 19867
  Gene Name: zinc finger protein 311
  Uniprot ID: Q5JNZ3
  ENSP ID: ENSP00000399157

SEQ ID NO: 99658 - protein, 666 aa, Homo sapiens; identical to SEQ ID NO: 99653
  Payload ID: 19867
  Gene Name: zinc finger protein 311
  Uniprot ID: Q5JNZ3
  ENSP ID: ENSP00000405154

SEQ ID NO: 99659 - protein, 666 aa, Homo sapiens; identical to SEQ ID NO: 99653
  Payload ID: 19867
  Gene Name: zinc finger protein 311
  Uniprot ID: Q5JNZ3
  ENSP ID: ENSP00000415772

SEQ ID NO: 99660 - protein, 1004 aa, Homo sapiens
  Payload ID: 19868
  Gene Name: zinc finger protein 316
  Uniprot ID: A6NFI3
  ENSP ID: ENSP00000477706
MAALHTTPDSPAAQLERAEDGSECDPDQEEEEEEEEKGEEVQEVEEEEEEIVVEEEEEGVAEVVQDAQVEAVAEVEVEADVEEEDVKEVLAEEECPALGTQERLSRGGDAKSPVLQEKGLQASRAPATPRDEDLEEEEEEEEDEDEDDLLTAGCQELVTFEDVAVYFSLEEWERLEADQRGLYQEVMQENYGILVSLGYPIPKPDLIFRLEQGEEPWVPDSPRPEEGDIVTGVYTGAWFWTDDIEDHEEEDDEDFLAEVAEEENEPPGLWSAAYGVGDVPGTWGPDDSDSAQTPEGWGPDPGGLGVLADGSEAKPFLPGREPGANLLSPWAFPAAVAPPAGRPETTCDVCGKVFPHRSRLAKHQRYHAAVKPFGCEECGKGFVYRSHLAIHQRTHTGEKPFPCPDCGKRFVYKSHLVTHRRIHTGERPYRCAFCGAGFGRRSYLVTHQRTHTGERPYPCSHCGRSFSQSSALARHQAVHTADRPHCCPDCGQAFRLRADFQRHRRGGGCAEAGGDGPRREPGETAAAAGPEDTDPGPEGSEVGEADGEAEAAAEEREEAAVAAPTPSGKVDPAPERRFLELGNGLGEGEGPSSHPLGFHFPVHPKSWLHPDSFPILGLPDFRERLPVDGRPLPAPLGGPLSLVEGTGLACDPFGGGGAAGGGGGLRAFGPAIGGLLAEPAPAALAEEESPWICSDCGKTFGRRAALAKHQRYHAGERPHRCADCGKSFVYGSHLARHRRTHTGERPFPCPECGARFARGSHLAAHVRGHTGEKPFVCGVCGAGFSRRAHLTAHGRAHTGERPYACGECGRRFGQSAALTRHQWAHAEEKPHRCPDCGKGFGHSSDFKRHRRTHTGEKPFRCADCGRGFAQRSNLAKHRRGHTGERPFPCPECGKRFSQRSVLVTHQRTHTGERPYACANCGRRFSQSSHLLTHMKTHRGATAAPGSGSAPAPAPKPEAAAKGPSSAGPGERGSALLEFAGGTSFGSEHQAAFAGPSGAYREGVL

SEQ ID NO: 99661 - protein, 40 aa, Homo sapiens
  Payload ID: 19868
  Gene Name: zinc finger protein 316
  ENSP ID: ENSP00000482395
MQENYGILVSLGYPIPKPDLIFRLEQGEEPWVPDSPRPEE

SEQ ID NO: 99662 - protein, 595 aa, Homo sapiens
  Payload ID: 19869
  Gene Name: zinc finger protein 317
  Uniprot ID: Q96PQ6
  ENSP ID: ENSP00000247956
MAALSPTFATSTQDSTCLQDSEFPVSSKDHSCPQNLDLFVCSGLEPHTPSVGSQESVTFQDVAVDFTEKEWPLLDSSQRKLYKDVMLENYSNLTSLGYQVGKPSLISHLEQEEEPRTEERGAHQGACADWETPSKTKWSLLMEDIFGKETPSGVTMERAGLGEKSTEYAHLFEVFGMDPHLTQPMGRHAGKRPYHRRDYGVAFKGRPHLTQHMSMYDGRKMHECHQCQKAFTTSASLTRHRRIHTGEKPYECSDCGKAFNDPSALRSHARTHLKEKPFDCSQCGNAFRTLSALKIHMRVHTGERPYKCDQCGKAYGRSCHLIAHKRTHTGERPYECHDCGKAFQHPSHLKEHVRNHTGEKPYACTQCGKAFRWKSNFNLHKKNHMVEKTYECKECGKSFGDLVSRRKHMRIHIVKKPVECRQCGKTFRNQSILKTHMNSHTGEKPYGCDLCGKAFSASSNLTAHRKIHTQERRYECAACGKVFGDYLSRRRHMSVHLVKKRVECRQCGKAFRNQSTLKTHMRSHTGEKPYECDHCGKAFSIGSNLNVHRRIHTGEKPYECLVCGKAFSDHSSLRSHVKTHRGEKLFVSSVWKRLQ

SEQ ID NO: 99663 - protein, 563 aa, Homo sapiens
  Payload ID: 19869
  Gene Name: zinc finger protein 317
  Uniprot ID: Q96PQ6
  ENSP ID: ENSP00000353554
MAALSPTFATSTQDSTCLQDSEFPVSSKDHSCPQNLDLFVCSGLEPHTPSVGSQESVTFQDVAVDFTEKEWPLLDSSQRKLYKDVMLENYSNLTSLDWETPSKTKWSLLMEDIFGKETPSGVTMERAGLGEKSTEYAHLFEVFGMDPHLTQPMGRHAGKRPYHRRDYGVAFKGRPHLTQHMSMYDGRKMHECHQCQKAFTTSASLTRHRRIHTGEKPYECSDCGKAFNDPSALRSHARTHLKEKPFDCSQCGNAFRTLSALKIHMRVHTGERPYKCDQCGKAYGRSCHLIAHKRTHTGERPYECHDCGKAFQHPSHLKEHVRNHTGEKPYACTQCGKAFRWKSNFNLHKKNHMVEKTYECKECGKSFGDLVSRRKHMRIHIVKKPVECRQCGKTFRNQSILKTHMNSHTGEKPYGCDLCGKAFSASSNLTAHRKIHTQERRYECAACGKVFGDYLSRRRHMSVHLVKKRVECRQCGKAFRNQSTLKTHMRSHTGEKPYECDHCGKAFSIGSNLNVHRRIHTGEKPYECLVCGKAFSDHSSLRSHVKTHRGEKLFVSSVWKRLQ

SEQ ID NO: 99664 - protein, 106 aa, Homo sapiens
  Payload ID: 19869
  Gene Name: zinc finger protein 317
  ENSP ID: ENSP00000465780
MAALSPTFATSTQDSTCLQDSEFPVSSKDHSCPQNLDLFVCSGLEPHTPSVGSQESVTFQDVAVDFTEKEWPLLDSSQRKLYKDVMLENYSNLTSLEILAPPFCCS

SEQ ID NO: 99665 - protein, 44 aa, Homo sapiens
  Payload ID: 19869
  Gene Name: zinc finger protein 317
  ENSP ID: ENSP00000468213
ADWETPSKTKWSLLMEDIFGKETPSGVTMVFLQLVPSMSHSPGH

SEQ ID NO: 99666 - protein, 2279 aa, Homo sapiens
  Payload ID: 19870
  Gene Name: zinc finger protein 318
  Uniprot ID: Q5VUA4
  ENSP ID: ENSP00000354964
MYRSSARSSVSSHRPKDDGGGGPRSGRSSGSSSGPARRSSPPPPPSGSSSRTPARRPRSPSGHRGRRASPSPPRGRRVSPSPPRARRGSPSPPRGRRLFPPGPAGFRGSSRGESRADYARDGRGDHPGDSGSRRRSPGLCSDSLEKSLRITVGNDHFCVSTPERRRLSDRLGSPVDNLEDMDRDDLTDDSVFTRSSQCSRGLERYISQEEGPLSPFLGQLDEDYRTKETFLHRSDYSPHISCHDELLRGTERNREKLKGYSIRSEERSREAKRPRYDDTVKINSMGGDHPSFTSGTRNYRQRRRSPSPRFLDPEFRELDLARRKREEEEERSRSLSQELVGVDGGGTGCSIPGLSGVLTASEPGYSLHRPEEVSVMPKKSILKKRIEVDIMEPSMQLESFSSSTSSSQDHPLYSGHPSLPLSGAIAAFASEIENKGTMVETALKEPQGNLYQWGPLPGIPKDNSPLREKFGSFLCHKDNLDLKAEGPERHTDFLLPHERASQDGSGFSRILSMLADSTSTQEKRRRSFPDIEDEEKFLYGDEEEDLKAESVPKPLGSSESEVMRQKASSLPSSAPAVKLESLEETNPEYAKIHDLLKTIGLDIGVAEISQLAARTQERLHGKKPSLRSSADRRSSVDRYFSADHCSSVDHRFSADRCSSVDHCFSADRRSSDPHRLESREAHHSNTHSPEVSHPHPPSPVDPYLLTKNSPPFLKSDHPVGHISGPEVVGSGFQSSVAVRCMLPSAPSAPIRLPHTAALSQFHMPRASQFAAARIPPNYQGPAIPPASFDAYRHYMAYAASRWPMYPTSQPSNHPVPEPHRIMPITKQATRSRPNLRVIPTVTPDKPKQKESLRGSIPAAQVPVQVSIPSLIRYNPEKISDEKNRASQKQKVIEEREKLKNDREARQKKMYYLRTELERLHKQQGEMLRKKRREKDGHKDPLLVEVSRLQDNIMKDIAELRQEAEEAEKKQSELDKVAQILGINIFDKSQKSLSDSREPTEKPGKAEKSKSPEKVSSFSNSSSNKESKVNNEKFRTKSPKPAESPQSATKQLDQPTAAYEYYDAGNHWCKDCNTICGTMFDFFTHMHNKKHTQTLDPYNRPWASKTQSEAKQDAIKRTDKITVPAKGSEFLVPISGFYCQLCEEFLGDPISGEQHVKGHQHNEKYKKYVDENPLYEERRNLDRQAGLAVVLETERRRQSELKRKLSEKPKEEKKEKKAKAVKEVKEDDKVSEKLEDQLSEGRNSPEKAENKRNTGIKLQLKEEVKKESPTSSSFGKFSWKKPEKEEEKSSLVTPSISKEEILESSKDKEDGKTEAGKAKPIKIKLSGKTVVAHTSPWMPVVTTSTQTKIRPNLPIPSTVLRKSCSATMSKPAPLNTFLSIKSSGTTAKPLPVVKESSADLLLPPDIISKAFGGEEVILKGSPEEKVVLAEKSEPSHLPEQILPPPPPPPPPPPPPPPVIPHPAAPSAAQANAILAPVKSNPVVSQTLSPGFVGPNILNPVLPVAIMASAQPAAIPSDETAPGVSESDRDQTLFSVLVRPPPPLSSVFSEQAKKLEKRNSCLATANAKDLYDIFYSSGGKGAPETKGAPETKLSGGPLANGENSNLSRTKSSDTSSTSPLNSSASQEELHQDEGLVAAPIVSNSEKPIAKTLVALGKWSVVEHVGPKSTGSTYGFLQPLTRLCQSRPYETITPKTDTLAIWTSSSFQSDTSRDISPEKSELDLGEPGPPGVEPPPQLLDIQCKESQKLVEIHLRESVNQDKESQELRKSEDCRESEIETNTELKERVKELSEGIVDEGVSTSIGPHSIDDSNLNHGNRYMWEGEVKQPNLLMIDKEAEQSNKLMTGSETPSKVVIKLSPQACSFTKAKLDSFLSEARSLLNPQDTPVKISAPELLLHSPARSAMCLTGSPQEQGVSVVSEEGLENSAPESASRTSRYRSLKLKRERSKDFQVKKIYELAVWDENKKRPETWESPEKPKTEALELQDVHPELTVTIESKALEDFEATDLKVEELTALGNLGDMPVDFCTTRVSPAHRSPTVLCQKVCEENSVSPIGCNSSDPADFEPIPSFSGFPLDSPKTLVLDFETEGERNSPNPRSVRIPSPNILKTGLTENVDRGLGGLEGTHQALDLLAGGMMPEEVKESSQLDKQESLGLELKTINSAGLGPSPCLPDLVDFVTRTSGVQKDKLCSPLSEPGDPSKCSSLELGPLQLEISNASTTEVAILQVDDDSGDPLNLVKAPVSRSPPREQVIEDNMVPQGMPEQETTVGAIQDHTESSVHN

SEQ ID NO: 99667 - protein, 79 aa, Homo sapiens
  Payload ID: 19870
  Gene Name: zinc finger protein 318
  ENSP ID: ENSP00000475511
  MOD_RES (1)..(1): Any amino acid
XPAESPQSATKQLDQPTAAYEYYDAGNHWCKDCNTICGTMFDFFTHMHNKKHTQGQFQKSSDFQKEGLQQTFLPPERQG

SEQ ID NO: 99668 - protein, 1117 aa, Homo sapiens
  Payload ID: 19870
  Gene Name: zinc finger protein 318
  Uniprot ID: Q5VUA4
  ENSP ID: ENSP00000475748
MYRSSARSSVSSHRPKDDGGGGPRSGRSSGSSSGPARRSSPPPPPSGSSSRTPARRPRSPSGHRGRRASPSPPRGRRVSPSPPRARRGSPSPPRGRRLFPPGPAGFRGSSRGESRADYARDGRGDHPGDSGSRRRSPGLCSDSLEKSLRITVGNDHFCVSTPERRRLSDRLGSPVDNLEDMDRDDLTDDSVFTRSSQCSRGLERYISQEEGPLSPFLGQLDEDYRTKETFLHRSDYSPHISCHDELLRGTERNREKLKGYSIRSEERSREAKRPRYDDTVKINSMGGDHPSFTSGTRNYRQRRRSPSPRFLDPEFRELDLARRKREEEEERSRSLSQELVGVDGGGTGCSIPGLSGVLTASEPGYSLHRPEEVSVMPKKSILKKRIEVDIMEPSMQLESFSSSTSSSQDHPLYSGHPSLPLSGAIAAFASEIENKGTMVETALKEPQGNLYQWGPLPGIPKDNSPLREKFGSFLCHKDNLDLKAEGPERHTDFLLPHERASQDGSGFSRILSMLADSTSTQEKRRRSFPDIEDEEKFLYGDEEEDLKAESVPKPLGSSESEVMRQKASSLPSSAPAVKLESLEETNPEYAKIHDLLKTIGLDIGVAEISQLAARTQERLHGKKPSLRSSADRRSSVDRYFSADHCSSVDHRFSADRCSSVDHCFSADRRSSDPHRLESREAHHSNTHSPEVSHPHPPSPVDPYLLTKNSPPFLKSDHPVGHISGPEVVGSGFQSSVAVRCMLPSAPSAPIRLPHTAALSQFHMPRASQFAAARIPPNYQGPAIPPASFDAYRHYMAYAASRWPMYPTSQPSNHPVPEPHRIMPITKQATRSRPNLRVIPTVTPDKPKQKESLRGSIPAAQVPVQVSIPSLIRYNPEKISDEKNRASQKQKVIEEREKLKNDREARQKKMYYLRTELERLHKQQGEMLRKKRREKDGHKDPLLVEVSRLQDNIMKDIAELRQEAEEAEKKQSELDKVAQILGINIFDKSQKSLSDSREPTEKPGKAEKSKSPEKVSSFSNSSSNKESKVNNEKFRTKSPKPAESPQSATKQLDQPTAAYEYYDAGNHWCKDCNTICGTMFDFFTHMHNKKHTQGQFQKSSDFQKEGLQQTFLPPERQG

SEQ ID NO: 99669 - protein, 582 aa, Homo sapiens
  Payload ID: 19871
  Gene Name: zinc finger protein 319
  Uniprot ID: Q9P2F9
  ENSP ID: ENSP00000299237
MSESWQQPPQTQPQQPQPPQPQHHAEPPPALAEHTLPPGTAENPLGCAVYGILLQPDPGLQPPQHAPLQAAGEPGPKCGVCGHDLAHLSSPHEHQCLAGHDRSFQCTQCLKIFHQATDLLEHQCVQAEQKPFVCGVCKMGFSLLTSLAQHHSSHSGLVKCSICEKTYKPAEAAEPATTAAPSLPAAPAPSTVTPAEQADKPYSCPICQKPFKHLSELSRHERIHTGEKPYKCTLCDKSFSQSSHLVHHKRTHSSERPYKCAVCEKTFKHRSHLVRHMYAHSGEHHLFRCNVCELHFKESSELLQHPCTPSGERPFRCGECQKAFKRPSDLRQHERTHSAERPFKCDLCPMGFKQQYALMRHRRTHKTEEPFKCGLCEKGFGQPSHLLYHQHVHTLETLFKCPVCQKGFDQSAELLRHKCLPGAAERPFKCPVCNKAYKRASALQKHQLAHCAAAEKPLRCTLCERRFFSSSEFVQHRCDPAREKPLKCPDCEKRFKYASDLQRHRRVHTGEKPYKCPNCDKAFKQREHLNKHQGVHAREQQFKCVWCGERFLDVALLQEHSAQHSAAAAAAEGAYQVAACLP

SEQ ID NO: 99670 - protein, 69 aa, Homo sapiens
  Payload ID: 19871
  Gene Name: zinc finger protein 319
  ENSP ID: ENSP00000457048
MSESWQQPPQTQPQQPQPPQPQHHAEPPPALAEHTLPPGTAENPLGCAVYGILLQPDPGLQPPQHAPLQ

SEQ ID NO: 99671 - protein, 273 aa, Homo sapiens
  Payload ID: 19872
  Gene Name: zinc finger protein 32
  Uniprot ID: P17041
  ENSP ID: ENSP00000363556
MFGFPTATLLDCHGRYAQNVAFFNVMTEAHHKYDHSEATGSSSWDIQNSFRREKLEQKSPDSKTLQEDSPGVRQRVYECQECGKSFRQKGSLTLHERIHTGQKPFECTHCGKSFRAKGNLVTHQRIHTGEKPYQCKECGKSFSQRGSLAVHERLHTGQKPYECAICQRSFRNQSNLAVHRRVHSGEKPYRCDQCGKAFSQKGSLIVHIRVHTGLKPYACTQCRKSFHTRGNCILHGKIHTGETPYLCGQCGKSFTQRGSLAVHQRSCSQRLTL

SEQ ID NO: 99672 - protein, 273 aa, Homo sapiens; identical to SEQ ID NO: 99671
  Payload ID: 19872
  Gene Name: zinc finger protein 32
  Uniprot ID: P17041
  ENSP ID: ENSP00000379143

SEQ ID NO: 99673 - protein, 509 aa, Homo sapiens
  Payload ID: 19873
  Gene Name: zinc finger protein 320
  Uniprot ID: A2RRD8
  ENSP ID: ENSP00000375660
MALSQGLLTFRDVAIEFSQEEWKCLDPAQRTLYRDVMLENYRNLVSLDISSKCMMNTLSSTGQGNTEVIHTGTLQRQASYHIGAFCSQEIEKDIHDFVFQWQEDETNDHEAPMTEIKKLTSSTDRYDQRHAGNKPIKGQLESRFHLHLRRHRRIHTGEKPYKCEECEKVFSCKSHLEIHRIIHTGEKPYKCKVCDKAFKHDSHLAKHTRIHRGDKHYTCNECGKVFDQKATLACHHRSHTGEKPYKCNECGKTFSQTSHLVYHHRLHTGEKPYKCNECGKTFARNSVLVIHKAVHTAEKPYKCNECGKVFKQRATLAGHRRVHTGEKPYRCEECDKVFSRKSHLERHRRIHTGEKPYKCKVCDKAFRSDSRLAEHQRVHTGERPYTCNECGKVFSTKAYLACHQKLHTGEKLYECEECDKVYIRKSHLERHRRIHTGEKPHKCGDCGKAFNSPSHLIRHQRIHTGQKSYKCHQCGKVFSLRSLLAEHQKIPFGDNCFKCNEYSKPSSIN

SEQ ID NO: 99674 - protein, 155 aa, Homo sapiens
  Payload ID: 19873
  Gene Name: zinc finger protein 320
  ENSP ID: ENSP00000468995
MALSQGLLTFRDVAIEFSQEEWKCLDPAQRTLYRDVMLENYRNLVSLGQGNTEVIHTGTLQRQASYHIGAFCSQEIEKDIHDFVFQWQEDETNDHEAPMTEIKKLTSSTDRYDQRHAGNKPIKGQLESRFHLHLRRHRRIHTGEKPYKCEECEKV

SEQ ID NO: 99675 - protein, 86 aa, Homo sapiens
  Payload ID: 19873
  Gene Name: zinc finger protein 320
  ENSP ID: ENSP00000470403
MALSQGLLTFRDVAIEFSQEEWKCLDPAQRTLYRDVMLENYRNLVSLDISSKCMMNTLSSTGQGNTEVIHTGTLQRQASYHIGAFC

SEQ ID NO: 99676 - protein, 25 aa, Homo sapiens
  Payload ID: 19873
  Gene Name: zinc finger protein 320
  ENSP ID: ENSP00000471548
MALSQGLLTFRDVAIEFSQEEWKCL

SEQ ID NO: 99677 - protein, 57 aa, Homo sapiens
  Payload ID: 19873
  Gene Name: zinc finger protein 320
  ENSP ID: ENSP00000471938
MALSQGLLTFRDVAIEFSQEEWKCLDPAQRTLYRDVMLENYRNLVSLDISSKCMMNT

SEQ ID NO: 99678 - protein, 123 aa, Homo sapiens
  Payload ID: 19873
  Gene Name: zinc finger protein 320
  ENSP ID: ENSP00000472651
MALSQGLLTFRDVAIEFSQEEWKCLDPAQRTLYRDVMLENYRNLVSLDISSKCMMNTLSSTGQGNTEVIHTGTLQRQASYHIGAFCSQEIEKDIHDFVFQWQEDETNDHEAPMTEIKKLTSST

SEQ ID NO: 99679 - protein, 117 aa, Homo sapiens
  Payload ID: 19873
  Gene Name: zinc finger protein 320
  ENSP ID: ENSP00000472908
MALSQGLLTFRDVAIEFSQEEWKCLDPAQRTLYRDVMLENYRNLVSLGLISRDLCYLRKTPRRQRKGARDGSSSGILDFQRCGYRVLFAGVETPGPCTERFIQGCDVGELQEPGVCG

SEQ ID NO: 99680 - protein, 509 aa, Homo sapiens; identical to SEQ ID NO: 99673
  Payload ID: 19873
  Gene Name: zinc finger protein 320
  Uniprot ID: A2RRD8
  ENSP ID: ENSP00000473091

SEQ ID NO: 99681 - protein, 402 aa, Homo sapiens
  Payload ID: 19874
  Gene Name: zinc finger protein 322
  Uniprot ID: Q6U7Q0
  ENSP ID: ENSP00000418897
MYTSEEKCNQRTQKRKIYNVCPRKGKKIFIHMHEIIQIDGHIYQCLECKQNFCENLALIMCERTHTGEKPYKCDMCEKTFVQSSDLTSHQRIHNYEKPYKCSKCEKSFWHHLALSGHQRTHAGKKFYTCDICGKNFGQSSDLLVHQRSHTGEKPYLCSECDKCFSRSTNLIRHRRTHTGEKPFKCLECEKAFSGKSDLISHQRTHTGERPYKCNKCEKSYRHRSAFIVHKRVHTGEKPYKCGACEKCFGQKSDLIVHQRVHTGEKPYKCLECMRSFTRSANLIRHQATHTHTFKCLEYEKSFNCSSDLIVHQRIHMEEKPHQWSACESGFLLGMDFVAQQKMRTQTEELHYKYTVCDKSFHQSSALLQHQTVHIGEKPFVCNVSEKGLELSPPHASEASQMS

SEQ ID NO: 99682 - protein, 402 aa, Homo sapiens; identical to SEQ ID NO: 99681
  Payload ID: 19874
  Gene Name: zinc finger protein 322
  Uniprot ID: Q6U7Q0
  ENSP ID: ENSP00000419728

SEQ ID NO: 99683 - protein, 26 aa, Homo sapiens
  Payload ID: 19874
  Gene Name: zinc finger protein 322
  ENSP ID: ENSP00000420301
MYTSEEKCNQRTQKRKIYNVCPRKGK

SEQ ID NO: 99684 - protein, 402 aa, Homo sapiens; identical to SEQ ID NO: 99681
  Payload ID: 19874
  Gene Name: zinc finger protein 322
  Uniprot ID: Q6U7Q0
  ENSP ID: ENSP00000478899

SEQ ID NO: 99685 - protein, 402 aa, Homo sapiens; identical to SEQ ID NO: 99681
  Payload ID: 19874
  Gene Name: zinc finger protein 322
  Uniprot ID: Q6U7Q0
  ENSP ID: ENSP00000482607

SEQ ID NO: 99686 - protein, 402 aa, Homo sapiens; identical to SEQ ID NO: 99681
  Payload ID: 19874
  Gene Name: zinc finger protein 322
  Uniprot ID: Q6U7Q0
  ENSP ID: ENSP00000483223

SEQ ID NO: 99687 - protein, 553 aa, Homo sapiens
  Payload ID: 19875
  Gene Name: zinc finger protein 324
  Uniprot ID: O75467
  ENSP ID: ENSP00000196482
MAFEDVAVYFSQEEWGLLDTAQRALYRRVMLDNFALVASLGLSTSRPRVVIQLERGEEPWVPSGTDTTLSRTTYRRRNPGSWSLTEDRDVSGEWPRAFPDTPPGMTTSVFPVAGACHSVKSLQRQRGASPSRERKPTGVSVIYWERLLLGSGSGQASVSLRLTSPLRPPEGVRLREKTLTEHALLGRQPRTPERQKPCAQEVPGRTFGSAQDLEAAGGRGHHRMGAVWQEPHRLLGGQEPSTWDELGEALHAGEKSFECRACSKVFVKSSDLLKHLRTHTGERPYECAQCGKAFSQTSHLTQHQRIHSGETPYACPVCGKAFRHSSSLVRHQRIHTAEKSFRCSECGKAFSHGSNLSQHRKIHAGGRPYACAQCGRRFCRNSHLIQHERTHTGEKPFVCALCGAAFSQGSSLFKHQRVHTGEKPFACPQCGRAFSHSSNLTQHQLLHTGERPFRCVDCGKAFAKGAVLLSHRRIHTGEKPFVCTQCGRAFRERPALFHHQRIHTGEKTVRRSRASLHPQARSVAGASSEGAPAKETEPTPASGPAAVSQPAEV

SEQ ID NO: 99688 - protein, 286 aa, Homo sapiens [sequence omitted]

SEQ ID NO: 99689 - protein, 553 aa, Homo sapiens; identical to SEQ ID NO: 99687
  Payload ID: 19875
  Gene Name: zinc finger protein 324
  Uniprot ID: O75467
  ENSP ID: ENSP00000444812

SEQ ID NO: 99690 - protein, 412 aa, Homo sapiens
  Payload ID: 19875
  Gene Name: zinc finger protein 324
  ENSP ID: ENSP00000471778
  MOD_RES (1)..(1): Any amino acid
XYWERLLLGSGSGQASVSLRLTSPLRPPEGVRLREKTLTEHALLGRQPRTPERQKPCAQEVPGRTFGSAQDLEAAGGRGHHRMGAVWQEPHRLLGGQEPSTWDELGEALHAGEKSFECRACSKVFVKSSDLLKHLRTHTGERPYECAQCGKAFSQTSHLTQHQRIHSGETPYACPVCGKAFRHSSSLVRHQRIHTAEKSFRCSECGKAFSHGSNLSQHRKIHAGGRPYACAQCGRRFCRNSHLIQHERTHTGEKPFVCALCGAAFSQGSSLFKHQRVHTGEKPFACPQCGRAFSHSSNLTQHQLLHTGERPFRCVDCGKAFAKGAVLLSHRRIHTGEKPFVCTQCGRAFRERPALFHHQRIHTGEKTVRRSRASLHPQARSVAGASSEGAPAKETEPTPASGPAAVSQPAEV

SEQ ID NO: 99691 - protein, 544 aa, Homo sapiens
  Payload ID: 19876
  Gene Name: zinc finger protein 324B
  Uniprot ID: Q6AW86
  ENSP ID: ENSP00000337473
MTFEDVAVYFSQEEWGLLDTAQRALYRHVMLENFTLVTSLGLSTSRPRVVIQLERGEEPWVPSGKDMTLARNTYGRLNSGSWSLTEDRDVSGEWPRAFPDTPPGMTTSVFPVADACHSVKSLQRQPGASPSQERKPTGVSVIYWERLLLGSRSDQASISLRLTSPLRPPKSSRPREKTFTEYRVPGRQPRTPERQKPCAQEVPGRAFGNASDLKAASGGRDRRMGAAWQEPHRLLGGQEPSTWDELGEALHAGEKSFECRACSKVFVKSSDLLKHLRTHTGERPYECTQCGKAFSQTSHLTQHQRIHSGETPYACPVCGKAFRHSSSLVRHQRIHTAEKSFRCSECGKAFSHGSNLSQHRKIHAGGRPYACAQCGRRFCRNSHLIQHERTHTGEKPFVCALCGAAFSQGSSLFLHQRVHTGEKPFACAQCGRSFSRSSNLTQHQLLHTGERPFRCVDCGKGFAKGAVLLSHRRIHTGEKPFVCTQCGRAFRERPALLHHQRIHTTEKTNAAAPDCTPGPGFLQGHHRKVRRGGKPSPVLKPAKV

SEQ ID NO: 99692 - protein, 544 aa, Homo sapiens; identical to SEQ ID NO: 99691
  Payload ID: 19876
  Gene Name: zinc finger protein 324B
  Uniprot ID: Q6AW86
  ENSP ID: ENSP00000438930

SEQ ID NO: 99693 - protein, 130 aa, Homo sapiens
  Payload ID: 19876
  Gene Name: zinc finger protein 324B
  ENSP ID: ENSP00000471086
MTFEDVAVYFSQEEWGLLDTAQRALYRHVMLENFTLVTSLGLSTSRPRVVIQLERGEEPWVPSGKDMTLARNTYGRLNSGEWELRWGELRTNLWPSPCPCFSDSGNTSSSPASYLTPFSSIISLSWRLLP

SEQ ID NO: 99694 - protein, 79 aa, Homo sapiens
  Payload ID: 19876
  Gene Name: zinc finger protein 324B
  ENSP ID: ENSP00000471122
MTFEDVAVYFSQEEWGLLDTAQRALYRHVMLENFTLVTSLGLSTSRPRVVIQLERGEEPWVPSGKDMTLARNTYGRLNS

SEQ ID NO: 99695 - protein, 138 aa, Homo sapiens
  Payload ID: 19876
  Gene Name: zinc finger protein 324B
  ENSP ID: ENSP00000472178
MTFEDVAVYFSQEEWGLLDTAQRALYRHVMLENFTLVTSLGLSTSRPRVVIQLERGEEPWVPSGKDMTLARNTYGRLNSGSWSLTEDRDVSGEWPRAFPDTPPGMTTSVFPVADACHSVKSLQRQPGASPSQERKPTG

SEQ ID NO: 99696 - protein, 147 aa, Homo sapiens
  Payload ID: 19876
  Gene Name: zinc finger protein 324B
  ENSP ID: ENSP00000473115
MTFEDVAVYFSQEEWGLLDTAQRALYRHVMLENFTLVTSLGLSTSRPRVVIQLERGEEPWVPSGKDMTLARNTYGRLNSGSWSLTEDRDVSGEWPRAFPDTPPGMTTSVFPVADACHSVKSLQRQPGASPSQERKPTGVSVIYWERL

SEQ ID NO: 99697 - protein, 582 aa, Homo sapiens
  Payload ID: 19877
  Gene Name: zinc finger protein 326
  Uniprot ID: Q5BKZ1
  ENSP ID: ENSP00000340796
MDFEDDYTHSACRNTYQGFNGMDRDYGPGSYGGMDRDYGHGSYGGQRSMDSYLNQSYGMDNHSGGGGGSRFGPYESYDSRSSLGGRDLYRSGYGFNEPEQSRFGGSYGGRFESSYRNSLDSFGGRNQGGSSWEAPYSRSKLRPGFMEDRGRENYSSYSSFSSPHMKPAPVGSRGRGTPAYPESTFGSRNYDAFGGPSTGRGRGRGHMGDFGSIHRPGIVVDYQNKSTNVTVAAARGIKRKMMQPFNKPSGTFIKKPKLAKPMEKISLSKSPTKTDPKNEEEEKRRIEARREKQRRRREKNSEKYGDGYRMAFTCSFCKFRTFEEKDIELHLESSSHQETLDHIQKQTKFDKVVMEFLHECMVNKFKKTSIRKQQTNNQTEVVKIIEKDVMEGVTVDDHMMKVETVHCSACSVYIPALHSSVQQHLKSPDHIKGKQAYKEQIKRESVLTATSILNNPIVKARYERFVKGENPFEIQDHSQDQQIEGDEEDEEKIDEPIEEEEDEDEEEEAEEVGEVEEVEEVEEVREGGIEGEGNIQGVGEGGEVGVVGEVEGVGEVEEVEELEEETAKEEPADFPVEQPEEN

SEQ ID NO: 99698 - protein, 70 aa, Homo sapiens
  Payload ID: 19877
  Gene Name: zinc finger protein 326
  Uniprot ID: Q5BKZ1
  ENSP ID: ENSP00000355318
MDFEDDYTHSACRNTYQGFNGMDRDYGPGSYGGMDRDYGHGSYGGQRSMDSYLNQSYGMDNHSGGGGGSR

SEQ ID NO: 99699 - protein, 493 aa, Homo sapiens
  Payload ID: 19877
  Gene Name: zinc finger protein 326
  ENSP ID: ENSP00000359476
MDFEDDYTHSACRNTYQGFNGMDRDYGPGSYGGMDRDYGHGSYGGQRSMDSYLNQSYGMDNHSGGGGGSSFSSPHMKPAPVGSRGRGTPAYPESTFGSRNYDAFGGPSTGRGRGRGHMGDFGSIHRPGIVVDYQNKSTNVTVAAARGIKRKMMQPFNKPSGTFIKKPKLAKPMEKISLSKSPTKTDPKNEEEEKRRIEARREKQRRRREKNSEKYGDGYRMAFTCSFCKFRTFEEKDIELHLESSSHQETLDHIQKQTKFDKVVMEFLHECMVNKFKKTSIRKQQTNNQTEVVKIIEKDVMEGVTVDDHMMKVETVHCSACSVYIPALHSSVQQHLKSPDHIKGKQAYKEQIKRESVLTATSILNNPIVKARYERFVKGENPFEIQDHSQDQQIEGDEEDEEKIDEPIEEEEDEDEEEEAEEVGEVEEVEEVEEVREGGIEGEGNIQGVGEGGEVGVVGEVEGVGEVEEVEELEEETAKEEPADFPVEQPEEN

SEQ ID NO: 99700 - protein, 53 aa, Homo sapiens
  Payload ID: 19877
  Gene Name: zinc finger protein 326
  ENSP ID: ENSP00000378084
MDFEDDYTHSACRNTYQGFNGMDRDYGPGSYGGLTFKDIYLKILLLSASKAYG

SEQ ID NO: 99701 - protein, 541 aa, Homo sapiens
  Payload ID: 19878
  Gene Name: zinc finger protein 329
  Uniprot ID: Q86UD4
  ENSP ID: ENSP00000350773
MRLKMTTRNFPEREVPCDVEVERFTREVPCLSSLGDGWDCENQEGHLRQSALTLEKPGTQEAICEYPGFGEHLIASSDLPPSQRVLATNGFHAPDSNVSGLDCDPALPSYPKSYADKRTGDSDACGKGFNHSMEVIHGRNPVREKPYKYPESVKSFNHFTSLGHQKIMKRGKKSYEGKNFENIFTLSSSLNENQRNLPGEKQYRCTECGKCFKRNSSLVLHHRTHTGEKPYTCNECGKSFSKNYNLIVHQRIHTGEKPYECSKCGKAFSDGSALTQHQRIHTGEKPYECLECGKTFNRNSSLILHQRTHTGEKPYRCNECGKPFTDISHLTVHLRIHTGEKPYECSKCGKAFRDGSYLTQHERTHTGEKPFECAECGKSFNRNSHLIVHQKIHSGEKPYECKECGKTFIESAYLIRHQRIHTGEKPYGCNQCQKLFRNIAGLIRHQRTHTGEKPYECNQCGKAFRDSSCLTKHQRIHTKETPYQCPECGKSFKQNSHLAVHQRLHSREGPSRCPQCGKMFQKSSSLVRHQRAHLGEQPMET

SEQ ID NO: 99702 - protein, 541 aa, Homo sapiens; identical to SEQ ID NO: 99701
  Payload ID: 19878
  Gene Name: zinc finger protein 329
  Uniprot ID: Q86UD4
  ENSP ID: ENSP00000439527

SEQ ID NO: 99703 - protein, 541 aa, Homo sapiens; identical to SEQ ID NO: 99701
  Payload ID: 19878
  Gene Name: zinc finger protein 329
  Uniprot ID: Q86UD4
  ENSP ID: ENSP00000470008

SEQ ID NO: 99704 - protein, 541 aa, Homo sapiens; identical to SEQ ID NO: 99701
  Payload ID: 19878
  Gene Name: zinc finger protein 329
  Uniprot ID: Q86UD4
  ENSP ID: ENSP00000470323

SEQ ID NO: 99705 - protein, 42 aa, Homo sapiens
  Payload ID: 19878
  Gene Name: zinc finger protein 329
  ENSP ID: ENSP00000471614
MRLKMTTRNFPEREVPCDVEVERFTREVPCLSSLGDGWDCEN

SEQ ID NO: 99706 - protein, 320 aa, Homo sapiens
  Payload ID: 19879
  Gene Name: zinc finger protein 330
  Uniprot ID: Q9Y3S2
  ENSP ID: ENSP00000262990
MPKKKTGARKKAENRREREKQLRASRSTIDLAKHPCNASMECDKCQRRQKNRAFCYFCNSVQKLPICAQCGKTKCMMKSSDCVIKHAGVYSTGLAMVGAICDFCEAWVCHGRKCLSTHACACPLTDAECVECERGVWDHGGRIFSCSFCHNFLCEDDQFEHQASCQVLEAETFKCVSCNRLGQHSCLRCKACFCDDHTRSKVFKQEKGKQPPCPKCGHETQETKDLSMSTRSLKFGRQTGGEEGDGASGYDAYWKNLSSDKYGDTSYHDEEEDEYEAEDDEEEEDEGRKDSDTESSDLFTNLNLGRTYASGYAHYEEQEN

SEQ ID NO: 99707 - protein, 153 aa, Homo sapiens
  Payload ID: 19879
  Gene Name: zinc finger protein 330
  ENSP ID: ENSP00000422251
MPKKKTGARKKAENRREREKQLRASRSTIDLAKHPCNASMECDKCQRRQKNRAFCYFCNSVQKLPICAQCGKTKCMMKSSDCVIKHAGVYSTGLAMVGAICDFCEAWVCHGRKCLSTHACACPLTDAECVECERGVWDHGGRIFSCSFCHNFL

SEQ ID NO: 99708 - protein, 35 aa, Homo sapiens
  Payload ID: 19879
  Gene Name: zinc finger protein 330
  ENSP ID: ENSP00000422574
MPKKKTGARKKAENRREREKQLRASRSTIDLAKHP

SEQ ID NO: 99709 - protein, 229 aa, Homo sapiens
  Payload ID: 19879
  Gene Name: zinc finger protein 330
  ENSP ID: ENSP00000422599
MPKKKTGARKKAENRREREKQLRASRSTIDLAKHPCNASMECDKCQRRQKNRAFCYFCNSVQKLPICAQCGKTKCMMKSSDCVIKHAGVYSTGLAMVGAICDFCEAWVCHGRKCLSTHACACPLTDAECVECERGVWDHGGRIFSCSFCHNFLCEDDQFEHQASCQVLEAETFKCVSCNRLGQHSCLRCKACFCDDHTRSKVFKQEKGKQPPCPKCGHETQETKDLSMS

SEQ ID NO: 99710 - protein, 139 aa, Homo sapiens
  Payload ID: 19879
  Gene Name: zinc finger protein 330
  ENSP ID: ENSP00000422966
MPKKKTGARKKAENRREREKQLRASRSTIDLAKHPCNASMECDKCQRRQKNRAFCYFCNSVQKLPICAQCGKTKCMMKSSDCVIKHAGVYSTGLAMVGAICDFCEAWVCHGRKCLSTHACACPLTDAECVECERGVWDH

SEQ ID NO: 99711 - protein, 41 aa, Homo sapiens
  Payload ID: 19879
  Gene Name: zinc finger protein 330
  ENSP ID: ENSP00000423217
MPKKKTGARKKAENRREREKQLRASRSTIDLAKHPCNASMD

SEQ ID NO: 99712 - protein, 77 aa, Homo sapiens
  Payload ID: 19879
  Gene Name: zinc finger protein 330
  ENSP ID: ENSP00000427201
MPKKKTGARKKAENRREREKQLRASRSTIDLAKHPCNASMECDKCQRENKVHDEVFRLCHKACWCIQYWPCNGGCNM

SEQ ID NO: 99713 - protein, 463 aa, Homo sapiens
  Payload ID: 19880
  Gene Name: zinc finger protein 331
  Uniprot ID: Q9NQX6
  ENSP ID: ENSP00000253144
MAQGLVTFADVAIDFSQEEWACLNSAQRDLYWDVMLENYSNLVSLDLESAYENKSLPTEKNIHEIRASKRNSDRRSKSLGRNWICEGTLERPQRSRGRYVNQMIINYVKRPATREGTPPRTHQRHHKENSFECKDCGKAFSRGYQLSQHQKIHTGEKPYECKECKKAFRWGNQLTQHQKIHTGEKPYECKDCGKAFRWGSSLVIHKRIHTGEKPYECKDCGKAFRRGDELTQHQRFHTGEKDYECKDCGKTFSRVYKLIQHKRIHSGEKPYECKDCGKAFICGSSLIQHKRIHTGEKPYECQECGKAFTRVNYLTQHQKIHTGEKPHECKECGKAFRWGSSLVKHERIHTGEKPYKCTECGKAFNCGYHLTQHERIHTGETPYKCKECGKAFIYGSSLVKHERIHTGVKPYGCTECGKSFSHGHQLTQHQKTHSGAKSYECKECGKACNHLNHLREHQRIHNS

SEQ ID NO: 99714 - protein, 463 aa, Homo sapiens; identical to SEQ ID NO: 99713
  Payload ID: 19880
  Gene Name: zinc finger protein 331
  Uniprot ID: Q9NQX6
  ENSP ID: ENSP00000393336

SEQ ID NO: 99715 - protein, 463 aa, Homo sapiens; identical to SEQ ID NO: 99713
  Payload ID: 19880
  Gene Name: zinc finger protein 331
  Uniprot ID: Q9NQX6
  ENSP ID: ENSP00000393817

SEQ ID NO: 99716 - protein, 463 aa, Homo sapiens; identical to SEQ ID NO: 99713
  Payload ID: 19880
  Gene Name: zinc finger protein 331
  Uniprot ID: Q9NQX6
  ENSP ID: ENSP00000421014

SEQ ID NO: 99717 - protein, 463 aa, Homo sapiens; identical to SEQ ID NO: 99713
  Payload ID: 19880
  Gene Name: zinc finger protein 331
  Uniprot ID: Q9NQX6
  ENSP ID: ENSP00000421728

SEQ ID NO: 99718 - protein, 166 aa, Homo sapiens
  Payload ID: 19880
  Gene Name: zinc finger protein 331
  ENSP ID: ENSP00000422471
MAQGLVTFADVAIDFSQEEWACLNSAQRDLYWDVMLENYSNLVSLDLESAYENKSLPTEKNIHEIRASKRNSDRRSKSLGRNWICEGTLERPQRSRGRYVNQMIINYVKRPATREGTPPRTHQRHHKENSFECKDCGKAFSRGYQLSQHQKIHTGEKPYECKECKK

SEQ ID NO: 99719 - protein, 85 aa, Homo sapiens
  Payload ID: 19880
  Gene Name: zinc finger protein 331
  ENSP ID: ENSP00000422586
MAQGLVTFADVAIDFSQEEWACLNSAQRDLYWDVMLENYSNLVSLDLESAYENKSLPTEKNIHEIRASKRNSDRRSKSLGRNWIC

SEQ ID NO: 99720 - protein, 463 aa, Homo sapiens; identical to SEQ ID NO: 99713
  Payload ID: 19880
  Gene Name: zinc finger protein 331
  Uniprot ID: Q9NQX6
  ENSP ID: ENSP00000423156

SEQ ID NO: 99721 - protein, 86 aa, Homo sapiens
  Payload ID: 19880
  Gene Name: zinc finger protein 331
  ENSP ID: ENSP00000423263
MAQGLVTFADVAIDFSQEEWACLNSAQRDLYWDVMLENYSNLVSLDLESAYENKSLPTEKNIHEIRASKRNSDRRSKSLGRNWICE

SEQ ID NO: 99722 - protein, 63 aa, Homo sapiens
  Payload ID: 19880
  Gene Name: zinc finger protein 331
  ENSP ID: ENSP00000423675
MAQGLVTFADVAIDFSQEEWACLNSAQRDLYWDVMLENYSNLVSLDLESAYENKSLPTEKNIH

SEQ ID NO: 99723 - protein, 99 aa, Homo sapiens
  Payload ID: 19880
  Gene Name: zinc finger protein 331
  ENSP ID: ENSP00000424835
MAQGLVTFADVAIDFSQEEWACLNSAQRDLYWDVMLENYSNLVSLDLESAYENKSLPTEKNIHEIRASKRNSDRRSKSLGRNWICEGTLERPQRSRGRY

SEQ ID NO: 99724 - protein, 64 aa, Homo sapiens
  Payload ID: 19880
  Gene Name: zinc finger protein 331
  ENSP ID: ENSP00000424929
MAQGLVTFADVAIDFSQEEWACLNSAQRDLYWDVMLENYSNLVSLDLESAYENKSLPTEKNIHE

SEQ ID NO: 99725 - protein, 66 aa, Homo sapiens
  Payload ID: 19880
  Gene Name: zinc finger protein 331
  ENSP ID: ENSP00000425517
MAQGLVTFADVAIDFSQEEWACLNSAQRDLYWDVMLENYSNLVSLDLESAYENKSLPTEKNIHEIR

SEQ ID NO: 99726 - protein, 105 aa, Homo sapiens
  Payload ID: 19880
  Gene Name: zinc finger protein 331
  ENSP ID: ENSP00000426127
MAQGLVTFADVAIDFSQEEWACLNSAQRDLYWDVMLENYSNLVSLDLESAYENKSLPTEKNIHEIRASKRNSDRRSKSLGRNWICEGTLERPQRSRGRYVNQMII

SEQ ID NO: 99727 - protein, 47 aa, Homo sapiens
  Payload ID: 19880
  Gene Name: zinc finger protein 331
  ENSP ID: ENSP00000426155
MAQGLVTFADVAIDFSQEEWACLNSAQRDLYWDVMLENYSNLVSLDL

SEQ ID NO: 99728 - protein, 98 aa, Homo sapiens
  Payload ID: 19880
  Gene Name: zinc finger protein 331
  ENSP ID: ENSP00000426458
MAQGLVTFADVAIDFSQEEWACLNSAQRDLYWDVMLENYSNLVSLDLESAYENKSLPTEKNIHEIRASKRNSDRRSKSLGRNWICEGTLERPQRSRGR

SEQ ID NO: 99729 - protein, 463 aa, Homo sapiens; identical to SEQ ID NO: 99713
  Payload ID: 19880
  Gene Name: zinc finger protein 331
  Uniprot ID: Q9NQX6
  ENSP ID: ENSP00000427439

SEQ ID NO: 99730 - protein, 177 aa, Homo sapiens
  Payload ID: 19880
  Gene Name: zinc finger protein 331
  ENSP ID: ENSP00000427532
MAQGLVTFADVAIDFSQEEWACLNSAQRDLYWDVMLENYSNLVSLDLESAYENKSLPTEKNIHEIRASKRNSDRRSKSLGRNWICEGTLERPQRSRGRYVNQMIINYVKRPATREGTPPRTHQRHHKENSFECKDCGKAFSRGYQLSQHQKIHTGEKPYECKECKKAFRWGNQLTQH

SEQ ID NO: 99731 - protein, 665 aa, Homo sapiens
  Payload ID: 19881
  Gene Name: zinc finger protein 333
  Uniprot ID: Q96JL9
  ENSP ID: ENSP00000292530
MESVTFEDVAVEFIQEWALLDSARRSLCKYRMLDQCRTLASRGTPPCKPSCVSQLGQRAEPKATERGILRATGVAWESQLKPEELPSMQDLLEEASSRDMQMGPGLFLRMQLVPSIEERETPLTREDRPALQEPPWSLGCTGLKAAMQIQRVVIPVPTLGHRNPWVARDSAVPARDPAWLQEDKVEEEAMAPGLPTACSQEPVTFADVAVVFTPEEWVFLDSTQRSLYRDVMLENYRNLASVADQLCKPNALSYLEERGEQWTTDRGVLSDTCAEPQCQPQEAIPSQDTFTEILSIDVKGEQPQPGEKLYKYNELEKPFNSIEPLFQYQRIHAGEASCECQEIRNSFFQSAHLIVPEKIRSGDKSYACNKCEKSFRYSSDLIRHEKTHTAEKCFDCQECGQAFKYSSNLRRHMRTHTGEKPFECSQCGKTFTRNFNLILHQRNHTGEKPYECKDCGKAFNQPSSLRSHVRTHTGEKPFECSQCGKAFREHSSLKTHLRTHTREKPYECNQCGKPFRTSTHLNVHKRIHTGEKLYECATCGQVLSRLSTLKSHMRTHTGEKPYVCQECGRAFSEPSSLRKHARTHSGKKPYACQECGRAFGQSSHLIVHVRTHSAGRPYQCNQCEKAFRHSSSLTVHKRTHVGRETIRNGSLPLSMSHPYCGPLAN

SEQ ID NO: 99732 - protein, 303 aa, Homo sapiens
  Payload ID: 19881
  Gene Name: zinc finger protein 333
  Uniprot ID: Q96JL9
  ENSP ID: ENSP00000438130
MESVTFEDVAVEFIQEWALLDSARRSLCKYRMLDQCRTLASRGTPPCKPSCVSQLGQRAEPKATERGILRATGVAWESQLKPEELPSMQDLLEEASSRDMQMGPGLFLRMQLVPSIEERETPLTREDRPALQEPPWSLGCTGLKAAMQIQRVVIPVPTLGHRNPWVARDSAVPARDPAWLQEDKVEEEAMAPGLPTACSQEPVTFADVAVVFTPEEWVFLDSTQRSLYRDVMLENYRNLASVADQLCKPNALSYLEERGEQWTTDRGVLSDTCAEPQCQPQEAIPSQDTFTEILSIDVKGPPN

SEQ ID NO: 99733 - protein, 195 aa, Homo sapiens
  Payload ID: 19881
  Gene Name: zinc finger protein 333
  ENSP ID: ENSP00000471420
MESVTFEDVAVEFIQEWALLDSARRSLCKYRMLDQCRTLASRGTPPCKPSCVSQLGQRAEPKATERGILRATGVAWESQLKPEELPSMQDLLEEASSRDMQMGPGLFLRMQLVPSIEERETPLTREDRPALQEPPWSLGCTGLKAAMQIQRVVIPVPTLGHRNPWVARDSGQKEDAWCRARSGVDLKAGGKEVSF

SEQ ID NO: 99734 - protein, 106 aa, Homo sapiens
  Payload ID: 19881
  Gene Name: zinc finger protein 333
  ENSP ID: ENSP00000471574
MESVTFEDVAVEFIQEWALLDSARRSLCKYRMLDQCRTLASRGTPPCKPSCVSQLGQRAEPKATERGILRATGVAWESQLKPEELPSMQDLLEEASSRDMQMVDPM

SEQ ID NO: 99735 - protein, 166 aa, Homo sapiens
  Payload ID: 19881
  Gene Name: zinc finger protein 333
  ENSP ID: ENSP00000472026
MESVTFEDVAVEFIQEWALLDSARRSLCKYRMLDQCRTLASRGAGAVPEDAAGALHRREGDTIDSRGPASSPGAALVSGMHGTEGRYADSEGGDTSAYSGPPQPMGGQGFWEQFLDLSLVLLFSIFLRVTPLLSSDGEMGTRKQSQRKHRPLLRGAHGQLGGQSSK

SEQ ID NO: 99736 - protein, 680 aa, Homo sapiens
  Payload ID: 19882
  Gene Name: zinc finger protein 334
  Uniprot ID: Q9HCZ1
  ENSP ID: ENSP00000255129
MKMKKFQIPVSFQDLTVNFTQEEWQQLDPAQRLLYRDVMLENYSNLVSVGYHVSKPDVIFKLEQGEEPWIVEEFSNQNYPDIDDALEKNKEIQDKHLTQTVFFSNKTLITERENVFGKTLNLGMNSVPSRKMPYKCNPGGNSLKTNSEVIVAKKSKENRKIPDGYSGFGKHEKSHLGMKKYRYNPMRKASNQNENLILHQNIQILKQPFDYNKCGKTFFKRAILITQKGRQTERKPNECNECRKTFSKRSTLIVHQRIHTGEKPYVCSDCRKTFRVKTSLTRHRRIHTGERPYECSECRKTFIDKSALIVHQKIHGGEKSYECNECGKTFFRKSALAEHFRSHTGEKPYECKECGNAFSKKSYLVVHQRTHRGEKPNECKECGKTFFCQSALTAHQRIHTGEKPYECSECEKTFFCQSALNVHRRSHTGEKPYECSQCGKFLCTKSALIAHQITHRGKKSYECNECGKFFCHKSTLTIHQRTHTGEKHGVFNKCGRISIVKSNCSQCKRMNTKENLYECSEHGHAVSKNSHLIVHQRTIWERPYECNECGRTYCRKSALTHHQRTHTGQRPYECNECGKTFCQKFSFVEHQRTHTGEKPYECNECGKSFCHKSAFRVHRRIHTGEKPYECNQCGKTYRRLWTLTEHQKIHTGEKPYECNKCEKTFRHKSNFLLHQKSHKE

SEQ ID NO: 99737 - protein, 642 aa, Homo sapiens
  Payload ID: 19882
  Gene Name: zinc finger protein 334
  ENSP ID: ENSP00000402582
MLENYSNLVSVGYHVSKPDVIFKLEQGEEPWIVEEFSNQNYPDIDDALEKNKEIQDKHLTQTVFFSNKTLITERENVFGKTLNLGMNSVPSRKMPYKCNPGGNSLKTNSEVIVAKKSKENRKIPDGYSGFGKHEKSHLGMKKYRYNPMRKASNQNENLILHQNIQILKQPFDYNKCGKTFFKRAILITQKGRQTERKPNECNECRKTFSKRSTLIVHQRIHTGEKPYVCSDCRKTFRVKTSLTRHRRIHTGERPYECSECRKTFIDKSALIVHQKIHGGEKSYECNECGKTFFRKSALAEHFRSHTGEKPYECKECGNAFSKKSYLVVHQRTHRGEKPNECKECGKTFFCQSALTAHQRIHTGEKPYECSECEKTFFCQSALNVHRRSHTGEKPYECSQCGKFLCTKSALIAHQITHRGKKSYECNECGKFFCHKSTLTIHQRTHTGEKHGVFNKCGRISIVKSNCSQCKRMNTKENLYECSEHGHAVSKNSHLIVHQRTIWERPYECNECGRTYCRKSALTHHQRTHTGQRPYECNECGKTFCQKFSFVEHQRTHTGEKPYECNECGKSFCHKSAFRVHRRIHTGEKPYECNQCGKTYRRLWTLTEHQKIHTGEKPYECNKCEKTFRHKSNFLLHQKSHKE

SEQ ID NO: 99738 - protein, 173 aa, Homo sapiens
  Payload ID: 19882
  Gene Name: zinc finger protein 334
  ENSP ID: ENSP00000473164
MLENYSNLVSVGYHVSKPDVIFKLEQGEEPWIVEEFSNQNYPDIDDALEKNKEIQDKHLTQTVFFSNKTLITERENVFGKTLNLGMNSVPSRKMPYKCNPGGNSLKTNSEVIVAKKSKENRKIPDGYSGFGKHEKSHLGMKKYRYNPMRKASNQNENLILHQNIQILKQPFDY

SEQ ID NO: 99739 - protein, 703 aa, Homo sapiens
  Payload ID: 19882
  Gene Name: zinc finger protein 334
  ENSP ID: ENSP00000473194
MCVFLHLLSYIKDTSFIPGPDCELHPRGMAATGPCSEAPVQGCDAGELQQLGLCGVSDVQRSWSKFCNFPLTGYHVSKPDVIFKLEQGEEPWIVEEFSNQNYPDIDDALEKNKEIQDKHLTQTVFFSNKTLITERENVFGKTLNLGMNSVPSRKMPYKCNPGGNSLKTNSEVIVAKKSKENRKIPDGYSGFGKHEKSHLGMKKYRYNPMRKASNQNENLILHQNIQILKQPFDYNKCGKTFFKRAILITQKGRQTERKPNECNECRKTFSKRSTLIVHQRIHTGEKPYVCSDCRKTFRVKTSLTRHRRIHTGERPYECSECRKTFIDKSALIVHQKIHGGEKSYECNECGKTFFRKSALAEHFRSHTGEKPYECKECGNAFSKKSYLVVHQRTHRGEKPNECKECGKTFFCQSALTAHQRIHTGEKPYECSECEKTFFCQSALNVHRRSHTGEKPYECSQCGKFLCTKSALIAHQITHRGKKSYECNECGKFFCHKSTLTIHQRTHTGEKHGVFNKCGRISIVKSNCSQCKRMNTKENLYECSEHGHAVSKNSHLIVHQRTIWERPYECNECGRTYCRKSALTHHQRTHTGQRPYECNECGKTFCQKFSFVEHQRTHTGEKPYECNECGKSFCHKSAFRVHRRIHTGEKPYECNQCGKTYRRLWTLTEHQKIHTGEKPYECNKCEKTFRHKSNFLLHQKSHKE

SEQ ID NO: 99740 - protein, 679 aa, Homo sapiens
  Payload ID: 19882
  Gene Name: zinc finger protein 334
  ENSP ID: ENSP00000484362
MENEKEIPVSFQDLTVNFTQEEWQQLDPAQRLLYRDVMLENYSNLVSVGYHVSKPDVIFKLEQGEEPWIVEEFSNQNYPDIDDALEKNKEIQDKHLTQTVFFSNKTLITERENVFGKTLNLGMNSVPSRKMPYKCNPGGNSLKTNSEVIVAKKSKENRKIPDGYSGFGKHEKSHLGMKKYRYNPMRKASNQNENLILHQNIQILKQPFDYNKCGKTFFKRAILITQKGRQTERKPNECNECRKTFSKRSTLIVHQRIHTGEKPYVCSDCRKTFRVKTSLTRHRRIHTGERPYECSECRKTFIDKSALIVHQKIHGGEKSYECNECGKTFFRKSALAEHFRSHTGEKPYECKECGNAFSKKSYLVVHQRTHRGEKPNECKECGKTFFCQSALTAHQRIHTGEKPYECSECEKTFFCQSALNVHRRSHTGEKPYECSQCGKFLCTKSALIAHQITHRGKKSYECNECGKFFCHKSTLTIHQRTHTGEKHGVFNKCGRISIVKSNCSQCKRMNTKENLYECSEHGHAVSKNSHLIVHQRTIWERPYECNECGRTYCRKSALTHHQRTHTGQRPYECNECGKTFCQKFSFVEHQRTHTGEKPYECNECGKSFCHKSAFRVHRRIHTGEKPYECNQCGKTYRRLWTLTEHQKIHTGEKPYECNKCEKTFRHKSNFLLHQKSHKE

SEQ ID NO: 99741 - protein, 679 aa, Homo sapiens; identical to SEQ ID NO: 99740
  Payload ID: 19882
  Gene Name: zinc finger protein 334
  ENSP ID: ENSP00000485779

SEQ ID NO: 99742 - protein, 1342 aa, Homo sapiens
  Payload ID: 19883
  Gene Name: zinc finger protein 335
  Uniprot ID: Q9H4Z2
  ENSP ID: ENSP00000325326
MEENEVESSSDAAPGPGRPEEPSESGLGVGTSEAVSADSSDAAAAPGQAEADDSGVGQSSDRGSRSQEEVSESSSSADPLPNSYLPDSSSVSHGPVAGVTGGPPALVHSSALPDPNMLVSDCTASSSDLGSAIDKIIESTIGPDLIQNCITVTSAEDGGAETTRYLILQGPDDGAPMTSPMSSSTLAHSLAAIEALADGPTSTSTCLEAQGGPSSPVQLPPASGAEEPDLQSLEAMMEVVVVQQFKCKMCQYRSSTKATLLRHMRERHFRPVAAAAAAAGKKGRLRKWSTSTKSQEEEGPEEEDDDDIVDAGAIDDLEEDSDYNPAEDEPRGRQLRLQRPTPSTPRPRRRPGRPRKLPRLEISDLPDGVEGEPLVSSQSGQSPPEPQDPEAPSSSGPGHLVAMGKVSRTPVEAGVSQSDAENAAPSCPDEHDTLPRRRGRPSRRFLGKKYRKYYYKSPKPLLRPFLCRICGSRFLSHEDLRFHVNSHEAGDPQLFKCLQCSYRSRRWSSLKEHMFNHVGSKPYKCDECSYTSVYRKDVIRHAAVHSRDRKKRPDPTPKLSSFPCPVCGRVYPMQKRLTQHMKTHSTEKPHMCDKCGKSFKKRYTFKMHLLTHIQAVANRRFKCEFCEFVCEDKKALLNHQLSHVSDKPFKCSFCPYRTFREDFLLSHVAVKHTGAKPFACEYCHFSTRHKKNLRLHVRCRHASSFEEWGRRHPEEPPSRRRPFFSLQQIEELKQQHSAAPGPPPSSPGPPEIPPEATTFQSSEAPSLLCSDTLGGATIIYQQGAEESTAMATQTALDLLLNMSAQRELGGTALQVAVVKSEDVEAGLASPGGQPSPEGATPQVVTLHVAEPGGGAAAESQLGPPDLPQITLAPGPFGGTGYSVITAPPMEEGTSAPGTPYSEEPAGEAAQAVVVSDTLKEAGTHYIMATDGTQLHHIELTADGSISFPSPDALASGAKWPLLQCGGLPRDGPEPPSPAKTHCVGDSQSSASSPPATSKALGLAVPPSPPSAATAASKKFSCKICAEAFPGRAEMESHKRAHAGPGAFKCPDCPFSARQWPEVRAHMAQHSSLRPHQCSQCSFASKNKKDLRRHMLTHTKEKPFACHLCGQRFNRNGHLKFHIQRLHSPDGRKSGTPTARAPTQTPTQTIILNSDDETLATLHTALQSSHGVLGPERLQQALSQEHIIVAQEQTVTNQEEAAYIQEITTADGQTVQHLVTSDNQVQYIISQDGVQHLLPQEYVVVPEGHHIQVQEGQITHIQYEQGAPFLQESQIQYVPVSPGQQLVTQAQLEAAAHSAVTAVADAAMAQAQGLFGTDETVPEHIQQLQHQGIEYDVITLADD

SEQ ID NO: 99743 - protein, 751 aa, Homo sapiens
  Payload ID: 19884
  Gene Name: zinc finger protein 337
  Uniprot ID: Q9Y3M9
  ENSP ID: ENSP00000252979
MGPQGARRQAFLAFGDVTVDFTQKEWRLLSPAQRALYREVTLENYSHLVSLGILHSKPELIRRLEQGEVPWGEERRRRPGPCAGIYAEHVLRPKNLGLAHQRQQQLQFSDQSFQSDTAEGQEKEKSTKPMAFSSPPLRHAVSSRRRNSVVEIESSQGQRENPTEIDKVLKGIENSRWGAFKCAERGQDFSRKMMVIIHKKAHSRQKLFTCRECHQGFRDESALLLHQNTHTGEKSYVCSVCGRGFSLKANLLRHQRTHSGEKPFLCKVCGRGYTSKSYLTVHERTHTGEKPYECQECGRRFNDKSSYNKHLKAHSGEKPFVCKECGRGYTNKSYFVVHKRIHSGEKPYRCQECGRGFSNKSHLITHQRTHSGEKPFACRQCKQSFSVKGSLLRHQRTHSGEKPFVCKDCERSFSQKSTLVYHQRTHSGEKPFVCRECGQGFIQKSTLVKHQITHSEEKPFVCKDCGRGFIQKSTFTLHQRTHSEEKPYGCRECGRRFRDKSSYNKHLRAHLGEKRFFCRDCGRGFTLKPNLTIHQRTHSGEKPFMCKQCEKSFSLKANLLRHQWTHSGERPFNCKDCGRGFILKSTLLFHQKTHSGEKPFICSECGQGFIWKSNLVKHQLAHSGKQPFVCKECGRGFNWKGNLLTHQRTHSGEKPFVCNVCGQGFSWKRSLTRHHWRIHSKEKPFVCQECKRGYTSKSDLTVHERIHTGERPYECQECGRKFSNKSYYSKHLKRHLREKRFCTGSVGEASS

SEQ ID NO: 99744 - protein, 751 aa, Homo sapiens; identical to SEQ ID NO: 99743
  Payload ID: 19884
  Gene Name: zinc finger protein 337
  Uniprot ID: Q9Y3M9
  ENSP ID: ENSP00000365619

SEQ ID NO: 99745 - protein, 829 aa, Homo sapiens
  Payload ID: 19885
  Gene Name: zinc finger protein 33A
  ENSP ID: ENSP00000304268
MCPRGYPEQSNWMSSPLYSTEVEQKSQESVSFKDVTVGFTQEEWQHLDPSQRALYRDVMLENYSNLVSVGYCVHKPEVIFRLQQGEEPWKQEEEFPSQSFPEVWTADHLKERSQENQSKHLWEVVFINNEMLTKEQGDVIGIPFNVDVSSFPSRKMFCQCDSCGMSFNTVSELVISKINYLGKKSDEFNACGKLLLNIKHDETHTQEKNEVLKNRNTLSHHEETLQHEKIQTLEHNFEYSICQETLLEKAVFNTQKRENAEENNCDYNEFGRTLCDSSSLLFHQISPSRDNHYEFSDCEKFLCVKSTLSKPHGVSMKHYDCGESGNNFRRKLCLSHLQKGDKGEKHFECNECGKAFWEKSHLTRHQRVHTGQKPFQCNECEKAFWDKSNLTKHQRSHTGEKPFECNECGKAFSHKSALTLHQRTHTGEKPYQCNACGKTFCQKSDLTKHQRTHTGLKPYECYECGKSFRVTSHLKVHQRTHTGEKPFECLECGKSFSEKSNLTQHQRIHIGDKSYECNACGKTFYHKSLLTRHQIIHTGWKPYECYECGKTFCLKSDLTVHQRTHTGQKPFACPECGKFFSHKSTLSQHYRTHTGEKPYECHECGKIFYNKSYLTKHNRTHTGEKPYECNECGKAFYQKSQLTQHQRIHIGEKPYKCNECGKAFCHKSALIVHQRTHTQEKPYKCNECGKSFCVKSGLIFHERKHTGEKPYECNECGKFFRHKSSLTVHHRAHTGEKSCQCNECGKIFYRKSELAQHQRSHTGEKPYECNTCRKTFSQKSNLIVHQRRHIGENLMNEMDIRNFQPQVSLHNASEYSHCGESPDDILNVQ

SEQ ID NO: 99746 - protein, 699 aa, Homo sapiens
  Payload ID: 19885
  Gene Name: zinc finger protein 33A
  ENSP ID: ENSP00000363747
MLTKEQGDVIGIPFNVDVSSFPSRKMFCQCDSCGMSFNTVSELVISKINYLGKKSDEFNACGKLLLNIKHDETHTQEKNEVLKNRNTLSHHEETLQHEKIQTLEHNFEYSICQETLLEKAVFNTQKRENAEENNCDYNEFGRTLCDSSSLLFHQISPSRDNHYEFSDCEKFLCVKSTLSKPHGVSMKHYDCGESGNNFRRKLCLSHLQKGDKGEKHFECNECGKAFWEKSHLTRHQRVHTGQKPFQCNECEKAFWDKSNLTKHQRSHTGEKPFECNECGKAFSHKSALTLHQRTHTGEKPYQCNACGKTFCQKSDLTKHQRTHTGLKPYECYECGKSFRVTSHLKVHQRTHTGEKPFECLECGKSFSEKSNLTQHQRIHIGDKSYECNACGKTFYHKSLLTRHQIIHTGWKPYECYECGKTFCLKSDLTVHQRTHTGQKPFACPECGKFFSHKSTLSQHYRTHTGEKPYECHECGKIFYNKSYLTKHNRTHTGEKPYECNECGKAFYQKSQLTQHQRIHIGEKPYKCNECGKAFCHKSALIVHQRTHTQEKPYKCNECGKSFCVKSGLIFHERKHTGEKPYECNECGKFFRHKSSLTVHHRAHTGEKSCQCNECGKIFYRKSELAQHQRSHTGEKPYECNTCRKTFSQKSNLIVHQRRHIGENLMNEMDIRNFQPQVSLHNASEYSHCGESPDDILNVQ

SEQ ID NO: 99747 - protein, 810 aa, Homo sapiens
  Payload ID: 19885
  Gene Name: zinc finger protein 33A
  Uniprot ID: Q06730
  ENSP ID: ENSP00000387713
MNKVEQKSQESVSFKDVTVGFTQEEWQHLDPSQRALYRDVMLENYSNLVSVGYCVHKPEVIFRLQQGEEPWKQEEEFPSQSFPVWTADHLKERSQENQSKHLWEVVFINNEMLTKEQGDVIGIPFNVDVSSFPSRKMFCQCDSCGMSFNTVSELVISKINYLGKKSDEFNACGKLLLNIKHDETHTQEKNEVLKNRNTLSHHEETLQHEKIQTLEHNFEYSICQETLLEKAVFNTQKRENAEENNCDYNEFGRTLCDSSSLLFHQISPSRDNHYEFSDCEKFLCVKSTLSKPHGVSMKHYDCGESGNNFRRKLCLSHLQKGDKGEKHFECNECGKAFWEKSHLTRHQRVHTGQKPFQCNECEKAFWDKSNLTKHQRSHTGEKPFECNECGKAFSHKSALTLHQRTHTGEKPYQCNACGKTFCQKSDLTKHQRTHTGLKPYECYECGKSFRVTSHLKVHQRTHTGEKPFECLECGKSFSEKSNLTQHQRIHIGDKSYECNACGKTFYHKSLLTRHQIIHTGWKPYECYECGKTFCLKSDLTVHQRTHTGQKPFACPECGKFFSHKSTLSQHYRTHTGEKPYECHECGKIFYNKSYLTKHNRTHTGEKPYECNECGKAFYQKSQLTQHQRIHIGEKPYKCNECGKAFCHKSALIVHQRTHTQEKPYKCNECGKSFCVKSGLIFHERKHTGEKPYECNECGKFFRHKSSLTVHHRAHTGEKSCQCNECGKIFYRKSELAQHQRSHTGEKPYECNTCRKTFSQKSNLIVHQRRHIGENLMNEMDIRNFQPQVSLHNASEYSHCGESPDDILNVQ

SEQ ID NO: 99748 - protein, 811 aa, Homo sapiens
  Payload ID: 19885
  Gene Name: zinc finger protein 33A
  Uniprot ID: Q06730
  ENSP ID: ENSP00000402467
MNKVEQKSQESVSFKDVTVGFTQEEWQHLDPSQRALYRDVMLENYSNLVSVGYCVHKPEVIFRLQQGEEPWKQEEEFPSQSFPEVWTADHLKERSQENQSKHLWEVVFINNEMLTKEQGDVIGIPFNVDVSSFPSRKMFCQCDSCGMSFNTVSELVISKINYLGKKSDEFNACGKLLLNIKHDETHTQEKNEVLKNRNTLSHHEETLQHEKIQTLEHNFEYSICQETLLEKAVFNTQKRENAEENNCDYNEFGRTLCDSSSLLFHQISPSRDNHYEFSDCEKFLCVKSTLSKPHGVSMKHYDCGESGNNFRRKLCLSHLQKGDKGEKHFECNECGKAFWEKSHLTRHQRVHTGQKPFQCNECEKAFWDKSNLTKHQRSHTGEKPFECNECGKAFSHKSALTLHQRTHTGEKPYQCNACGKTFCQKSDLTKHQRTHTGLKPYECYECGKSFRVTSHLKVHQRTHTGEKPFECLECGKSFSEKSNLTQHQRIHIGDKSYECNACGKTFYHKSLLTRHQIIHTGWKPYECYECGKTFCLKSDLTVHQRTHTGQKPFACPECGKFFSHKSTLSQHYRTHTGEKPYECHECGKIFYNKSYLTKHNRTHTGEKPYECNECGKAFYQKSQLTQHQRIHIGEKPYKCNECGKAFCHKSALIVHQRTHTQEKPYKCNECGKSFCVKSGLIFHERKHTGEKPYECNECGKFFRHKSSLTVHHRAHTGEKSCQCNECGKIFYRKSELAQHQRSHTGEKPYECNTCRKTFSQKSNLIVHQRRHIGENLMNEMDIRNFQPQVSLHNASEYSHCGESPDDILNVQ

SEQ ID NO: 99749 - protein, 138 aa, Homo sapiens
  Payload ID: 19885
  Gene Name: zinc finger protein 33A
  ENSP ID: ENSP00000437022
MNKVEQKSQESVSFKDVTVGFTQEEWQHLDPSQRALYRDVMLENYSNLVSVGYCVHKPEVIFRLQQGEEPWKQEEEFPSQSFPEVWTADHLKERSQENQSKHLWEVVFINNEMLTKEQGDVIGIPFNVDAPEMLMPLD

SEQ ID NO: 99750 - protein, 817 aa, Homo sapiens
  Payload ID: 19885
  Gene Name: zinc finger protein 33A
  Uniprot ID: Q06730
  ENSP ID: ENSP00000485869
MANATRRGSGVEQKSQESVSFKDVTVGFTQEEWQHLDPSQRALYRDVMLENYSNLVSVGYCVHKPEVIFRLQQGEEPWKQEEEFPSQSFPVWTADHLKERSQENQSKHLWEVVFINNEMLTKEQGDVIGIPFNVDVSSFPSRKMFCQCDSCGMSFNTVSELVISKINYLGKKSDEFNACGKLLLNIKHDETHTQEKNEVLKNRNTLSHHEETLQHEKIQTLEHNFEYSICQETLLEKAVFNTQKRENAEENNCDYNEFGRTLCDSSSLLFHQISPSRDNHYEFSDCEKFLCVKSTLSKPHGVSMKHYDCGESGNNFRRKLCLSHLQKGDKGEKHFECNECGKAFWEKSHLTRHQRVHTGQKPFQCNECEKAFWDKSNLTKHQRSHTGEKPFECNECGKAFSHKSALTLHQRTHTGEKPYQCNACGKTFCQKSDLTKHQRTHTGLKPYECYECGKSFRVTSHLKVHQRTHTGEKPFECLECGKSFSEKSNLTQHQRIHIGDKSYECNACGKTFYHKSLLTRHQIIHTGWKPYECYECGKTFCLKSDLTVHQRTHTGQKPFACPECGKFFSHKSTLSQHYRTHTGEKPYECHECGKIFYNKSYLTKHNRTHTGEKPYECNECGKAFYQKSQLTQHQRIHIGEKPYKCNECGKAFCHKSALIVHQRTHTQEKPYKCNECGKSFCVKSGLIFHERKHTGEKPYECNECGKFFRHKSSLTVHHRAHTGEKSCQCNECGKIFYRKSELAQHQRSHTGEKPYECNTCRKTFSQKSNLIVHQRRHIGENLMNEMDIRNFQPQVSLHNASEYSHCGESPDDILNVQ

SEQ ID NO: 99751 - protein, 778 aa, Homo sapiens
  Payload ID: 19886
  Gene Name: zinc finger protein 33B
  Uniprot ID: Q06732
  ENSP ID: ENSP00000352444
MNKVDQKFQGSVSFKDVTVGFTQEEWQHLDPSQRALYRDVMLENYSNLVSVGYCAHKPEVIFRLEQGEEPWRLEEEFPSQSFPEVWTADHLKERSQENQSKHLWEVVFINNEMLTKEQGNVIGIPFNMDVSSFPSRKMFCQYDSRGMSFNTVSELVISKINYLGKKSDEFNACGKLLLNIKHDETHTREKNEVLKNRNTLSHRENTLQHEKIQTLDHNFEYSICQETLLEKAVFNTRKRENAEENNCDYNEFGRTFCDSSSLLFHQIPPSKDSHYEFSDCEKFLCVKSTLSKHDGVPVKHYDCGESGNNFRRKLCLSQLQKGDKGEKHFECNECGKAFWEKSHLTRHQRVHTGEKHFQCNQCGKTFWEKSNLTKHQRSHTGEKPFECNECGKAFSHKSALTLHQRTHTGEKPYQCNACGKTFYQKSDLTKHQRTHTGQKPYECYECGKSFCMNSHLTVHQRTHTGEKPFECLECGKSFCQKSHLTQHQRTHIGDKPYECNACGKTFYHKSVLTRHQIIHTGLKPYECYECGKTFCLKSDLTIHQRTHTGEKPFACPECGKFFSHKSTLSQHYRTHTGEKPYECHECGKIFYNKSYLTKHNRTHTGEKPYECNECGKTFCQKSQLTQHQRIHIGEKPYECNECGKAFCHKSALIVHQRTHTQEKPYKCNECGKSFCVKSGLILHERKHTGEKPYECNECGKSFSHKSSLTVHHRAHTGEKSCQCNECGKIFYRKSDLAKHQRSHTGEKPYECNTCRKTFSQKSNLIVHQRTHIGEKPYE

SEQ ID NO: 99752 - protein, 90 aa, Homo sapiens
  Payload ID: 19886
  Gene Name: zinc finger protein 33B
  ENSP ID: ENSP00000479296
MANATRRESEVDQKFQGSVSFKDVTVGFTQEEWQHLDPSQRALYRDVMLENYSNLVSVGYCAHKPEVIFRLEQGEEPWRLEEEFPSQSFP

SEQ ID NO: 99753 - protein, 93 aa, Homo sapiens
  Payload ID: 19886
  Gene Name: zinc finger protein 33B
  ENSP ID: ENSP00000480979
HLDPSQRALYRDVMLENYSNLVSVGYCAHKPEVIFRLEQGEEPWRLEEEFPSQSFPEVWTADHLKERSQENQSKHLWEVVFINNEMLTKEQGP

SEQ ID NO: 99754 - protein, 778 aa, Homo sapiens
  Payload ID: 19886
  Gene Name: zinc finger protein 33B
  ENSP ID: ENSP00000481265
MSAVDQKFQGSVSFKDVTVGFTQEEWQHLDPSQRALYRDVMLENYSNLVSVGYCAHKPEVIFRLEQGEEPWRLEEEFPSQSFPEVWTADHLKERSQENQSKHLWEVVFINNEMLTKEQGNVIGIPFNMDVSSFPSRKMFCQYDSRGMSFNTVSELVISKINYLGKKSDEFNACGKLLLNIKHDETHTREKNEVLKNRNTLSHRENTLQHEKIQTLDHNFEYSICQETLLEKAVFNTRKRENAEENNCDYNEFGRTFCDSSSLLFHQIPPSKDSHYEFSDCEKFLCVKSTLSKHDGVPVKHYDCGESGNNFRRKLCLSQLQKGDKGEKHFECNECGKAFWEKSHLTRHQRVHTGEKHFQCNQCGKTFWEKSNLTKHQRSHTGEKPFECNECGKAFSHKSALTLHQRTHTGEKPYQCNACGKTFYQKSDLTKHQRTHTGQKPYECYECGKSFCMNSHLTVHQRTHTGEKPFECLECGKSFCQKSHLTQHQRTHIGDKPYECNACGKTFYHKSVLTRHQIIHTGLKPYECYECGKTFCLKSDLTIHQRTHTGEKPFACPECGKFFSHKSTLSQHYRTHTGEKPYECHECGKIFYNKSYLTKHNRTHTGEKPYECNECGKTFCQKSQLTQHQRIHIGEKPYECNECGKAFCHKSALIVHQRTHTQEKPYKCNECGKSFCVKSGLILHERKHTGEKPYECNECGKSFSHKSSLTVHHRAHTGEKSCQCNECGKIFYRKSDLAKHQRSHTGEKPYECNTCRKTFSQKSNLIVHQRTHIGEKPYE

SEQ ID NO: 99755 - protein, 36 aa, Homo sapiens
  Payload ID: 19886
  Gene Name: zinc finger protein 33B
  ENSP ID: ENSP00000484085
SQENQSKHLWEVVFINNEMLTKEQDVISLRREWYVP

SEQ ID NO: 99756 - protein, 560 aa, Homo sapiens
  Payload ID: 19887
  Gene Name: zinc finger protein 34
  Uniprot ID: Q8IZ26
  ENSP ID: ENSP00000341528
MLLLLSDQLLLTALRKPNPQAMAALFLSAPPQAEVTFEDVAVYLSREEWGRLGPAQRGLYRDVMLETYGNLVSLGVGPAGPKPGVISQLERGDEPWVLDVQGTSGKEHLRVNSPALGTRTEYKELTSQETFGEEDPQGSEPVEACDHISKSEGSLEKLVEQRGPRAVTLTNGESSRESGGNLRLLSRPVPDQRPHKCDICEQSFEQRSYLNNHKRVHRSKKTNTVRNSGEIFSANLVVKEDQKIPTGKKLHYCSYCGKTFRYSANLVKHQRLHTEEKPYKCDECGKAFSQSCEFINHRRMHSGEIPYRCDECGKTFTRRPNLMKHQRIHTGEKPYKCGECGKHFSAYSSLIYHQRIHTGEKPYKCNDCGKAFSDGSILIRHRRTHTGEKPFECKECGKGFTQSSNLIQHQRIHTGEKPYKCNECEKAFIQKTKLVEHQRSHTGEKPYECNDCGKVFSQSTHLIQHQRIHTGEKPYKCSECGKAFHNSSRLIHHQRLHHGEKPYRCSDCKKAFSQSTYLIQHRRIHTGEKPYKCSECGKAFRHSSNMCQHQRIHLREDFSM

SEQ ID NO: 99757 - protein, 539 aa, Homo sapiens
  Payload ID: 19887
  Gene Name: zinc finger protein 34
  ENSP ID: ENSP00000396894
MAALFLSAPPQAEVTFEDVAVYLSREEWGRLGPAQRGLYRDVMLETYGNLVSLGVGPAGPKPGVISQLERGDEPWVLDVQGTSGKEHLRVNSPALGTRTEYKELTSQETFGEEDPQGSEPVEACDHISKSEGSLEKLVEQRGPRAVTLTNGESSRESGGNLRLLSRPVPDQRPHKCDICEQSFEQRSYLNNHKRVHRSKKTNTVRNSGEIFSANLVVKEDQKIPTGKKLHYCSYCGKTFRYSANLVKHQRLHTEEKPYKCDECGKAFSQSCEFINHRRMHSGEIPYRCDECGKTFTRRPNLMKHQRIHTGEKPYKCGECGKHFSAYSSLIYHQRIHTGEKPYKCNDCGKAFSDGSILIRHRRTHTGEKPFECKECGKGFTQSSNLIQHQRIHTGEKPYKCNECEKAFIQKTKLVEHQRSHTGEKPYECNDCGKVFSQSTHLIQHQRIHTGEKPYKCSECGKAFHNSSRLIHHQRLHHGEKPYRCSDCKKAFSQSTYLIQHRRIHTGEKPYKCSECGKAFRHSSNMCQHQRIHLREDFSM

SEQ ID NO: 99758 - protein, 264 aa, Homo sapiens
  Payload ID: 19887
  Gene Name: zinc finger protein 34
  ENSP ID: ENSP00000434049
MAALFLSAPPQAEVTFEDVAVYLSREEWGRLGPAQRGLYRDVMLETYGNLVSLALGTRTEYKELTSQETFGEEDPQGSEPVEACDHISKSEGSLEKLVEQRGPRAVTLTNGESSRESGGNLRLLSRPVPDQRPHKCDICEQSFEQRSYLNNHKRVHRSKKTNTVRNSGEIFSANLVVKEDQKIPTGKKLHYCSYCGKTFRYSANLVKHQRLHTEEKPYKCDECGKAFSQSCEFINHRRMHSGEIPYRCDECGKTFTRRPNLMKH

SEQ ID NO: 99759 - protein, 158 aa, Homo sapiens
  Payload ID: 19887
  Gene Name: zinc finger protein 34
  ENSP ID: ENSP00000437056
MLLLLSDQLLLTALRKPNPQAMAALFLSAPPQAEVTFEDVAVYLSREEWGRLGPAQRGLYRDVMLETYGNLVSLALGTRTEYKELTSQETFGEEDPQGSEPVEACDHISKSEGSLEKLVEQRGPRAVTLTNGESSRESGGNLRLLSRPVPDQRPHKCD

SEQ ID NO: 99760 - protein, 847 aa, Homo sapiens
  Payload ID: 19888
  Gene Name: zinc finger protein 341
  Uniprot ID: Q9BYN7
  ENSP ID: ENSP00000344308
MAQAIFEALEGMDNQTVLAVQSLLDGQGAVPDPTGQSVNAPPAIQPLDDEDVFLCGKCKKQFNSLPAFMTHKREQCQGNAPALATVSLATNSIYPPSAAPTAVQQAPTPANRQISTYITVPPSPLIQTLVQGNILVSDDVLMSAMSAFTSLDQPMPQGPPPVQSSLNMHSVPSYLTQPPPPPPPPPPLPPPPPPQPPPPPPQSLGPPGRPNPGGNGVVEVYSAAAPLAGSGTVEIQALGMQPYPPLEVPNQCVEPPVYPTPTVYSPGKQGFKPKGPNPAAPMTSATGGTVATFDSPATLKTRRAKAAGKPKAQKLKCSYCDKSFTKNFDLQQHIRSHTGEKPFQCIACGRAFAQKSNVKKHMQTHKVWPPGHSGGTVSRNSVTVQVMALNPSRQEDEESTGLGQPLPGAPQPQALSTAGEEEGDKPESKQVVLIDSSYLCQFCPSKFSTYFQLKSHMTQHKNEQVYKCVVKSCAQTFPKLDTFLEHIKSHQEELSYRCHLCGKDFPSLYDLGVHQYSHSLLPQHSPKKDNAVYKCVKCVNKYSTPEALEHHLQTATHNFPCPHCQKVFPCERYLRRHLPTHGSGGRFKCQVCKKFFRREHYLKLHAHIHSGEKPYKCSVCESAFNRKDKLKRHMLIHEPFKKYKCPFSTHTGCSKEFNRPDKLKAHILSHSGMKLHKCALCSKSFSRRAHLAEHQRAHTGNYKFRCAGCAKGFSRHKYLKDHRCRLGPQKDKDLQTRRPPQRRAAPRSCGSGGRKVLTPLPDPLGLEELKDTGAGLVPEAVPGKPPFAEPDAVLSIVVGGAVGAETELVVPGHAEGLGSNLALAELQAGAEGPCAMLAVPVYIQASE

SEQ ID NO: 99761 - protein, 854 aa, Homo sapiens
  Payload ID: 19888
  Gene Name: zinc finger protein 341
  Uniprot ID: Q9BYN7
  ENSP ID: ENSP00000364346
MAQAIFEALEGMDNQTVLAVQSLLDGQGAVPDPTGQSVNAPPAIQPLDDEDVFLCGKCKKQFNSLPAFMTHKREQCQGNAPALATVSLATNSIYPPSAAPTAVQQAPTPANRQISTYITVPPSPLIQTLVQGNILVSDDVLMSAMSAFTSLDQPMPQGPPPVQSSLNMHSVPSYLTQPPPPPPPPPPLPPPPPPQPPPPPPQSLGPPGRPNPGGNGVVEVYSAAAPLAGSGTVEIQALGMQPYPPLEVPNQCVEPPVYPTPTVYSPGKQGFKPKGPNPAAPMTSATGGTVATFDSPATLKTRRAKGARGLPEAAGKPKAQKLKCSYCDKSFTKNFDLQQHIRSHTGEKPFQCIACGRAFAQKSNVKKHMQTHKVWPPGHSGGTVSRNSVTVQVMALNPSRQEDEESTGLGQPLPGAPQPQALSTAGEEEGDKPESKQVVLIDSSYLCQFCPSKFSTYFQLKSHMTQHKNEQVYKCVVKSCAQTFPKLDTFLEHIKSHQEELSYRCHLCGKDFPSLYDLGVHQYSHSLLPQHSPKKDNAVYKCVKCVNKYSTPEALEHHLQTATHNFPCPHCQKVFPCERYLRRHLPTHGSGGRFKCQVCKKFFRREHYLKLHAHIHSGEKPYKCSVCESAFNRKDKLKRHMLIHEPFKKYKCPFSTHTGCSKEFNRPDKLKAHILSHSGMKLHKCALCSKSFSRRAHLAEHQRAHTGNYKFRCAGCAKGFSRHKYLKDHRCRLGPQKDKDLQTRRPPQRRAAPRSCGSGGRKVLTPLPDPLGLEELKDTGAGLVPEAVPGKPPFAEPDAVLSIVVGGAVGAETELVVPGHAEGLGSNLALAELQAGAEGPCAMLAVPVYIQASE

SEQ ID NO: 99762 - protein, 604 aa, Homo sapiens
  Payload ID: 19888
  Gene Name: zinc finger protein 341
  ENSP ID: ENSP00000432933
MAQAIFEALEGMDNQTVLAVQSLLDGQGAVPDPTGQSVNAPPAIQPLDDEDVFLCGKCKKQFNSLPAFMTHKREQCQGNAPALATVSLATNSIYPPSAAPTAVQQAPTPANRQISTYITVPPSPLIQTLVQGNILVSDDVLMSAMSAFTSLDQPMPQGPPPVQSSLNMHSVPSYLTQPPPPPPPPPPLPPPPPPQPPPPPPQSLGPPGRPNPGGNGVVEVYSAAAPLAGSGTVEIQALGMQPYPPLEVPNQCVEPPVYPTPTVYSPGKQGFKPKGPNPAAPMTSATGGTVATFDSPATLKTRRAKGARGLPEAAGKPKAQKLKCSYCDKSFTKNFDLQQHIRSHTGEKPFQCIACGRAFAQKSNVKKHMQTHKVWPPGHSGGTVSRNSVTVQVMALNPSRQEDEESTGLGQPLPGAPQPQALSTAGEEEGDKPESKQVVLIDSSYLCQFCPSKFSTYFQLKSHMTQHKNEQVYKCVVKSCAQTFPKLDTFLEHIKSHQEELSYRCHLCGKDFPSLYDLGVHQYSHSLLPQHSPKKDNAVYKCFLVNATCGVICPPTAAGAGSSAKCARSSSGGSIISNCMLTSTRVRSPTNAQCASLRSTARTN

SEQ ID NO: 99763 - protein, 72 aa, Homo sapiens
  Payload ID: 19888
  Gene Name: zinc finger protein 341
  ENSP ID: ENSP00000434423
MAQAIFEALEGMDNQTVLAVQSLLDGQGAVPDPTGQSVNAPPAIQPLDLHIHHSAPVPTDPDPGAGEHLGER

SEQ ID NO: 99764 - protein, 599 aa, Homo sapiens
  Payload ID: 19889
  Gene Name: zinc finger protein 343
  Uniprot ID: Q6P1L6
  ENSP ID: ENSP00000278772
MMLPYPSALGDQYWEEILLPKNGENVETMKKLTQNHKAKGLPSNDTDCPQKKEGKAQIVVPVTFRDVTVIFTEAEWKRLSPEQRNLYKEVMLENYRNLLSLAEPKPEIYTCSSCLLAFSCQQFLSQHVLQIFLGLCAENHFHPGNSSPGHWKQQGQQYSHVSCWFENAEGQERGGGSKPWSARTEERETSRAFPSPLQRQSASPRKGNMVVETEPSSAQRPNPVQLDKGLKELETLRFGAINCREYEPDHNLESNFITNPRTLLGKKPYICSDCGRSFKDRSTLIRHHRIHSMEKPYVCSECGRGFSQKSNLSRHQRTHSEEKPYLCRECGQSFRSKSILNRHQWTHSEEKPYVCSECGRGFSEKSSFIRHQRTHSGEKPYVCLECGRSFCDKSTLRKHQRIHSGEKPYVCRECGRGFSQNSDLIKHQRTHLDEKPYVCRECGRGFCDKSTLIIHERTHSGEKPYVCGECGRGFSRKSLLLVHQRTHSGEKHYVCRECRRGFSQKSNLIRHQRTHSNEKPYICRECGRGFCDKSTLIVHERTHSGEKPYVCSECGRGFSRKSLLLVHQRTHSGEKHYVCRECGRGFSHKSNLIRHQRTH

SEQ ID NO: 99765 - protein, 118 aa, Homo sapiens
  Payload ID: 19889
  Gene Name: zinc finger protein 343
  Uniprot ID: Q6P1L6
  ENSP ID: ENSP00000351188
MMLPYPSALGDQYWEEILLPKNGENVETMKKLTQNHKAKGLPSNDTDCPQKKEGKAQIVVPVTFRDVTVIFTEAEWKRLSPEQRNLYKEVMLENYRNLLSLGQEIETILANIVKSHLY

SEQ ID NO: 99766 - protein, 118 aa, Homo sapiens; identical to SEQ ID NO: 99765
  Payload ID: 19889
  Gene Name: zinc finger protein 343
  Uniprot ID: Q6P1L6
  ENSP ID: ENSP00000370652

SEQ ID NO: 99767 - protein, 144 aa, Homo sapiens
  Payload ID: 19889
  Gene Name: zinc finger protein 343
  ENSP ID: ENSP00000399682
MMLPYPSALGDQYWEEILLPKNGENVETMKKLTQNHKAKGLPSNDTDCPQKKEGKAQIVVPVTFRDVTVIFTEAEWKRLSPEQRNLYKEVMLENYRNLLSLAEPKPEIYTCSSCLLAFSCQQFLSQHVLQIFLGLCAENHFHPG

SEQ ID NO: 99768 - protein, 101 aa, Homo sapiens
  Payload ID: 19889
  Gene Name: zinc finger protein 343
  ENSP ID: ENSP00000416488
MMLPYPSALGDQYWEEILLPKNGENVETMKKLTQNHKAKGLPSNDTDCPQKKEGKAQIVVPVTFRDVTVIFTEAEWKRLSPEQRNLYKEVMLENYRNLLSL

SEQ ID NO: 99769 - protein, 640 aa, Homo sapiens
  Payload ID: 19889
  Gene Name: zinc finger protein 343
  ENSP ID: ENSP00000482819
MMLPYPSALGDQYWEEILLPKNGENVETMKKLTQNHKAKGLPSNDTDCPQKKEGKAQIVVPVTFRDVTVIFTEAEWKRLSPEQRNLYKEVMLENYRNLLSLDGVSLLLPRLECNRAISAHHNLCLPGSSNSPATASRVVGITAEPKPEIYTCSSCLLAFSCQQFLSQHVLQIFLGLCAENHFHPGNSSPGHWKQQGQQYSHVSCWFENAEGQERGGGSKPWSARTEERETSRAFPSPLQRQSASPRKGNMVVETEPSSAQRPNPVQLDKGLKELETLRFGAINCREYEPDHNLESNFITNPRTLLGKKPYICSDCGRSFKDRSTLIRHHRIHSMEKPYVCSECGRGFSQKSNLSRHQRTHSEEKPYLCRECGQSFRSKSILNRHQWTHSEEKPYVCSECGRGFSEKSSFIRHQRTHSGEKPYVCLECGRSFCDKSTLRKHQRIHSGEKPYVCRECGRGFSQNSDLIKHQRTHLDEKPYVCRECGRGFCDKSTLIIHERTHSGEKPYVCGECGRGFSRKSLLLVHQRTHSGEKHYVCRECRRGFSQKSNLIRHQRTHSNEKPYICRECGRGFCDKSTLIVHERTHSGEKPYVCSECGRGFSRKSLLLVHQRTHSGEKHYVCRECGRGFSHKSNLIRHQRTH

SEQ ID NO: 99770 - protein, 509 aa, Homo sapiens
  Payload ID: 19889
  Gene Name: zinc finger protein 343
  Uniprot ID: Q6P1L6
  ENSP ID: ENSP00000483851
MLENYRNLLSLAEPKPEIYTCSSCLLAFSCQQFLSQHVLQIFLGLCAENHFHPGNSSPGHWKQQGQQYSHVSCWFENAEGQERGGGSKPWSARTEERETSRAFPSPLQRQSASPRKGNMVVETEPSSAQRPNPVQLDKGLKELETLRFGAINCREYEPDHNLESNFITNPRTLLGKKPYICSDCGRSFKDRSTLIRHHRIHSMEKPYVCSECGRGFSQKSNLSRHQRTHSEEKPYLCRECGQSFRSKSILNRHQWTHSEEKPYVCSECGRGFSEKSSFIRHQRTHSGEKPYVCLECGRSFCDKSTLRKHQRIHSGEKPYVCRECGRGFSQNSDLIKHQRTHLDEKPYVCRECGRGFCDKSTLIIHERTHSGEKPYVCGECGRGFSRKSLLLVHQRTHSGEKHYVCRECRRGFSQKSNLIRHQRTHSNEKPYICRECGRGFCDKSTLIVHERTHSGEKPYVCSECGRGFSRKSLLLVHQRTHSGEKHYVCRECGRGFSHKSNLIRHQRTH

SEQ ID NO: 99771 - protein, 113 aa, Homo sapiens
  Payload ID: 19890
  Gene Name: zinc finger protein 345
  ENSP ID: ENSP00000331120
MENLTKHSIECSSFRGDWECKNQFERKQGSQEGHFSEMIFTPEDMPTFSIQHQRIHTDEKLLECKECGKDFSFVSVLVRHQRIHTGEKPYECKECGKAFGSGANLAYHQRIHT

SEQ ID NO: 99772 - protein, 488 aa, Homo sapiens
  Payload ID: 19890
  Gene Name: zinc finger protein 345
  Uniprot ID: Q14585
  ENSP ID: ENSP00000431202
MENLTKHSIECSSFRGDWECKNQFERKQGSQEGHFSEMIFTPEDMPTFSIQHQRIHTDEKLLECKECGKDFSFVSVLVRHQRIHTGEKPYECKECGKAFGSGANLAYHQRIHTGEKPFECKECGKAFGSGSNLTHHQRIHTGEKPYECKECGKAFSFGSGLIRHQIIHSGEKPYECKECGKSFSFESALIRHHRIHTGEKPYECIDCGKAFGSGSNLTQHRRIHTGEKPYECKACGMAFSSGSALTRHQRIHTGEKPYICNECGKAFSFGSALTRHQRIHTGEKPYVCKECGKAFNSGSDLTQHQRIHTGEKPYECKECEKAFRSGSKLIQHQRMHTGEKPYECKECGKTFSSGSDLTQHHRIHTGEKPYECKECGKAFGSGSKLIQHQLIHTGERPYECKECGKSFSSGSALNRHQRIHTGEKPYECKECGKAFYSGSSLTQHQRIHTGEKLYECKNCGKAYGRDSEFQQHKKSHNGKKLCELETIN

SEQ ID NO: 99773 - protein, 488 aa, Homo sapiens; identical to SEQ ID NO: 99772
  Payload ID: 19890
  Gene Name: zinc finger protein 345
  Uniprot ID: Q14585
  ENSP ID: ENSP00000431216

SEQ ID NO: 99774 - protein, 74 aa, Homo sapiens
  Payload ID: 19890
  Gene Name: zinc finger protein 345
  ENSP ID: ENSP00000431289
MENLTKHSIECSSFRGDWECKNQFERKQGSQEGHFSEMIFTPEDMPTFSIQHQRIHTDEKLLECKECGKDFSFV

SEQ ID NO: 99775 - protein, 488 aa, Homo sapiens; identical to SEQ ID NO: 99772
  Payload ID: 19890
  Gene Name: zinc finger protein 345
  Uniprot ID: Q14585
  ENSP ID: ENSP00000465431

SEQ ID NO: 99776 - protein, 184 aa, Homo sapiens
  Payload ID: 19890
  Gene Name: zinc finger protein 345
  ENSP ID: ENSP00000465851
MENLTKHSIECSSFRGDWECKNQFERKQGSQEGHFSEMIFTPEDMPTFSIQHQRIHTDEKLLECKECGKDFSFVSVLVRHQRIHTGEKPYECKECGKAFGSGANLAYHQRIHTGEKPFECKECGKAFGSGSNLTHHQRIHTGEKPYECKECGKAFSFGSGLIRHQIIHSGEKPYECKECGKSFS

SEQ ID NO: 99777 - protein, 94 aa, Homo sapiens
  Payload ID: 19890
  Gene Name: zinc finger protein 345
  ENSP ID: ENSP00000466374
MENLTKHSIECSSFRGDWECKNQFERKQGSQEGHFSEMIFTPEDMPTFSIQHQRIHTDEKLLECKECGKDFSFVSVLVRHQRIHTGEKPYECKE

SEQ ID NO: 99778 - protein, 75 aa, Homo sapiens
  Payload ID: 19890
  Gene Name: zinc finger protein 345
  ENSP ID: ENSP00000467611
MENLTKHSIECSSFRDPPQALPETQLCVSSSYSLWSSDCKAISMPRQGLSWRAMEEDRPAGCRFCSRACTMREIF

SEQ ID NO: 99779 - protein, 53 aa, Homo sapiens
  Payload ID: 19890
  Gene Name: zinc finger protein 345
  ENSP ID: ENSP00000468757
MENLTKHSIECSSFRDPPQALPETQLCVSSSYSLWSSDCKAISMPRQGLSWRA

SEQ ID NO: 99780 - protein, 488 aa, Homo sapiens; identical to SEQ ID NO: 99772
  Payload ID: 19890
  Gene Name: zinc finger protein 345
  Uniprot ID: Q14585
  ENSP ID: ENSP00000477522

SEQ ID NO: 99781 - protein, 488 aa, Homo sapiens; identical to SEQ ID NO: 99772
  Payload ID: 19890
  Gene Name: zinc finger protein 345
  Uniprot ID: Q14585
  ENSP ID: ENSP00000482400

SEQ ID NO: 99782 - protein, 294 aa, Homo sapiens
  Payload ID: 19891
  Gene Name: zinc finger protein 346
  Uniprot ID: Q9UL40
  ENSP ID: ENSP00000350869
MEYPAPATVQAADGGAAGPYSSSELLEGQEPDGVRFDRERARRLWEAVSGAQPVGREEVEHMIQKNQCLFTNTQCKVCCALLISESQKLAHYQSKKHANKVKRYLAIHGMETLKGETKKLDSDQKSSRSKDKNQCCPICNMTFSSPVVAQSHYLGKTHAKNLKLKQQSTKVEALHQNREMIDPDKFCSLCHATFNDPVMAQQHYVGKKHRKQETKLKLMARYGRLADPAVTDFPAGKGYPCKTCKIVLNSIEQYQAHVSGFKHKNQSPKTVASSLGQIPMQRQPIQKDSTTLED

SEQ ID NO: 99783 - protein, 118 aa, Homo sapiens
  Payload ID: 19891
  Gene Name: zinc finger protein 346
  ENSP ID: ENSP00000421089
MEYPAPATVQAADGGAAGPYSSSELLEGQEPDGVRFDRERARRLWEAVSGAQPVGREEAGKGYPCKTCKIVLNSIEQYQAHVSGFKHKNQSPKTVASSLGQIPMQRQPIQKDSTTLED

SEQ ID NO: 99784 - protein, 262 aa, Homo sapiens
  Payload ID: 19891
  Gene Name: zinc finger protein 346
  Uniprot ID: Q9UL40
  ENSP ID: ENSP00000421212
MEYPAPATVQAADGGAAGPYSSSELLEGQEPDGVRFDRERARRLWEAVSGAQPVGREEVEHMIQKNQCLFTNTQCKVCCALLISESQKLAHYQSSRSKDKNQCCPICNMTFSSPVVAQSHYLGKTHAKNLKLKQQSTKVEALHQNREMIDPDKFCSLCHATFNDPVMAQQHYVGKKHRKQETKLKLMARYGRLADPAVTDFPAGKGYPCKTCKIVLNSIEQYQAHVSGFKHKNQSPKTVASSLGQIPMQRQPIQKDSTTLED

SEQ ID NO: 99785 - protein, 131 aa, Homo sapiens
  Payload ID: 19891
  Gene Name: zinc finger protein 346
  ENSP ID: ENSP00000421388
MEYPAPATVQAADGGAAGPYSSSELLEGQEPDGVRFDRERARRLWEAVSGAQPVGREEVEHMIQKNQCLFTNTQCKVCCALLISESQKLAHYQSKKHANKVKRYLAIHGMETLKGETKKLDSDQPCTRIER

SEQ ID NO: 99786 - protein, 196 aa, Homo sapiens
  Payload ID: 19891
  Gene Name: zinc finger protein 346
  ENSP ID: ENSP00000423515
MEYPAPATVQAADGGAAGPYSSSELLEGQEPDGVRFDRERARRLWEAVSGAQPVGREEALSKRLTNPFLVASTLALHQNREMIDPDKFCSLCHATFNDPVMAQQHYVGKKHRKQETKLKLMARYGRLADPAVTDFPAGKGYPCKTCKIVLNSIEQYQAHVSGFKHKNQSPKTVASSLGQIPMQRQPIQKDSTTLED

SEQ ID NO: 99787 - protein, 135 aa, Homo sapiens
  Payload ID: 19891
  Gene Name: zinc finger protein 346
  ENSP ID: ENSP00000423690
MEYPAPATVQAADGGAAGPYSSSELLEGQEPDGVRFDRERARRLWEAVSGAQPVGREEVEHMIQKNQCLFTNTQCKVCCALLISESQKLAHYQSKKHANKVKRYLAIHGMETLKGETKKLDSDQLERATPAKHVR

SEQ ID NO: 99788 - protein, 319 aa, Homo sapiens
  Payload ID: 19891
  Gene Name: zinc finger protein 346
  Uniprot ID: Q9UL40
  ENSP ID: ENSP00000424495
MEYPAPATVQAADGGAAGPYSSSELLEGQEPDGVRFDRERARRLWEAVSGAQPVGREEAQFFPHSRTVIPILVLSETYSLCHPVEHMIQKNQCLFTNTQCKVCCALLISESQKLAHYQSKKHANKVKRYLAIHGMETLKGETKKLDSDQKSSRSKDKNQCCPICNMTFSSPVVAQSHYLGKTHAKNLKLKQQSTKVEALHQNREMIDPDKFCSLCHATFNDPVMAQQHYVGKKHRKQETKLKLMARYGRLADPAVTDFPAGKGYPCKTCKIVLNSIEQYQAHVSGFKHKNQSPKTVASSLGQIPMQRQPIQKDSTTLED

SEQ ID NO: 99789 - protein, 310 aa, Homo sapiens
  Payload ID: 19891
  Gene Name: zinc finger protein 346
  ENSP ID: ENSP00000425725
MEYPAPATVQAADGGAAGPYSSSELLEGQEPDGVRFDRERARRLWEAVSGAQPVGREEVEHMIQKNQCLFTNTQCKVCCALLISESQKLAHYQSKKHANKVKRYLAIHGMETLKGETKKLDSDQKSSRSKDKNQCCPICNMTFSSPVVAQSHYLGKTHAKNLKLKQQSTKVEALSKRLTNPFLVASTLALHQNREMIDPDKFCSLCHATFNDPVMAQQHYVGKKHRKQETKLKLMARYGRLADPAVTDFPAGKGYPCKTCKIVLNSIEQYQAHVSGFKHKNQSPKTVASSLGQIPMQRQPIQKDSTTLED

SEQ ID NO: 99790 - protein, 839 aa, Homo sapiens
  Payload ID: 19892
  Gene Name: zinc finger protein 347
  Uniprot ID: Q96SE7
  ENSP ID: ENSP00000334146
MALTQGQVTFRDVAIEFSQEEWTCLDPAQRTLYRDVMLENYRNLASLGISCFDLSIISMLEQGKEPFTLESQVQIAGNPDGWEWIKAVITALSSEFVMKDLLHKGKSNTGEVFQTVMLERQESQDIEGCSFREVQKNTHGLEYQCRDAEGNYKGVLLTQEGNLTHGRDEHDKRDARNKLIKNQLGLSLQSHLPELQLFQYEGKIYECNQVEKSFNNNSSVSPPQQMPYNVKTHISKKYLKDFISSLLLTQGQKANNWGSPYKSNGCGMVFPQNSHLASHQRSHTKEKPYKCYECGKAFRTRSNLTTHQVIHTGEKRYKCNECGKVFSRNSQLSQHQKIHTGEKPYKCNECGKVFTQNSHLVRHRGIHTGEKPYKCNECGKAFRARSSLAIHQATHSGEKPYKCNECGKVFTQNSHLTNHWRIHTGEKPYKCNECGKAFGVRSSLAIHLVIHTGEKPYKCHECGKVFRRNSHLARHQLIHTGEKPYKCNECGKAFRAHSNLTTHQVIHTGEKPYKCNECGKVFTQNSHLANHQRIHTGVKPYMCNECGKAFSVYSSLTTHQVIHTGEKPYKCNECGKVFTQNSHLARHRGIHTGEKPYKCNECGKVFRHNSYLSRHQRIHTGEKPYKYNEYGKAFSEHSNLTTHQVIHTGEKPYKCNECGKVFTQNSHLARHRRVHTGGKPYQCNECGKAFSQTSKLARHQRVHTGEKPYECNQCGKAFSVRSSLTTHQAIHTGKKPYKCNECGKVFTQNSHLARHRGIHTGEKPYKCNECGKAFSQTSKLARHQRIHTGEKPYECGKPFSICSSLTTHQTIHTGGKPYKCNVWKVLKSEFKPCKPSQNS

SEQ ID NO: 99791 - protein, 840 aa, Homo sapiens
  Payload ID: 19892
  Gene Name: zinc finger protein 347
  Uniprot ID: Q96SE7
  ENSP ID: ENSP00000405218
MALTQGQVTFRDVAIEFSQEEWTCLDPAQRTLYRDVMLENYRNLASLAGISCFDLSIISMLEQGKEPFTLESQVQIAGNPDGWEWIKAVITALSSEFVMKDLLHKGKSNTGEVFQTVMLERQESQDIEGCSFREVQKNTHGLEYQCRDAEGNYKGVLLTQEGNLTHGRDEHDKRDARNKLIKNQLGLSLQSHLPELQLFQYEGKIYECNQVEKSFNNNSSVSPPQQMPYNVKTHISKKYLKDFISSLLLTQGQKANNWGSPYKSNGCGMVFPQNSHLASHQRSHTKEKPYKCYECGKAFRTRSNLTTHQVIHTGEKRYKCNECGKVFSRNSQLSQHQKIHTGEKPYKCNECGKVFTQNSHLVRHRGIHTGEKPYKCNECGKAFRARSSLAIHQATHSGEKPYKCNECGKVFTQNSHLTNHWRIHTGEKPYKCNECGKAFGVRSSLAIHLVIHTGEKPYKCHECGKVFRRNSHLARHQLIHTGEKPYKCNECGKAFRAHSNLTTHQVIHTGEKPYKCNECGKVFTQNSHLANHQRIHTGVKPYMCNECGKAFSVYSSLTTHQVIHTGEKPYKCNECGKVFTQNSHLARHRGIHTGEKPYKCNECGKVFRHNSYLSRHQRIHTGEKPYKYNEYGKAFSEHSNLTTHQVIHTGEKPYKCNECGKVFTQNSHLARHRRVHTGGKPYQCNECGKAFSQTSKLARHQRVHTGEKPYECNQCGKAFSVRSSLTTHQAIHTGKKPYKCNECGKVFTQNSHLARHRGIHTGEKPYKCNECGKAFSQTSKLARHQRIHTGEKPYECGKPFSICSSLTTHQTIHTGGKPYKCNVWKVLKSEFKPCKPSQNS

SEQ ID NO: 99792 - protein, 125 aa, Homo sapiens
  Payload ID: 19892
  Gene Name: zinc finger protein 347
  ENSP ID: ENSP00000469338
MLEQGKEPFTLESQVQIAGNPDGWEWIKAVITALSSEFVMKDLLHKGKSNTGEVFQTVMLERQESQDIEGCSFREVQKNTHGLEYQCRDAEGNYKGVLLTQEGNLTHGRDEHDKRDARNKLIKNQ

SEQ ID NO: 99793 - protein, 102 aa, Homo sapiens
  Payload ID: 19892
  Gene Name: zinc finger protein 347
  ENSP ID: ENSP00000470499
MLENYRNLASLGISCFDLSIISMLEQGKEPFTLESQVQIAGNPDGWEWIKAVITALSSEFVMKDLLHKGKSNTGEVFQTVMLERQESQDIEGCSFREVQKNT

SEQ ID NO: 99794 - protein, 34 aa, Homo sapiens
  Payload ID: 19892
  Gene Name: zinc finger protein 347
  ENSP ID: ENSP00000470590
MLEQGKEPFTLESQVQIAGNPDGWEWIKAVITAS

SEQ ID NO: 99795 - protein, 840 aa, Homo sapiens; identical to SEQ ID NO: 99791
  Payload ID: 19892
  Gene Name: zinc finger protein 347
  Uniprot ID: Q96SE7
  ENSP ID: ENSP00000471712

SEQ ID NO: 99796 - protein, 34 aa, Homo sapiens
  Payload ID: 19892
  Gene Name: zinc finger protein 347
  ENSP ID: ENSP00000471825
MALTQGQVTFRDVAIEFSQEEWTCLDPAQRTLYR

SEQ ID NO: 99797 - protein, 103 aa, Homo sapiens
  Payload ID: 19893
  Gene Name: zinc finger protein 35
  ENSP ID: ENSP00000296092
MTAELREAMALAPWGPVKVKKEEEEEENFPGQASSQQVHSENIKVWAPVQGLQTGLDGSEEEEKVLKPRTYSYWFQKLRYVRKLKNPSSYQKESRKLILKDLS

SEQ ID NO: 99798 - protein, 527 aa, Homo sapiens
  Payload ID: 19893
  Gene Name: zinc finger protein 35
  Uniprot ID: P13682
  ENSP ID: ENSP00000379368
MTAELREAMALAPWGPVKVKKEEEEEENFPGQASSQQVHSENIKVWAPVQGLQTGLDGSEEEEKGQNISWDMAVVLKATQEAPAASTLGSYSLPGTLAKSEILETHGTMNFLGAETKNLQLLVPKTEICEEAEKPLIISERIQKADPQGPELGEACEKGNMLKRQRIKREKKDFRQVIVNDCHLPESFKEEENQKCKKSGGKYSLNSGAVKNPKTQLGQKPFTCSVCGKGFSQSANLVVHQRIHTGEKPFECHECGKAFIQSANLVVHQRIHTGQKPYVCSKCGKAFTQSSNLTVHQKIHSLEKTFKCNECEKAFSYSSQLARHQKVHITEKCYECNECGKTFTRSSNLIVHQRIHTGEKPFACNDCGKAFTQSANLIVHQRSHTGEKPYECKECGKAFSCFSHLIVHQRIHTAEKPYDCSECGKAFSQLSCLIVHQRIHSGDLPYVCNECGKAFTCSSYLLIHQRIHNGEKPYTCNECGKAFRQRSSLTVHQRTHTGEKPYECEKCGAAFISNSHLMRHHRTHLVE

SEQ ID NO: 99799 - protein, 103 aa, Homo sapiens; identical to SEQ ID NO: 99797
  Payload ID: 19893
  Gene Name: zinc finger protein 35
  ENSP ID: ENSP00000391573

SEQ ID NO: 99800 - protein, 103 aa, Homo sapiens; identical to SEQ ID NO: 99797
  Payload ID: 19893
  Gene Name: zinc finger protein 35
  ENSP ID: ENSP00000401311

SEQ ID NO: 99801 - protein, 112 aa, Homo sapiens
  Payload ID: 19893
  Gene Name: zinc finger protein 35
  ENSP ID: ENSP00000404336
MTAELREAMALAPWGPVKVKKEEEEEENFPGQASSQQVHSENIKVWAPVQGLQTGLDGSEEEEKGQNISWDMAVVLKATQEAPAASTLGSYSLPGTLAKSEILETHGTMNFL

SEQ ID NO: 99802 - protein, 134 aa, Homo sapiens
  Payload ID: 19893
  Gene Name: zinc finger protein 35
  ENSP ID: ENSP00000404354
MTAELREAMALAPWGPVKVKKEEEEEENFPGQASSQQVHSENIKVWAPVQGLQTGLDGSEEEEKGQNISWDMAVVLKATQEAPAASTLGSYSLPGTLAKSEILETHGTMNFLGAETKNLQLLVPKTEICEEAEK

SEQ ID NO: 99803 - protein, 103 aa, Homo sapiens; identical to SEQ ID NO: 99797
  Payload ID: 19893
  Gene Name: zinc finger protein 35
  ENSP ID: ENSP00000485695

SEQ ID NO: 99804 - protein, 527 aa, Homo sapiens; identical to SEQ ID NO: 99798
  Payload ID: 19893
  Gene Name: zinc finger protein 35
  Uniprot ID: P13682
  ENSP ID: ENSP00000486354

SEQ ID NO: 99805 - protein, 103 aa, Homo sapiens; identical to SEQ ID NO: 99797
  Payload ID: 19893
  Gene Name: zinc finger protein 35
  ENSP ID: ENSP00000486615

SEQ ID NO: 99806 - protein, 134 aa, Homo sapiens; identical to SEQ ID NO: 99802
  Payload ID: 19893
  Gene Name: zinc finger protein 35
  ENSP ID: ENSP00000486794

SEQ ID NO: 99807 - protein, 112 aa, Homo sapiens; identical to SEQ ID NO: 99801
  Payload ID: 19893
  Gene Name: zinc finger protein 35
  ENSP ID: ENSP00000487042

SEQ ID NO: 99808 - protein, 103 aa, Homo sapiens; identical to SEQ ID NO: 99797
  Payload ID: 19893
  Gene Name: zinc finger protein 35
  ENSP ID: ENSP00000487287

SEQ ID NO: 99809 - protein, 532 aa, Homo sapiens
  Payload ID: 19894
  Gene Name: zinc finger protein 350
  Uniprot ID: Q9GZX5
  ENSP ID: ENSP00000243644
MIQAQESITLEDVAVDFTWEEWQLLGAAQKDLYRDVMLENYSNLVAVGYQASKPDALFKLEQGEQLWTIEDGIHSGACSDIWKVDHVLERLQSESLVNRRKPCHEHDAFENIVHCSKSQFLLGQNHDIFDLRGKSLKSNLTLVNQSKGYEIKNSVEFTGNGDSFLHANHERLHTAIKFPASQKLISTKSQFISPKHQKTRKLEKHHVCSECGKAFIKKSWLTDHQVMHTGEKPHRCSLCEKAFSRKFMLTEHQRTHTGEKPYECPECGKAFLKKSRLNIHQKTHTGEKPYICSECGKGFIQKGNLIVHQRIHTGEKPYICNECGKGFIQKTCLIAHQRFHTGKTPFVCSECGKSCSQKSGLIKHQRIHTGEKPFECSECGKAFSTKQKLIVHQRTHTGERPYGCNECGKAFAYMSCLVKHKRIHTREKQEAAKVENPPAERHSSLHTSDVMQEKNSANGATTQVPSVAPQTSLNISGLLANRNVVLVGQPVVRCAASGDNRGFAQDRNLVNAVNVVVPSVINYVLFYVTENP

SEQ ID NO: 99810 - protein, 67 aa, Homo sapiens
  Payload ID: 19894
  Gene Name: zinc finger protein 350
  ENSP ID: ENSP00000469594
MIQAQESITLEDVAVDFTWEEWQLLGAAQKDLYRDVMLENYSNLVAVGYQASKPDALFKLEQGEQLW

SEQ ID NO: 99811 - protein, 62 aa, Homo sapiens
  Payload ID: 19894
  Gene Name: zinc finger protein 350
  ENSP ID: ENSP00000470066
MIQAQESITLEDVAVDFTWEEWQLLGAAQKDLYRDVMLENYSNLVAVGYQASKPDALFKLEQ

SEQ ID NO: 99812 - protein, 163 aa, Homo sapiens
  Payload ID: 19894
  Gene Name: zinc finger protein 350
  ENSP ID: ENSP00000470930
MLENYSNLVAVGYQASKPDALFKLEQGEQLWTIEDGIHSGACSDIWKVDHVLERLQSESLVNRRKPCHEHDAFENIVHCSKSQFLLGQNHDIFDLRGKSLKSNLTLVNQSKGYEIKNSVEFTGNGDSFLHANHERLHTAIKFPASQKLISTKSQFISPKHQKT

SEQ ID NO: 99813 - protein, 52 aa, Homo sapiens
  Payload ID: 19894
  Gene Name: zinc finger protein 350
  ENSP ID: ENSP00000472104
MIQAQESITLEDVAVDFTWEEWQLLGAAQKDLYRDVMLENYSNLVAVGYQAS

SEQ ID NO: 99814 - protein, 605 aa, Homo sapiens
  Payload ID: 19895
  Gene Name: zinc finger protein 354A
  Uniprot ID: O60765
  ENSP ID: ENSP00000337122
MAAGQREARPQVSLTFEDVAVLFTRDEWRKLAPSQRNLYRDVMLENYRNLVSLGLPFTKPKVISLLQQGEDPWEVEKDGSGVSSLGSKSSHKTTKSTQTQDSSFQGLILKRSNRNVPWDLKLEKPYIYEGRLEKKQDKKGSFQIVSATHKKIPTIERSHKNTELSQNFSPKSVLIRQQILPREKTPPKCEIQGNSLKQNSQLLNQPKITADKRYKCSLCEKTFINTSSLRKHEKNHSGEKLFKCKECSKAFSQSSALIQHQITHTGEKPYICKECGKAFTLSTSLYKHLRTHTVEKSYRCKECGKSFSRRSGLFIHQKIHAEENPCKYNPGRKASSCSTSLSGCQRIHSRKKSYLCNECGNTFKSSSSLRYHQRIHTGEKPFKCSECGRAFSQSASLIQHERIHTGEKPYRCNECGKGFTSISRLNRHRIIHTGEKFYNCNECGKALSSHSTLIIHERIHTGEKPCKCKVCGKAFRQSSALIQHQRMHTGERPYKCNECGKTFRCNSSLSNHQRIHTGEKPYRCEECGISFGQSSALIQHRRIHTGEKPFKCNTCGKTFRQSSSRIAHQRIHTGEKPYECNTCGKLFNHRSSLTNHYKIHIEEDP

SEQ ID NO: 99815 - protein, 66 aa, Homo sapiens
  Payload ID: 19895
  Gene Name: zinc finger protein 354A
  ENSP ID: ENSP00000428752
MAAGQREARPQVSLTFEDVAVLFTRDEWRKLAPSQRNLYRDVMLENYRNLVSLGPYINRQWSEFGP

SEQ ID NO: 99816 - protein, 135 aa, Homo sapiens
  Payload ID: 19895
  Gene Name: zinc finger protein 354A
  ENSP ID: ENSP00000429675
MAAGQREARPQVSLTFEDVAVLFTRDEWRKLAPSQRNLYRDVMLENYRNLVSLGLPFTKPKVISLLQQGEDPWEVEKDGSGVSSLGSKSSHKTTKSTQTQDSSFQGLILKRSNRNVPWDLKLEKPYIYEGRLEKK

SEQ ID NO: 99817 - protein, 612 aa, Homo sapiens
  Payload ID: 19896
  Gene Name: zinc finger protein 354B
  Uniprot ID: Q96LW1
  ENSP ID: ENSP00000327143
MAAGQREARPQVSLTFEDVAVLFTWDEWRKLAPSQRNLYRDVMLENYRNLVSLGLSFTKPKVISLLQQGEDPWEVEKDSSGVSSLGCKSTPKMTKSTQTQDSFQEQIRKRLKRDEPWNFISERSCIYEEKLKKQQDKNENLQIISVAHTKILTVDRSHKNVEFGQNFYLKSVFIKQQRFAKEKTPSKCEIQRNSFKQNSNLLNQSKIKTAEKRYKCSTCEKAFIHNSSLRKHQKNHTGEKLFKCKECLKAFSQSSALIQHQRTHTGEKPYICKECGKAFSHSASLCKHLRTHTVEKCYRCKECGKSFSRRSGLFIHQKIHAQENPHKYNPGRKASSYSTSLSGSQKIHLRKKSYLCNECGNTFKSSSSLRYHQRIHTGEKPFKCSECGRAFSQSASLIQHERIHTGEKPYRCNECGKGFTSISRLNRHRIIHTGEKLYNCNECGKALSSHSTLIIHERIHTGEKPCKCKVCGKAFRQSSALIQHQRMHTGERPYKCNECDKTFRCNSSLSNHQRIHTGEKPYRCLECGMSFGQSAALIQHQRIHTGEKPFKCNTCGKTFRQSSSLIAHQRIHTGEKPYECNACGKLFSQRSSLTNHYKIHIEEDSLKADLHV

SEQ ID NO: 99818 - protein, 134 aa, Homo sapiens
  Payload ID: 19896
  Gene Name: zinc finger protein 354B
  ENSP ID: ENSP00000429827
MAAGQREARPQVSLTFEDVAVLFTWDEWRKLAPSQRNLYRDVMLENYRNLVSLGLSFTKPKVISLLQQGEDPWEVEKDSSGVSSLGCKSTPKMTKSTQTQDSFQEQIRKRLKRDEPWNFISERSCIYEEKLKKQ

SEQ ID NO: 99819 - protein, 554 aa, Homo sapiens [sequence omitted]

SEQ ID NO: 99820 - protein, 568 aa, Homo sapiens
  Payload ID: 19898
  Gene Name: zinc finger protein 358
  Uniprot ID: Q9NW07
  ENSP ID: ENSP00000377873
MRRSVLVRNPGHKGLRPVYEELDSDSEDLDPNPEDLDPVSEDPEPDPEDLNTVPEDVDPSYEDLEPVSEDLDPDAEAPGSEPQDPDPMSSSFDLDPDVIGPVPLILDPNSDTLSPGDPKVDPISSGLTATPQVLATSPAVLPAPASPPRPFSCPDCGRAFRRSSGLSQHRRTHSGEKPYRCPDCGKSFSHGATLAQHRGIHTGARPYQCAACGKAFGWRSTLLKHRSSHSGEKPHHCPVCGKAFGHGSLLAQHLRTHGGPRPHKCPVCAKGFGQGSALLKHLRTHTGERPYPCPQCGKAFGQSSALLQHQRTHTAERPYRCPHCGKAFGQSSNLQHHLRIHTGERPYACPHCSKAFGQSSALLQHLHVHSGERPYRCQLCGKAFGQASSLTKHKRVHEGAAAAAAAAAAAAAAAAAGLGLGPGLSPASMMRPGQVSLLGPDAVSVLGSGLGLSPGTSSGRNPDPGSGPGTLPDPSSKPLPGSRSTPSPTPVESSDPKAGHDAGPDLVPSPDLDPVPSPDPDPVPSPDPNPVSCPDPCSPTRGTVSPALPTGESPEWVQEQGALLGPDG

SEQ ID NO: 99821 - protein, 568 aa, Homo sapiens; identical to SEQ ID NO: 99820
  Payload ID: 19898
  Gene Name: zinc finger protein 358
  Uniprot ID: Q9NW07
  ENSP ID: ENSP00000472305

SEQ ID NO: 99822 - protein, 169 aa, Homo sapiens
  Payload ID: 19898
  Gene Name: zinc finger protein 358
  ENSP ID: ENSP00000472777
MRRSVLVRNPGHKGLRPVYEELDSDSEDLDPNPEDLDPVSEDPEPDPEDLNTVPEDVDPSYEDLEPVSEDLDPDAEAPGSEPQDPDPMSSSFDLDPDVIGPVPLILDPNSDTLSPGDPKVDPISSGLTATPQVLATSPAVLPAPASPPRPFSCPDCGRAFRRSSGLSQH

SEQ ID NO: 99823 - protein, 420 aa, Homo sapiens
  Payload ID: 19899
  Gene Name: zinc finger protein 362
  Uniprot ID: Q5T0B9
  ENSP ID: ENSP00000362527
MSRSSPSGKGHSRMAEPRFNNPYFWPPPPTMPSQLDNLVLINKIKEQLMAEKIRPPHLPPTSASSQQPLLVPPAPAESSQAVMSLPKLQQVPGLHPQAVPQPDVALHARPATSTVTGLGLSTRTPSVSTSESSAGAGTGTGTSTPSTPTTTSQSRLIASSPTLISGITSPPLLDSIKTIQGHGLLGPPKSERGRKKIKAENPGGPPVLVVPYPILASGETAKEGKTYRCKVCPLTFFTKSEMQIHSKSHTEAKPHKCPHCSKSFANASYLAQHLRIHLGVKPYHCSYCDKSFRQLSHLQQHTRIHTGDRPYKCPHPGCEKAFTQLSNLQSHQRQHNKDKPYKCPNCYRAYSDSASLQIHLSAHAIKHAKAYCCSMCGRAYTSETYLMKHMSKHTVVEHLVSHHSPQRTESPGIPVRISLI

SEQ ID NO: 99824 - protein, 200 aa, Homo sapiens
  Payload ID: 19899
  Gene Name: zinc finger protein 362
  ENSP ID: ENSP00000438354
MAEPRFNNPYFWPPPPTMPSQLDNLVLINKIKEQLMAEKIRPPHLPPTSASSQQPLLVPPAPAESSQAVMSLPKLQQVPGLHPQAVPQPDVALHARPATSTVTGLGLSTRTPSVSTSESSAGAGTGTGTSTPSTPTTTSQSRLIASSPTLISGITSPPLLDSIKTIQGHGLLGPPKSERGRKKIKAENPGGPPVLVVPYP

SEQ ID NO: 99825 - protein, 420 aa, Homo sapiens; identical to SEQ ID NO: 99823
  Payload ID: 19899
  Gene Name: zinc finger protein 362
  Uniprot ID: Q5T0B9
  ENSP ID: ENSP00000446335

SEQ ID NO: 99826 - protein, 65 aa, Homo sapiens
  Payload ID: 19900
  Gene Name: zinc finger protein 365
  ENSP ID: ENSP00000345300
MSALGQITITVSRCWNTERNQTDKNPCLHGAYLQLRETVKNKDLAKFGCYFPFVEGLFITMRRTS

SEQ ID NO: 99827 - protein, 65 aa, Homo sapiens; identical to SEQ ID NO: 99826
  Payload ID: 19900
  Gene Name: zinc finger protein 365
  ENSP ID: ENSP00000362889

SEQ ID NO: 99828 - protein, 68 aa, Homo sapiens
  Payload ID: 19900
  Gene Name: zinc finger protein 365
  ENSP ID: ENSP00000378670
MSALGQITITVSRESVSTSQSRNISLLTLGQLQNCVIGKLTIIDLLTEHLLGVRHGVICFPWGLPSSS

SEQ ID NO: 99829 - protein, 216 aa, Homo sapiens
  Payload ID: 19900
  Gene Name: zinc finger protein 365
  Uniprot ID: Q70YC4
  ENSP ID: ENSP00000378672
MSALGQITITVSRCWNTERNQTDKNPCLHGAYLQLRETVKNKSTHLKKPLMKQAPPWKDHLTFQPLHPAERKTQVWRWQSGNSSDLETTSSASPWPTGSNRDVVLNTLAESCCGLSELITAPPYAGVSIQGFSQIWVLFPFCGGTFHHNEKDVLGLQDFERESVSTSQSRNISLLTLGQLQNCVIGKLTIIDLLTEHLLGVRHGVICFPWGLPSSS

SEQ ID NO: 99830 - protein, 407 aa, Homo sapiens
  Payload ID: 19900
  Gene Name: zinc finger protein 365
  Uniprot ID: Q70YC5
  ENSP ID: ENSP00000378674
MQQKAFEESRYPWQESFENVAVCLPLRCPRCGDHTRFRSLSSLRAHLEFSHSYEERTLLTKCSLFPSLKDTDLVTSSELLKPGKLQSSGNVVKQKPSYVNLYSISHEHSKDRKPFEVVAERPVSYVQTYTAMDLHADSLDGTRSGPGLPTSDTKASFEAHVREKFNRMVEAVDRTIEKRIDKLTKELAQKTAELLEVRAAFVQLTQKKQEVQRRERALNRQVDVAVEMIAVLRQRLTESEEELLRKEEEVVTFNHFLEAAAEKEVQGKARLQDFIENLLQRVELAEKQLEYYQSQQASGFVRDLSGHVLTDISSNRKPKCLSRGHPHSVCNHPDLKAHFHPKGRNHLKKAKDDRASMQPAKAIHEQAESSRDLCRPPKKGELLGFGRKGNIRPKMAKKKPTAIVNII

SEQ ID NO: 99831 - protein, 333 aa, Homo sapiens
  Payload ID: 19900
  Gene Name: zinc finger protein 365
  Uniprot ID: Q70YC5
  ENSP ID: ENSP00000378675
MQQKAFEESRYPWQESFENVAVCLPLRCPRCGDHTRFRSLSSLRAHLEFSHSYEERTLLTKCSLFPSLKDTDLVTSSELLKPGKLQSSGNVVKQKPSYVNLYSISHEHSKDRKPFEVVAERPVSYVQTYTAMDLHADSLDGTRSGPGLPTSDTKASFEAHVREKFNRMVEAVDRTIEKRIDKLTKELAQKTAELLEVRAAFVQLTQKKQEVQRRERALNRQVDVAVEMIAVLRQRLTESEEELLRKEEEVVTFNHFLEAAAEKEVQGKARLQDFIENLLQRVELAEKQLEYYQSQQASGFVRDLSGHVSWKGAGEARLVCQNDLELEESAIVE

SEQ ID NO: 99832 - protein, 462 aa, Homo sapiens
  Payload ID: 19900
  Gene Name: zinc finger protein 365
  Uniprot ID: Q70YC5
  ENSP ID: ENSP00000387091
MQQKAFEESRYPWQESFENVAVCLPLRCPRCGDHTRFRSLSSLRAHLEFSHSYEERTLLTKCSLFPSLKDTDLVTSSELLKPGKLQSSGNVVKQKPSYVNLYSISHEHSKDRKPFEVVAERPVSYVQTYTAMDLHADSLDGTRSGPGLPTSDTKASFEAHVREKFNRMVEAVDRTIEKRIDKLTKELAQKTAELLEVRAAFVQLTQKKQEVQRRERALNRQVDVAVEMIAVLRQRLTESEEELLRKEEEVVTFNHFLEAAAEKEVQGKARLQDFIENLLQRVELAEKQLEYYQSQQASGFVRDLSGHVSWKGAGEARLVCQNDLELEIFGHINHHLSGLKDSHCLVFLQAPPVPWIILASFLWILGNPWTSSTATAGFSQIWVLFPFCGGTFHHNEKDVLGLQDFERESVSTSQSRNISLLTLGQLQNCVIGKLTIIDLLTEHLLGVRHGVICFPWGLPSSS

SEQ ID NO: 99833 - protein, 53 aa, Homo sapiens
  Payload ID: 19900
  Gene Name: zinc finger protein 365
  ENSP ID: ENSP00000392791
MQQKAFEESRYPWQESFENVAVCLPLRCPRCGDHTRFRSLSSLRAHLEFSHSY

SEQ ID NO: 99834 - protein, 216 aa, Homo sapiens; identical to SEQ ID NO: 99829
  Payload ID: 19900
  Gene Name: zinc finger protein 365
  Uniprot ID: Q70YC4
  ENSP ID: ENSP00000481372

SEQ ID NO: 99835 - protein, 744 aa, Homo sapiens
  Payload ID: 19901
  Gene Name: zinc finger protein 366
  Uniprot ID: Q8N895
  ENSP ID: ENSP00000313158
MQKEMKMIKDEDVHFDLAVKKTPSFPHCLQPVASRGKAPQRHPFPEALRGPFSQFRYEPPPGDLDGFPGVFEGAGSRKRKSMPTKMPYNHPAEEVTLALHSEENKNHGLPNLPLLFPQPPRPKYDSQMIDLCNVGFQFYRSLEHFGGKPVKQEPIKPSAVWPQPTPTPFLPTPYPYYPKVHPGLMFPFFVPSSSPFPFSRHTFLPKQPPEPLLPRKAEPQESEETKQKVERVDVNVQIDDSYYVDVGGSQKRWQCPTCEKSYTSKYNLVTHILGHSGIKPHACTHCGKLFKQLSHLHTHMLTHQGTRPHKCQVCHKAFTQTSHLKRHMMQHSEVKPHNCRVCGRGFAYPSELKAHEAKHASGRENICVECGLDFPTLAQLKRHLTTHRGPIQYNCSECDKTFQYPSQLQNHMMKHKDIRPYICSECGMEFVQPHHLKQHSLTHKGVKEHKCGICGREFTLLANMKRHVLIHTNIRAYQCHLCYKSFVQKQTLKAHMIVHSDVKPFKCKLCGKEFNRMHNLMGHMHLHSDSKPFKCLYCPSKFTLKGNLTRHMKVKHGVMERGLHSQGLGRGRIALAQTAGVLRSLEQEEPFDLSQKRRAKVPVFQSDGESAQGSHCHEEEEEDNCYEVEPYSPGLAPQSQQLCTPEDLSTKSEHAPEVLEEACKEEKEDASKGEWEKRSKGDLGAEGGQERDCAGRDECLSLRAFQSTRRGPSFSDYLYFKHRDESLKELLERKMEKQAVLLGI

SEQ ID NO: 99836 - protein, 64 aa, Homo sapiens
  Payload ID: 19901
  Gene Name: zinc finger protein 366
  ENSP ID: ENSP00000391333
MQKEMKMIKDEDVHFDLAVKKTPSFPHCLQPVASRGKAPQRHPFPEALRGPFSQFRYEPPPGDL

SEQ ID NO: 99837 - protein, 65 aa, Homo sapiens
  Payload ID: 19901
  Gene Name: zinc finger protein 366
  ENSP ID: ENSP00000423241
MQKEMKMIKDEDVHFDLAVKKTPSFPHCLQPVASRGKAPQRHPFPEALRGPFSQFRPRAPSMTLR

SEQ ID NO: 99838 - protein, 350 aa, Homo sapiens
  Payload ID: 19902
  Gene Name: zinc finger protein 367
  Uniprot ID: Q7RTV3
  ENSP ID: ENSP00000364405
MIRGFEAPMAENPPPPPPPVIFCHDSPKRVLVSVIRTTPIKPTCGGGGEPEPPPPLIPTSPGFSDFMVYPWRWGENAHNVTLSPGAAGAAASAALPAAAAAEHSGLRGRGAPPPAASASAAASGGEDEEEASSPDSGHLKDGIRRGRPRADTVRDLINEGEHSSSRIRCNICNRVFPREKSLQAHKRTHTGERPYLCDYPDCGKAFVQSGQLKTHQRLHTGEKPFVCSENGCLSRFTHANRHCPKHPYARLKREEPTDTLSKHQAADNKAAAEWLARYWEMREQRTPTLKGKLVQKADQEQQDPLEYLQSDEEDDEKRGAQRRLQEQRERLHGALALIELANLTGAPLRQ

SEQ ID NO: 99839 - protein, 561 aa, Homo sapiens
  Payload ID: 19903
  Gene Name: zinc finger protein 37A
  Uniprot ID: P17032
  ENSP ID: ENSP00000329141
MITSQGSVSFRDVTVGFTQEEWQHLDPAQRTLYRDVMLENYSHLVSVGYCIPKPEVILKLEKGEEPWILEEKFPSQSHLELINTSRNYSIMKFNEFNKGGKCFCDEKHEIIHSEEEPSEYNKNGNSFWLNEDLIWHQKIKNWEQSFEYNECGKAFPENSLFLVHKRGYTGQKTCKYTEHGKTCDMSFFITHQQTHPRENHYGNECGENIFEESILLEHQSVYPFSQKLNLTPIQRTHSINNIIEYNECGTFFSEKLVLHLQQRTHTGEKPYECHECGKTFTQKSAHTRHQRTHTGGKPYECHECGKTFYKNSDLIKHQRIHTGERPYGCHECGKSFSEKSTLTQHQRTHTGEKPYECHECGKTFSFKSVLTVHQKTHTGEKPYECYACGKAFLRKSDLIKHQRIHTGEKPYECNECGKSFSEKSTLTKHLRTHTGEKPYECIQCGKFFCYYSGFTEHLRRHTGEKPFGCNECGKTFRQKSALIVHQRTHIRQKPYGCNQCGKSFCVKSKLIAHHRTHTGEKPYECNVCGKSFYVKSKLTVHQRIHLGRNPINVVNEGNYSG

SEQ ID NO: 99840 - protein, 561 aa, Homo sapiens; identical to SEQ ID NO: 99839
  Payload ID: 19903
  Gene Name: zinc finger protein 37A
  Uniprot ID: P17032
  ENSP ID: ENSP00000354377

SEQ ID NO: 99841 - protein, 550 aa, Homo sapiens
  Payload ID: 19904
  Gene Name: zinc finger protein 382
  Uniprot ID: Q96SR6
  ENSP ID: ENSP00000292928
MPLQGSVSFKDVTVDFTQEEWQQLDPAQKALYRDVMLENYCHFVSVGFHMAKPDMIRKLEQGEELWTQRIFPSYSYLEEDGKTEDVLVKFKEYQDRHSRPLIFINHKKLIKERSNIYGKTFTLGKNRISKTILCEYKPDGKVLKNISELVIRNISPIKEKFGDSTGWEKSLLNTKHEKIHPAVNLHKQTERVLSGKQELIQHQKVQAPEQPFDHNECEKSFLMKGMLFTHTRAHRGERTFEYNKDGIAFIEKSSLSVHPSNLMEKKPSAYNKYGKFLCRKPVFIMPQRPQTEEKPFHCPYCGNNFRRKSYLIEHQRIHTGEKPYVCNQCGKAFRQKTALTLHEKTHIEGKPFICIDCGKSFRQKATLTRHHKTHTGEKAYECPQCGSAFRKKSYLIDHQRTHTGEKPYQCNECGKAFIQKTTLTVHQRTHTGEKPYICNECGKSFCQKTTLTLHQRIHTGEKPYICNECGKSFRQKAILTVHHRIHTGEKSNGCPQCGKAFSRKSNLIRHQKTHTGEKPYECKQCGKFFSCKSNLIVHQKTHKVETTGIQ

SEQ ID NO: 99842 - protein, 501 aa, Homo sapiens
  Payload ID: 19904
  Gene Name: zinc finger protein 382
  ENSP ID: ENSP00000389722
MAKPDMIRKLEQGEELWTQRIFPSYSYLEEDGKTEDVLVKFKEYQDRHSRPLIFINHKKLIKERSNIYGKTFTLGKNRISKTILCEYKPDGKVLKNISELVIRNISPIKEKFGDSTGWEKSLLNTKHEKIHPAVNLHKQTERVLSGKQELIQHQKVQAPEQPFDHNECEKSFLMKGMLFTHTRAHRGERTFEYNKDGIAFIEKSSLSVHPSNLMEKKPSAYNKYGKFLCRKPVFIMPQRPQTEEKPFHCPYCGNNFRRKSYLIEHQRIHTGEKPYVCNQCGKAFRQKTALTLHEKTHIEGKPFICIDCGKSFRQKATLTRHHKTHTGEKAYECPQCGSAFRKKSYLIDHQRTHTGEKPYQCNECGKAFIQKTTLTVHQRTHTGEKPYICNECGKSFCQKTTLTLHQRIHTGEKPYICNECGKSFRQKAILTVHHRIHTGEKSNGCPQCGKAFSRKSNLIRHQKTHTGEKPYECKQCGKFFSCKSNLIVHQKTHKVETTGIQ

SEQ ID NO: 99843 - protein, 549 aa, Homo sapiens
  Payload ID: 19904
  Gene Name: zinc finger protein 382
  Uniprot ID: Q96SR6
  ENSP ID: ENSP00000407593
MSQGSVSFKDVTVDFTQEEWQQLDPAQKALYRDVMLENYCHFVSVGFHMAKPDMIRKLEQGEELWTQRIFPSYSYLEEDGKTEDVLVKFKEYQDRHSRPLIFINHKKLIKERSNIYGKTFTLGKNRISKTILCEYKPDGKVLKNISELVIRNISPIKEKFGDSTGWEKSLLNTKHEKIHPAVNLHKQTERVLSGKQELIQHQKVQAPEQPFDHNECEKSFLMKGMLFTHTRAHRGERTFEYNKDGIAFIEKSSLSVHPSNLMEKKPSAYNKYGKFLCRKPVFIMPQRPQTEEKPFHCPYCGNNFRRKSYLIEHQRIHTGEKPYVCNQCGKAFRQKTALTLHEKTHIEGKPFICIDCGKSFRQKATLTRHHKTHTGEKAYECPQCGSAFRKKSYLIDHQRTHTGEKPYQCNECGKAFIQKTTLTVHQRTHTGEKPYICNECGKSFCQKTTLTLHQRIHTGEKPYICNECGKSFRQKAILTVHHRIHTGEKSNGCPQCGKAFSRKSNLIRHQKTHTGEKPYECKQCGKFFSCKSNLIVHQKTHKVETTGIQ

SEQ ID NO: 99844 - protein, 549 aa, Homo sapiens
  Payload ID: 19904
  Gene Name: zinc finger protein 382
  Uniprot ID: Q96SR6
  ENSP ID: ENSP00000410113
MPLQGSVSFKDVTVDFTQEEWQQLDPAQKALYRDVMLENYCHFVSVGFHMAKPDMIRKLEQGEELWTQRIFPSYSYLEDGKTEDVLVKFKEYQDRHSRPLIFINHKKLIKERSNIYGKTFTLGKNRISKTILCEYKPDGKVLKNISELVIRNISPIKEKFGDSTGWEKSLLNTKHEKIHPAVNLHKQTERVLSGKQELIQHQKVQAPEQPFDHNECEKSFLMKGMLFTHTRAHRGERTFEYNKDGIAFIEKSSLSVHPSNLMEKKPSAYNKYGKFLCRKPVFIMPQRPQTEEKPFHCPYCGNNFRRKSYLIEHQRIHTGEKPYVCNQCGKAFRQKTALTLHEKTHIEGKPFICIDCGKSFRQKATLTRHHKTHTGEKAYECPQCGSAFRKKSYLIDHQRTHTGEKPYQCNECGKAFIQKTTLTVHQRTHTGEKPYICNECGKSFCQKTTLTLHQRIHTGEKPYICNECGKSFRQKAILTVHHRIHTGEKSNGCPQCGKAFSRKSNLIRHQKTHTGEKPYECKQCGKFFSCKSNLIVHQKTHKVETTGIQ

SEQ ID NO: 99845 - protein, 184 aa, Homo sapiens
  Payload ID: 19904
  Gene Name: zinc finger protein 382
  ENSP ID: ENSP00000465485
MAKPDMIRKLEQGEELWTQRIFPSYSYLEEDGKTEDVLVKFKEYQDRHSRPLIFINHKKLIKERSNIYGKTFTLGKNRISKTILCEYKPDGKVLKNISELVIRNISPIKEKFGDSTGWEKSLLNTKHEKIHPAVNLHKQTERVLSGKQELIQHQKVQAPEQPFDHNECEKSFLMKGMLFTHTRA

SEQ ID NO: 99846 - protein, 25 aa, Homo sapiens
  Payload ID: 19904
  Gene Name: zinc finger protein 382
  ENSP ID: ENSP00000467675
MSQGSVSFKDVTVDFTQEEWQQLDP

SEQ ID NO: 99847 - protein, 475 aa, Homo sapiens
  Payload ID: 19905
  Gene Name: zinc finger protein 383
  Uniprot ID: Q8NA42
  ENSP ID: ENSP00000340132
MAEGSVMFSDVSIDFSQEEWDCLDPVQRDLYRDVMLENYGNLVSMGLYTPKPQVISLLEQGKEPWMVGRELTRGLCSDLESMCETKLLSLKKEVYEIELCQREIMGLTKHGLEYSSFGDVLEYRSHLAKQLGYPNGHFSQEIFTPEYMPTFIQQTFLTLHQIINNEDRPYECKKCGKAFSQNSQFIQHQRIHIGEKSYECKECGKFFSCGSHVTRHLKIHTGEKPFECKECGKAFSCSSYLSQHQRIHTGKKPYECKECGKAFSYCSNLIDHQRIHTGEKPYECKVCGKAFTKSSQLFQHARIHTGEKPYECKECGKAFTQSSKLVQHQRIHTGEKPYECKECGKAFSSGSALTNHQRIHTGEKPYDCKECGKAFTQSSQLRQHQRIHAGEKPFECLECGKAFTQNSQLFQHQRIHTDEKPYECNECGKAFNKCSNLTRHLRIHTGEKPYNCKECGKAFSSGSDLIRHQGIHTNK

SEQ ID NO: 99848 - protein, 475 aa, Homo sapiens; identical to SEQ ID NO: 99847
  Payload ID: 19905
  Gene Name: zinc finger protein 383
  Uniprot ID: Q8NA42
  ENSP ID: ENSP00000464871

SEQ ID NO: 99849 - protein, 114 aa, Homo sapiens
  Payload ID: 19905
  Gene Name: zinc finger protein 383
  ENSP ID: ENSP00000465246
MAEGSVMFSDVSIDFSQEEWDCLDPVQRDLYRDVMLENYGNLVSMGLYTPKPQVISLLEQGKEPWMVGRELTRGLCSDLESMCETKLLSLKKEVYEIELCQREIMGLTKHGLEY

SEQ ID NO: 99850 - protein, 475 aa, Homo sapiens; identical to SEQ ID NO: 99847
  Payload ID: 19905
  Gene Name: zinc finger protein 383
  Uniprot ID: Q8NA42
  ENSP ID: ENSP00000466101

SEQ ID NO: 99851 - protein, 81 aa, Homo sapiens
  Payload ID: 19905
  Gene Name: zinc finger protein 383
  ENSP ID: ENSP00000466246
MAEGSVMFSDVSIDFSQEEWDCLDPVQRDLYRDVMLENYGNLVSMGKGICTSDSQFSSGMSPSSTVNFSAAFQDFTLLSLK

SEQ ID NO: 99852 - protein, 516 aa, Homo sapiens
  Payload ID: 19906
  Gene Name: zinc finger protein 384
  Uniprot ID: Q8TF68
  ENSP ID: ENSP00000321650
MEESHFNSNPYFWPSIPTVSGQIENTMFINKMKDQLLPEKGCGLAPPHYPTLLTVPASVSLPSGISMDTESKSDQLTPHSQASVTQNITVVPVPSTGLMTAGVSCSQRWRREGSQSRGPGLVITSPSGSLVTTASSAQTFPISAPMIVSALPPGSQALQVVPDLSKKVASTLTEEGGGGGGGGGSVAPKPPRGRKKKRMLESGLPEMNDPYVLSPEDDDDHQKDGKTYRCRMCSLTFYSKSEMQIHSKSHTETKPHKCPHCSKTFANSSYLAQHIRIHSGAKPYSCNFCEKSFRQLSHLQQHTRIHTGDRPYKCAHPGCEKAFTQLSNLQSHRRQHNKDKPFKCHNCHRAYTDAASLEVHLSTHTVKHAKVYTCTICSRAYTSETYLMKHMRKHNPPDLQQQVQAAAAAAAVAQAQAQAQAQAQAQAQAQAQAQASQASQQQQQQQQQQQQQQQQPPPHFQSPGAAPQGGGGGDSNPNPPPQCSFDLTPYKTAEHHKDICLTVTTSTIQVEHLASS

SEQ ID NO: 99853 - protein, 461 aa, Homo sapiens
  Payload ID: 19906
  Gene Name: zinc finger protein 384
  Uniprot ID: Q8TF68
  ENSP ID: ENSP00000348018
MEESHFNSNPYFWPSIPTVSGQIENTMFINKMKDQLLPEKGCGLAPPHYPTLLTVPASVSLPSGISMDTESKSDQLTPHSQASVTQNITVVPVPSTGLMTAALQVVPDLSKKVASTLTEEGGGGGGGGGSVAPKPPRGRKKKRMLESGLPEMNDPYVLSPEDDDDHQKDGKTYRCRMCSLTFYSKSEMQIHSKSHTETKPHKCPHCSKTFANSSYLAQHIRIHSGAKPYSCNFCEKSFRQLSHLQQHTRIHTGDRPYKCAHPGCEKAFTQLSNLQSHRRQHNKDKPFKCHNCHRAYTDAASLEVHLSTHTVKHAKVYTCTICSRAYTSETYLMKHMRKHNPPDLQQQVQAAAAAAAVAQAQAQAQAQAQAQAQAQAQAQASQASQQQQQQQQQQQQQQQQPPPHFQSPGAAPQGGGGGDSNPNPPPQCSFDLTPYKTAEHHKDICLTVTTSTIQVEHLASS

SEQ ID NO: 99854 - protein, 577 aa, Homo sapiens
  Payload ID: 19906
  Gene Name: zinc finger protein 384
  Uniprot ID: Q8TF68
  ENSP ID: ENSP00000354592
MEESHFNSNPYFWPSIPTVSGQIENTMFINKMKDQLLPEKGCGLAPPHYPTLLTVPASVSLPSGISMDTESKSDQLTPHSQASVTQNITVVPVPSTGLMTAGVSCSQRWRREGSQSRGPGLVITSPSGSLVTTASSAQTFPISAPMIVSALPPGSQALQVVPDLSKKVASTLTEEGGGGGGGGGSVAPKPPRGRKKKRMLESGLPEMNDPYVLSPEDDDDHQKDGKTYRCRMCSLTFYSKSEMQIHSKSHTETKPHKCPHCSKTFANSSYLAQHIRIHSGAKPYSCNFCEKSFRQLSHLQQHTRIHSKMHTETIKPHKCPHCSKTFANTSYLAQHLRIHSGAKPYNCSYCQKAFRQLSHLQQHTRIHTGDRPYKCAHPGCEKAFTQLSNLQSHRRQHNKDKPFKCHNCHRAYTDAASLEVHLSTHTVKHAKVYTCTICSRAYTSETYLMKHMRKHNPPDLQQQVQAAAAAAAVAQAQAQAQAQAQAQAQAQAQAQASQASQQQQQQQQQQQQQQQQPPPHFQSPGAAPQGGGGGDSNPNPPPQCSFDLTPYKTAEHHKDICLTVTTSTIQVEHLASS

SEQ ID NO: 99855 - protein, 577 aa, Homo sapiens; identical to SEQ ID NO: 99854
  Payload ID: 19906
  Gene Name: zinc finger protein 384
  Uniprot ID: Q8TF68
  ENSP ID: ENSP00000380019

SEQ ID NO: 99856 - protein, 377 aa, Homo sapiens
  Payload ID: 19906
  Gene Name: zinc finger protein 384
  ENSP ID: ENSP00000399572
MEESHFNSNPYFWPSIPTVSGQIENTMFINKMKDQLLPEKGCGLAPPHYPTLLTVPASVSLPSGISMDTESKSDQLTPHSQASVTQNITVVPVPSTGLMTAGVSCSQRWRREGSQSRGPGLVITSPSGSLVTTASSAQTFPISAPMIVSALPPGSQALQVVPDLSKKVASTLTEEGGGGGGGGGSVAPKPPRGRKKKRMLESGLPEMNDPYVLSPEDDDDHQKDGKTYRSEGNCGTGNGQSLGLMDSVPGSTTNLLCDPGCRMCSLTFYSKSEMQIHSKSHTETKPHKCPHCSKTFANSSYLAQHIRIHSGAKPYSCNFCEKSFRQLSHLQQHTRIHSKMHTETIKPHKCPHCSKTFANTSYLAQHLRIHSGAKPYN

SEQ ID NO: 99857 - protein, 277 aa, Homo sapiens
  Payload ID: 19906
  Gene Name: zinc finger protein 384
  ENSP ID: ENSP00000412911
MEESHFNSNPYFWPSIPTVSGQIENTMFINKMKDQLLPEKGCGLAPPHYPTLLTVPASVSLPSGISMDTESKSDQLTPHSQASVTQNITVVPVPSTGLMTAGPGLVITSPSGSLVTTASSAQTFPISAPMIVSALPPGSQALQVVPDLSKKVASTLTEEGGGGGGGGGSVAPKPPRGRKKKRMLESGLPEMNDPYVLSPEDDDDHQKDGKTYRCRMCSLTFYSKSEMQIHSKSHTETKPHKCPHCSKTFANSSYLAQHIRIHSGAKPYSCNFCEKSF

SEQ ID NO: 99858 - protein, 168 aa, Homo sapiens
  Payload ID: 19906
  Gene Name: zinc finger protein 384
  ENSP ID: ENSP00000437488
MEESHFNSNPYFWPSIPTVSGQIENTMFINKMKDQLLPEKGCGLAPPHYPTLLTVPASVSLPSGISMDTESKSDQLTPHSQASVTQNITVVPVPSTGLMTAGPGLVITSPSGSLVTTASSAQTFPISAPMIVSALPPGSQALQVVPDLSKKVASTLTEEGGGGGGGGG

SEQ ID NO: 99859 - protein, 116 aa, Homo sapiens
  Payload ID: 19906
  Gene Name: zinc finger protein 384
  ENSP ID: ENSP00000438047
MEESHFNSNPYFWPSIPTVSGQIENTMFINKMKDQLLPEKGCGLAPPHYPTLLTVPASVSLPSGISMDTESKSDQLTPHSQASVTQNITVVPVPSTGLMTAGVSCSQRWRREGSQS

SEQ ID NO: 99860 - protein, 118 aa, Homo sapiens
  Payload ID: 19906
  Gene Name: zinc finger protein 384
  ENSP ID: ENSP00000438555
MEESHFNSNPYFWPSIPTVSGQIENTMFINKMKDQLLPEKGCGLAPPHYPTLLTVPASVSLPSGISMDTESKSDQLTPHSQASVTQNITVVPVPSTGLMTAGVSCSQRWRREGSQSRG

SEQ ID NO: 99861 - protein, 204 aa, Homo sapiens
  Payload ID: 19906
  Gene Name: zinc finger protein 384
  ENSP ID: ENSP00000439736
MEESHFNSNPYFWPSIPTVSGQIENTMFINKMKDQLLPEKGCGLAPPHYPTLLTVPASVSLPSGISMDTESKSDQLTPHSQASVTQNITVVPVPSTGLMTAGVSCSQRWRREGSQSRGPGLVITSPSGSLVTTASSAQTFPISAPMIVSALPPGSQALQVVPDLSKKVASTLTEEGGGGGGGGGSVAPKPPRGRKKKRMLESGL

SEQ ID NO: 99862 - protein, 127 aa, Homo sapiens
  Payload ID: 19906
  Gene Name: zinc finger protein 384
  ENSP ID: ENSP00000441408
MEESHFNSNPYFWPSIPTVSGQIENTMFINKMKDQLLPEKGCGLAPPHYPTLLTVPASVSLPSGISMDTESKSDQLTPHSQASVTQNITVVPVPSTGLMTAGVSCSQRWRREGSQSRGPGLVITSPS

SEQ ID NO: 99863 - protein, 159 aa, Homo sapiens
  Payload ID: 19906
  Gene Name: zinc finger protein 384
  ENSP ID: ENSP00000473311
  MOD_RES (1)..(1): Any amino acid
XFKCHNCHRAYTDAASLEVHLSTHTVKHAKVYTCTICSRAYTSQQVQAAAAAAAVAQAQAQAQAQAQAQAQAQAQAQASQASQQQQQQQQQQQQQQQQPPPHFQSPGAAPQGGGGGDSNPNPPPQCSFDLTPYKTAEHHKDICLTVTTSTIQVEHLASS

SEQ ID NO: 99864 - protein, 305 aa, Homo sapiens
  Payload ID: 19907
  Gene Name: zinc finger protein 385A
  Uniprot ID: Q96PM9
  ENSP ID: ENSP00000293385
MILGSLSRAGPLPLLRQPPIMQPPLDLKQILPFPLEPAPTLGLFSNYSTMDPVQKAVLSHTFGGPLLKTKRPVISCNICQIRFNSQSQAEAHYKGNRHARRVKGIEAAKTRGREPGVREPGDPAPPGSTPTNGDGVAPRPGTKHKTILEARSGLGPIKAYPRLGPPTPGEPEAPAQDRTFHCEICNVKVNSEVQLKQHISSRRHRDGVAGKPNPLLSRHKKSRGAGELAGTLTFSKELPKSLAGGLLPSPLAVAAVMAAAAGSPLSLRPAPAAPLLQGPPITHPLLHPAPGPIRTAHGPILFSPY

SEQ ID NO: 99865 - protein, 386 aa, Homo sapiens
  Payload ID: 19907
  Gene Name: zinc finger protein 385A
  Uniprot ID: Q96PM9
  ENSP ID: ENSP00000338927
MILGSLSRAGPLPLLRQPPIMQPPLDLKQILPFPLEPAPTLGLFSNYSTMDPVQKAVLSHTFGGPLLKTKRPVISCNICQIRFNSQSQAEAHYKGNRHARRVKGIEAAKTRGREPGVREPGDPAPPGSTPTNGDGVAPRPVSMENGLGPAPGSPEKQPGSPSPPSIPETGQGVTKGEGGTPAPASLPGGSKEEEEKAKRLLYCALCKVAVNSLSQLEAHNKGTKHKTILEARSGLGPIKAYPRLGPPTPGEPEAPAQDRTFHCEICNVKVNSEVQLKQHISSRRHRDGVAGKPNPLLSRHKKSRGAGELAGTLTFSKELPKSLAGGLLPSPLAVAAVMAAAAGSPLSLRPAPAAPLLQGPPITHPLLHPAPGPIRTAHGPILFSPY

SEQ ID NO: 99866 - protein, 366 aa, Homo sapiens
  Payload ID: 19907
  Gene Name: zinc finger protein 385A
  Uniprot ID: Q96PM9
  ENSP ID: ENSP00000377849
MQPPLDLKQILPFPLEPAPTLGLFSNYSTMDPVQKAVLSHTFGGPLLKTKRPVISCNICQIRFNSQSQAEAHYKGNRHARRVKGIEAAKTRGREPGVREPGDPAPPGSTPTNGDGVAPRPVSMENGLGPAPGSPEKQPGSPSPPSIPETGQGVTKGEGGTPAPASLPGGSKEEEEKAKRLLYCALCKVAVNSLSQLEAHNKGTKHKTILEARSGLGPIKAYPRLGPPTPGEPEAPAQDRTFHCEICNVKVNSEVQLKQHISSRRHRDGVAGKPNPLLSRHKKSRGAGELAGTLTFSKELPKSLAGGLLPSPLAVAAVMAAAAGSPLSLRPAPAAPLLQGPPITHPLLHPAPGPIRTAHGPILFSPY

SEQ ID NO: 99867 - protein, 366 aa, Homo sapiens; identical to SEQ ID NO: 99866
  Payload ID: 19907
  Gene Name: zinc finger protein 385A
  Uniprot ID: Q96PM9
  ENSP ID: ENSP00000446913

SEQ ID NO: 99868 - protein, 285 aa, Homo sapiens
  Payload ID: 19907
  Gene Name: zinc finger protein 385A
  Uniprot ID: Q96PM9
  ENSP ID: ENSP00000447162
MQPPLDLKQILPFPLEPAPTLGLFSNYSTMDPVQKAVLSHTFGGPLLKTKRPVISCNICQIRFNSQSQAEAHYKGNRHARRVKGIEAAKTRGREPGVREPGDPAPPGSTPTNGDGVAPRPGTKHKTILEARSGLGPIKAYPRLGPPTPGEPEAPAQDRTFHCEICNVKVNSEVQLKQHISSRRHRDGVAGKPNPLLSRHKKSRGAGELAGTLTFSKELPKSLAGGLLPSPLAVAAVMAAAAGSPLSLRPAPAAPLLQGPPITHPLLHPAPGPIRTAHGPILFSPY

SEQ ID NO: 99869 - protein, 164 aa, Homo sapiens
  Payload ID: 19907
  Gene Name: zinc finger protein 385A
  ENSP ID: ENSP00000448264
MQPPLDLKQILPFPLEPAPTLGLFSNYSTMDPVQKAVLSHTFGGPLLKTKRPVISCNICQIRFNSQSQAEAHYKGNRHARRVKGIEAAKTRGREPGVREPGDPAPPGSTPTNGDGVAPRPVSMENGLGPAPGSPEKQPGSPSPPSIPETGQGVTKGEGGTPAPA

SEQ ID NO: 99870 - protein, 231 aa, Homo sapiens
  Payload ID: 19907
  Gene Name: zinc finger protein 385A
  ENSP ID: ENSP00000448466
MQPPLDLKQILPFPLEPAPTLGLFSNYSTMDPVQKAVLSHTFGGPLLKTKRPVISCNICQIRFNSQSQAEAHYKGNRHARRVKGIEAAKTRGREPGVREPGDPAPPGSTPTNGDGVAPRPVSMENGLGPAPGSPEKQPGSPSPPSIPETGQGVTKGEGGTPAPASLPGGSKEEEEKAKRLLYCALCKVAVNSLSQLEAHNKGTKHKTILEARSGLGPIKAYPRLGPPTPGE

SEQ ID NO: 99871 - protein, 253 aa, Homo sapiens
  Payload ID: 19907
  Gene Name: zinc finger protein 385A
  ENSP ID: ENSP00000448567
PTLGLFSNYSTMDPVQKAVLSHTFGGPLLKTKRPVISCNICQIRFNSQSQAEAHYKGNRHARRVKGIEAAKTRGREPGVREPGDPAPPGSTPTNGDGVAPRPESHSVAQARVQWHNLSSLQPPPPRFKRFSCLSLLSSWDYRHLPPHPVSMENGLGPAPGSPEKQPGSPSPPSIPETGQGVTKGEGGTPAPASLPGGSKEEEEKAKRLLYCALCKVAVNSLSQLEAHNKGTKHKTILEARSGLGPIKAYPRLG

SEQ ID NO: 99872 - protein, 94 aa, Homo sapiens
  Payload ID: 19907
  Gene Name: zinc finger protein 385A
  ENSP ID: ENSP00000448754
MQPPLDLKQILPFPLEPAPTLGLFSNYSTSQAEAHYKGNRHARRVKGIEAAKTRGREPGVREPGDPAPPGSTPTNGDGVAPRPVSMENGLGPAP

SEQ ID NO: 99873 - protein, 366 aa, Homo sapiens; identical to SEQ ID NO: 99866
  Payload ID: 19907
  Gene Name: zinc finger protein 385A
  Uniprot ID: Q96PM9
  ENSP ID: ENSP00000449161

SEQ ID NO: 99874 - protein, 145 aa, Homo sapiens
  Payload ID: 19907
  Gene Name: zinc finger protein 385A
  ENSP ID: ENSP00000449462
MQPPLDLKQILPFPLEPAPTLGLFSNYSTMDPVQKAVLSHTFGGPLLKTKRPVISCNICQIRFNSQSQAEAHYKGNRHARRVKGIEAAKTRGREPGVREPGDPAPPGSTPTNGDGVAPRPVSMENGLGPAPGSPEKQPGSPSPPS

SEQ ID NO: 99875 - protein, 178 aa, Homo sapiens
  Payload ID: 19907
  Gene Name: zinc finger protein 385A
  ENSP ID: ENSP00000450149
MILGSLSRAGPLPLLRQPPIMQPPLDLKQILPFPLEPAPTLGLFSNYSTSQAEAHYKGNRHARRVKGIEAAKTRGREPGVREPGDPAPPGSTPTNGDGVAPRPVSMENGLGPAPGSPEKQPGSPSPPSIPETGQGVTKGEGGTPAPASLPGGSKEEEEKAKRLLYCALCKVAVNSLSQ

SEQ ID NO: 99876 - protein, 113 aa, Homo sapiens
  Payload ID: 19907
  Gene Name: zinc finger protein 385A
  ENSP ID: ENSP00000450373
EPAPTLGLFSNYSTMDPVQKAVLSHTFGGPLLKTKRPVISCNICQIRFNSQSQAEAHYKGNRHARRVKGIEAAKTRGREPGVREPGDPAPPGSTPTNGDGVAPRPAFRRLVRV

SEQ ID NO: 99877 - protein, 369 aa, Homo sapiens
  Payload ID: 19908
  Gene Name: zinc finger protein 385B
  Uniprot ID: Q569K4
  ENSP ID: ENSP00000338225
MMQPSLDIKPFMSFPVDSSSAVGLFPNFNTMDPVQKAVINHTFGVSIPPKKKQVISCNVCQLRFNSDSQAEAHYKGSKHAKKVKALDATKNKPKMVPSKDSAKANPSCSITPITGNNSDKSEDKGKLKASSSSQPSSSESGSFLLKSGTTPLPPGAATSPSKSTNGAPGTVVESEEEKAKKLLYCSLCKVAVNSLSQLEAHNTGSKHKTMVEARNGAGPIKSYPRPGSRLKMQNGSKGSGLQNKTFHCEICDVHVNSEIQLKQHISSRRHKDRVAGKPLKPKYSPYNKLQRSPSILAAKLAFQKDMMKPLAPAFLSSPLAAAAAVSSALSLPPRPSASLFQAPAIPPALLRPGHGPIRATPASILFAPY

SEQ ID NO: 99878 - protein, 395 aa, Homo sapiens
  Payload ID: 19908
  Gene Name: zinc finger protein 385B
  Uniprot ID: Q569K4
  ENSP ID: ENSP00000386379
MWSGLPSRGSTCHTTTLPALVRTPTLMMQPSLDIKPFMSFPVDSSSAVGLFPNFNTMDPVQKAVINHTFGVSIPPKKKQVISCNVCQLRFNSDSQAEAHYKGSKHAKKVKALDATKNKPKMVPSKDSAKANPSCSITPITGNNSDKSEDKGKLKASSSSQPSSSESGSFLLKSGTTPLPPGAATSPSKSTNGAPGTVVESEEEKAKKLLYCSLCKVAVNSLSQLEAHNTGSKHKTMVEARNGAGPIKSYPRPGSRLKMQNGSKGSGLQNKTFHCEICDVHVNSEIQLKQHISSRRHKDRVAGKPLKPKYSPYNKLQRSPSILAAKLAFQKDMMKPLAPAFLSSPLAAAAAVSSALSLPPRPSASLFQAPAIPPALLRPGHGPIRATPASILFAPY

SEQ ID NO: 99879 - protein, 369 aa, Homo sapiens; identical to SEQ ID NO: 99877
  Payload ID: 19908
  Gene Name: zinc finger protein 385B
  Uniprot ID: Q569K4
  ENSP ID: ENSP00000386507

SEQ ID NO: 99880 - protein, 471 aa, Homo sapiens
  Payload ID: 19908
  Gene Name: zinc finger protein 385B
  Uniprot ID: Q569K4
  ENSP ID: ENSP00000386845
MNMANFLRGFEEKGIKNDRPEDQLSKEKKKILFSFCEVCNIQLNSAAQAQVHSNGKSHRKRVKQLSDGQPPPPAQASPSSNSSTGSTCHTTTLPALVRTPTLMMQPSLDIKPFMSFPVDSSSAVGLFPNFNTMDPVQKAVINHTFGVSIPPKKKQVISCNVCQLRFNSDSQAEAHYKGSKHAKKVKALDATKNKPKMVPSKDSAKANPSCSITPITGNNSDKSEDKGKLKASSSSQPSSSESGSFLLKSGTTPLPPGAATSPSKSTNGAPGTVVESEEEKAKKLLYCSLCKVAVNSLSQLEAHNTGSKHKTMVEARNGAGPIKSYPRPGSRLKMQNGSKGSGLQNKTFHCEICDVHVNSEIQLKQHISSRRHKDRVAGKPLKPKYSPYNKLQRSPSILAAKLAFQKDMMKPLAPAFLSSPLAAAAAVSSALSLPPRPSASLFQAPAIPPALLRPGHGPIRATPASILFAPY

SEQ ID NO: 99881 - protein, 263 aa, Homo sapiens
  Payload ID: 19908
  Gene Name: zinc finger protein 385B
  ENSP ID: ENSP00000394038
MMQPSLDIKPFMSFPVDSSSAVGLFPNFNTMDPVQKAVINHTFGVSIPPKKKQVISCNVCQLRFNSDSQAEAHYKGSKHAKKVKALDATKNKPKMVPSKDSAKANPSCSITPITGNNSDKSEDKGKLKASSSSQPSSSESGSFLLKSGTTPLPPGAATSPSKSTNGAPGTVVESEEEKAKKLLYCSLCKVAVNSLSQLEAHNTGSKHKTMVEARNGAGPIKSYPRPGSRLKMQNGSKGSGLQNKTFHCEICDVHVNSEIQLKQ

SEQ ID NO: 99882 - protein, 138 aa, Homo sapiens
  Payload ID: 19908
  Gene Name: zinc finger protein 385B
  ENSP ID: ENSP00000399198
MLGSTCHTTTLPALVRTPTLMMQPSLDIKPFMSFPVDSSSAVGLFPNFNTKRRGLFETNKFCQMDPVQKAVINHTFGVSIPPKKKQVISCNVCQLRFNSDSQAEAHYKGSKHAKKVKALDATKNKPKMVPSKDSAKAN

SEQ ID NO: 99883 - protein, 31 aa, Homo sapiens
  Payload ID: 19908
  Gene Name: zinc finger protein 385B
  ENSP ID: ENSP00000400232
MNMANFLRGFEEKGIKNDRPEDQLSKEKKKI

SEQ ID NO: 99884 - protein, 75 aa, Homo sapiens
  Payload ID: 19908
  Gene Name: zinc finger protein 385B
  ENSP ID: ENSP00000409978
MNMANFLRGFEEKGIKNDRPEDQLSKEKKKILFSFCEVCNIQLNSAAQAQVHSNGKSHRKRVKQLSDGQPPPPAQ

SEQ ID NO: 99885 - protein, 459 aa, Homo sapiens
  Payload ID: 19909
  Gene Name: zinc finger protein 385C
  ENSP ID: ENSP00000411514
MKRPLSPPPPAEKETPISGAAECLPRPPEPPKPKRERKRPSYTLCDVCNIQLNSAAQAQVHCGGRAHQRRLRQLSLGKSPSGPAGPASGAPSPLLASLPLPTRPLQPPLDFKHLLAFHFNGAAPLSLFPNFSTMDPVQKAVISHTFGVPSPLKKKLFISCNICHLRFNSANQAEAHYKGHKHARKLKAVEAAKSKQRPHTQAQDGAVVSPIPTLASGAPGEPQSKAVPAAPPLGPPLQPPPTPDPTCREPAHSELLDAASSSSSSSCPPCSPEPGREAPGPEPAAAAVGSSMSGEGRSEKGHLYCPTCKVTVNSASQLQAHNTGAKHRWMMEGQRGAPRRSRGRPVSRGGAGHKAKRVTGGRGGRQGPSPAFHCALCQLQVNSETQLKQHMSSRRHKDRLAGKTPKPSSQHSKLQKHAALASKLALQKQLTKTLAARFLPSPLPTAATAICALPGPLAL

SEQ ID NO: 99886 - protein, 424 aa, Homo sapiens
  Payload ID: 19909
  Gene Name: zinc finger protein 385C
  ENSP ID: ENSP00000480744
MGLAAGPASGAPSPLLASLPLPTRPLQPPLDFKHLLAFHFNGAAPLSLFPNFSTMDPVQKAVISHTFGVPSPLKKKLFISCNICHLRFNSANQAEAHYKGHKHARKLKAVEAAKSKQRPHTQAQDGAVVSPIPTLASGAPGEPQSKVPAAPPLGPPLQPPPTPDPTCREPAHSELLDAASSSSSSSCPPCSPEPGREAPGPEPAAAAVGSSMSGEGRSEKGHLYCPTCKVTVNSASQLQAHNTGAKHRWMMEGQRGAPRRSRGRPVSRGGAGHKAKRVTGGRGGRQGPSPAFHCALCQLQVNSETQLKQHMSSRRHKDRLAGKTPKPSSQHSKLQKHAALAVSILKSKLALQKQLTKTLAARFLPSPLPTAATAICALPGPLALRPAPTAATTLFPAPILGPALFRTPAGAVRPATGPIVLAPY

SEQ ID NO: 99887 - protein, 395 aa, Homo sapiens
  Payload ID: 19910
  Gene Name: zinc finger protein 385D
  Uniprot ID: Q9H6B1
  ENSP ID: ENSP00000281523
MRNIMYFGGTCQSPALPALVRPPAPPLQPSLDIKPFLPFPLDTAAAVNLFPNFNAMDPIQKAVINHTFGVPLPHRRKQIISCNICQLRFNSDSQAAAHYKGTKHAKKLKALEAMKNKQKSVTAKDSAKTTFTSITTNTINTSSDKTDGTAGTPAISTTTTVEIRKSSVMTTEITSKVEKSPTTATGNSSCPSTETEEEKAKRLLYCSLCKVAVNSASQLEAHNSGTKHKTMLEARNGSGTIKAFPRAGVKGKGPVNKGNTGLQNKTFHCEICDVHVNSETQLKQHISSRRHKDRAAGKPPKPKYSPYNKLQKTAHPLGVKLVFSKEPSKPLAPRILPNPLAAAAAAAAVAVSSPFSLRTAPAATLFQTSALPPALLRPAPGPIRTAHTPVLFAPY

SEQ ID NO: 99888 - protein, 103 aa, Homo sapiens
  Payload ID: 19910
  Gene Name: zinc finger protein 385D
  ENSP ID: ENSP00000388232
MRNIMYFGGTCQSPALPALVRPPAPPLQPSLDIKPFLPFPLDTAAAVNLFPNFNAMDPIQKAVINHTFGVPLPHRRKQIISCNICQLRFNSDMAQAKELDWPH

SEQ ID NO: 99889 - protein, 358 aa, Homo sapiens
  Payload ID: 19911
  Gene Name: zinc finger protein 391
  Uniprot ID: Q9UJN7
  ENSP ID: ENSP00000244576
MESLRGNTAQGPTNEEDYKNEGQLSRQTKCPAQKKSSFENTVVRKVSVTLKEIFTGEEGPESSEFSLSPNLDAQQKIPKGHGSPISRKNSKDNSDLIKHQRLFSQRKPCKCNECEKAFSYQSDLLVHSRIHGGEKPFECNKCGKSFSRSTHLIEHQRTHTGEKPYECNECGKAFSRSTHLSLHQRIHTGEKPYECSECGKAFSRSTNLSQHQRTHTQERPYKCNECGKAFGDRSTIIQHQRIHTGENPYECSKCGKAFSWISSLTEHQRTHTGENPYECSECGKVFSRSSSLTEHQRIHSGEKPHECRVCGKGFSRSSSLIIHQRTHTGEKPYKCNDCGKAFCQSSTLIRHQHLHTKE

SEQ ID NO: 99890 - protein, 133 aa, Homo sapiens
  Payload ID: 19911
  Gene Name: zinc finger protein 391
  ENSP ID: ENSP00000419498
MESLRGNTAQGPTNEEDYKNEGQLSRQTKCPAQKKSSFENTVVRKVSVTLKEIFTGEEGPESSEFSLSPNLDAQQKIPKGHGSPISRKNSKDNSDLIKHQRLFSQRKPCKCNECEKAFSYQSDLLVHSRIHGG

SEQ ID NO: 99891 - protein, 561 aa, Homo sapiens
  Payload ID: 19912
  Gene Name: zinc finger protein 394
  Uniprot ID: Q53GI3
  ENSP ID: ENSP00000337363
MNSSLTAQRRGSDAELGPWVMAARSKDAAPSQRDGLLPVKVEEDSPGSWEPNYPAASPDPETSRLHFRQLRYQEVAGPEEALSRLRELCRRWLRPELLSKEQILELLVLEQFLTILPEELQAWVREHCPESGEEAVAVVRALQRALDGTSSQGMVTFEDTAVSLTWEEWERLDPARRDFCRESAQKDSGSTVPPSLESRVENKELIPMQQILEEAEPQGQLQEAFQGKRPLFSKCGSTHEDRVEKQSGDPLPLKLENSPEAEGLNSISDVNKNGSIEGEDSKNNELQNSARCSNLVLCQHIPKAERPTDSEEHGNKCKQSFHMVTWHVLKPHKSDSGDSFHHSSLFETQRQLHEERPYKCGNCGKSFKQRSDLFRHQRIHTGEKPYGCQECGKSFSQSAALTKHQRTHTGEKPYTCLKCGERFRQNSHLNRHQSTHSRDKHFKCEECGETCHISNLFRHQRLHKGERPYKCEECEKSFKQRSDLFKHHRIHTGEKPYGCSVCGKRFNQSATLIKHQRIHTGEKPYKCLECGERFRQSTHLIRHQRIHQNKVLSAGRGGSRL

SEQ ID NO: 99892 - protein, 162 aa, Homo sapiens
  Payload ID: 19912
  Gene Name: zinc finger protein 394
  Uniprot ID: Q53GI3
  ENSP ID: ENSP00000409565
MNSSLTAQRRGSDAELGPWVMAARSKDAAPSQRDGLLPVKVEEDSPGSWEPNYPAASPDPETSRLHFRQLRYQEVAGPEEALSRLRELCRRWLRPELLSKEQILELLVLEQFLTILPEELQAWVREHCPESGEEAVAVVRALQRALDGTSSQVWKAEWRTKS

SEQ ID NO: 99893 - protein, 513 aa, Homo sapiens
  Payload ID: 19913
  Gene Name: zinc finger protein 395
  Uniprot ID: Q9H8N7
  ENSP ID: ENSP00000340494
MASVLSRRLGKRSLLGARVLGPSASEGPSAAPPSEPLLEGAAPQPFTTSDDTPCQEQPKEVLKAPSTSGLQQVAFQPGQKVYVWYGGQECTGLVEQHSWMEGQVTVWLLEQKLQVCCRVEEVWLAELQGPCPQAPPLEPGAQALAYRPVSRNIDVPKRKSDAVEMDEMMAAMVLTSLSCSPVVQSPPGTEANFSASRAACDPWKESGDISDSGSSTTSGHWSGSSGVSTPSPPHPQASPKYLGDAFGSPQTDHGFETDPDPFLLDEPAPRKRKNSVKVMYKCLWPNCGKVLRSIVGIKRHVKALHLGDTVDSDQFKREEDFYYTEVQLKEESAAAAAAAAAGTPVPGTPTSEPAPTPSMTGLPLSALPPPLHKAQSSGPEHPGPESSLPSGALSKSAPGSFWHIQADHAYQALPSFQIPVSPHIYTSVSWAAAPSAACSLSPVRSRSLSFSEPQQPAPAMKSHLIVTSPPRAQSGARKARGEAKKCRKVYGIEHRDQWCTACRWKKACQRFLD

SEQ ID NO: 99894 - protein, 30 aa, Homo sapiens
  Payload ID: 19913
  Gene Name: zinc finger protein 395
  ENSP ID: ENSP00000427719
LPSGALSKSAPGSFWHIQADHAYQESPRGG

SEQ ID NO: 99895 - protein, 124 aa, Homo sapiens
  Payload ID: 19913
  Gene Name: zinc finger protein 395
  ENSP ID: ENSP00000427812
MASVLSRRLGKRSLLGARVLGPSASEGPSAAPPSEPLLEGAAPQPFTTSDDTPCQEQPKEVLKAPSTSGLQQVAFQPGQKVYVWYGGQECTGLVEQHSWMEGQVTVWLLEQKLQVCCRVEEVWL

SEQ ID NO: 99896 - protein, 187 aa, Homo sapiens
  Payload ID: 19913
  Gene Name: zinc finger protein 395
  ENSP ID: ENSP00000427934
MASVLSRRLGKRSLLGARVLGPSASEGPSAAPPSEPLLEGAAPQPFTTSDDTPCQEQPKEVLKAPSTSGLQQVAFQPGQKVYVWYGGQECTGLVEQHSWMEGQVTVWLLEQKLQVCCRVEEVWLAELQGPCPQAPPLEPGAQALAYRPVSRNIDVPKRKSDAVEMDEMMAAMVLTSLSCSPVVQSPP

SEQ ID NO: 99897 - protein, 513 aa, Homo sapiens; identical to SEQ ID NO: 99893
  Payload ID: 19913
  Gene Name: zinc finger protein 395
  Uniprot ID: Q9H8N7
  ENSP ID: ENSP00000428452

SEQ ID NO: 99898 - protein, 513 aa, Homo sapiens; identical to SEQ ID NO: 99893
  Payload ID: 19913
  Gene Name: zinc finger protein 395
  Uniprot ID: Q9H8N7
  ENSP ID: ENSP00000429640

SEQ ID NO: 99899 - protein, 47 aa, Homo sapiens
  Payload ID: 19913
  Gene Name: zinc finger protein 395
  ENSP ID: ENSP00000429649
MASVLSRRLGKRSLLGARVLGPSASEGPSAAPPSEPLLEGAAPQPFT

SEQ ID NO: 99900 - protein, 102 aa, Homo sapiens
  Payload ID: 19913
  Gene Name: zinc finger protein 395
  ENSP ID: ENSP00000429823
MASVLSRRLGKRSLLGARVLGPSASEGPSAAPPSEPLLEGAAPQPFTTSDDTPCQEQPKEVLKAPSTSGLQQVAFQPGQKVYVWYGGQECTGLVEQHSWMEG

SEQ ID NO: 99901 - protein, 156 aa, Homo sapiens
  Payload ID: 19913
  Gene Name: zinc finger protein 395
  ENSP ID: ENSP00000430203
MASVLSRRLGKRSLLGARVLGPSASEGPSAAPPSEPLLEGAAPQPFTTSDDTPCQEQPKEVLKAPSTSGLQQVAFQPGQKVYVWYGGQECTGLVEQHSWMEGQVTVWLLEQKLQVCCRVEEVWLAELQGPCPQAPPLEPGAQALAYRPVSRNIDVP

SEQ ID NO: 99902 - protein, 333 aa, Homo sapiens
  Payload ID: 19914
  Gene Name: zinc finger protein 396
  Uniprot ID: Q96N95
  ENSP ID: ENSP00000302310
MSAKLGKSSSLLTQTSEECNGILTEKMEEEEQTCDPDSSLHWSSSYSPETFRQQFRQFGYQDSPGPHEALSRLWELCHLWLRPEVHTKEQILELLVLEQFLAILPKELQAWVQKHHPENGEETVTMLEDVERELDGPKQIFFGRRKDMIAEKLAPSEITEELPSSQLMPVKKQLQGASWELQSLRPHDEDIKTTNVKSASRQKTSLGIELHCNVSNILHMNGSQSSTYRGTYEQDGRFEKRQGNPSWKKQQKCDECGKIFSQSSALILHQRIHSGKKPYACDECAKAFSRSAILIQHRRTHTDSKYEHAIAEAQKNMYFKTRLKCPRSLSGGR

SEQ ID NO: 99903 - protein, 39 aa, Homo sapiens
  Payload ID: 19914
  Gene Name: zinc finger protein 396
  ENSP ID: ENSP00000465440
MSAKLGKSSSLLTQTSEECNGILTEKMEEEEQTCDPDSS

SEQ ID NO: 99904 - protein, 335 aa, Homo sapiens
  Payload ID: 19914
  Gene Name: zinc finger protein 396
  Uniprot ID: Q96N95
  ENSP ID: ENSP00000466500
MSAKLGKSSSLLTQTSEECNGILTEKMEEEEQTCDPDSSLHWSSSYSPETFRQQFRQFGYQDSPGPHEALSRLWELCHLWLRPEVHTKEQILELLVLEQFLAILPKELQAWVQKHHPENGEETVTMLEDVERELDGPKQIFFGRRKDMIAEKLAPSEITEELPSSQLMPVKKQLQGASWELQSLRPHDEDIKTTNVKSASRQKTSLGIELHCNVSNILHMNGSQSSTYRGTYEQDGRFEKRQGNPSWKKQQKCDECGKIFSQSSALILHQRIHSGKKPYACDECAKAFSRSAILIQHRRTHTGEKPYKCHDCGKAFSQSSNLFRHRKRHIRKKVP

SEQ ID NO: 99905 - protein, 210 aa, Homo sapiens
  Payload ID: 19914
  Gene Name: zinc finger protein 396
  Uniprot ID: Q96N95
  ENSP ID: ENSP00000467275
MSAKLGKSSSLLTQTSEECNGILTEKMEEEEQTCDPDSSLHWSSSYSPETFRQQFRQFGYQDSPGPHEALSRLWELCHLWLRPEVHTKEQILELLVLEQFLAILPKELQAWVQKHHPENGEETVTMLEDVERELDGPKQIFFGRRKDMIAEKLAPSEITEELPSSQLMPVKKQLQGASWELQSLRPHGEGAGFSSCWKVWGPSAHHTHLS

SEQ ID NO: 99906 - protein, 131 aa, Homo sapiens
  Payload ID: 19914
  Gene Name: zinc finger protein 396
  ENSP ID: ENSP00000468381
MSAKLGKSSSLLTQTSEECNGILTEKMEEEEQTCDPDSSLHWSSSYSPETFRQQFRQFGYQDSPGPHEALSRLWELCHLWLRPEVHTKEQILELLVLEQFLAILPKELQAWVQKHHPENGEETVTMLEDVE

SEQ ID NO: 99907 - protein, 275 aa, Homo sapiens
  Payload ID: 19915
  Gene Name: zinc finger protein 397
  Uniprot ID: Q8NF99
  ENSP ID: ENSP00000261333
MAVESGVISTLIPQDPPEQELILVKVEDNFSWDEKFKQNGSTQSCQELFRQQFRKFCYQETPGPREALSRLQELCYQWLMPELHTKEQILELLVLEQFLSILPEELQIWVQQHNPESGEEAVTLLEDLEREFDDPGQQVPASPQGPAVPWKDLTCLRASQESTDIHLQPLKTQLKSWKPCLSPKSDCENSETATKEGISEEKSQGLPQEPSFRGIKLSRPPKASSAIRWECVSPGSFPGDIIAAEATHSTISCFAINTLPATILPSKNVNRKYFS

SEQ ID NO: 99908 - protein, 534 aa, Homo sapiens
  Payload ID: 19915
  Gene Name: zinc finger protein 397
  Uniprot ID: Q8NF99
  ENSP ID: ENSP00000331577
MAVESGVISTLIPQDPPEQELILVKVEDNFSWDEKFKQNGSTQSCQELFRQQFRKFCYQETPGPREALSRLQELCYQWLMPELHTKEQILELLVLEQFLSILPEELQIWVQQHNPESGEEAVTLLEDLEREFDDPGQQVPASPQGPAVPWKDLTCLRASQESTDIHLQPLKTQLKSWKPCLSPKSDCENSETATKEGISEEKSQGLPQEPSFRGISEHESNLVWKQGSATGEKLRSPSQGGSFSQVIFTNKSLGKRDLYDEAERCLILTTDSIMCQKVPPEERPYRCDVCGHSFKQHSSLTQHQRIHTGEKPYKCNQCGKAFSLRSYLIIHQRIHSGEKAYECSECGKAFNQSSALIRHRKIHTGEKACKCNECGKAFSQSSYLIIHQRIHTGEKPYECNECGKTFSQSSKLIRHQRIHTGERPYECNECGKAFRQSSELITHQRIHSGEKPYECSECGKAFSLSSNLIRHQRIHSGEEPYQCNECGKTFKRSSALVQHQRIHSGDEAYICNECGKAFRHRSVLMRHQRVHTIK

SEQ ID NO: 99909 - protein, 245 aa, Homo sapiens
  Payload ID: 19915
  Gene Name: zinc finger protein 397
  ENSP ID: ENSP00000347850
MAVESGVISTLIPQDPPEQELILVKVEDNFSWDEKFKQNGSTQSCQELFRQQFRKFCYQETPGPREALSRLQELCYQWLMPELHTKEQILELLVLEQFLSILPEELQIWVQQHNPESGEEAVTLLEDLEREFDDPGQQVPASPQGPAVPWKDLTCLRASQESTDIHLQPLKTQLKSWKPCLSPKSELSRPPKASSAIRWECVSPGSFPGDIIAAEATHSTISCFAINTLPATILPSKNVNRKYFS

SEQ ID NO: 99910 - protein, 201 aa, Homo sapiens
  Payload ID: 19915
  Gene Name: zinc finger protein 397
  ENSP ID: ENSP00000464808
  MOD_RES (1)..(1): Any amino acid
XAVESGVISTLIPQDPPEQELILVKVEDNFSWDEKFKQNGSTQSCQELFRQQFRKFCYQETPGPREALSRLQELCYQWLMPELHTKEQILELLVLEQFLSILPEELQIWVQQHNPESGEEAVTLLEDLEREFDDPGQQVGTEKSDVGKGIYSLEHVMVPASPQGPAVPWKDLTCLRASQESTDIHLQPLKTQLKSWKPCLS

SEQ ID NO: 99911 - protein, 207 aa, Homo sapiens
  Payload ID: 19915
  Gene Name: zinc finger protein 397
  Uniprot ID: Q8NF99
  ENSP ID: ENSP00000466317
MAVESGVISTLIPQDPPEQELILVKVEDNFSWDEKFKQNGSTQSCQELFRQQFRKFCYQETPGPREALSRLQELCYQWLMPELHTKEQILELLVLEQFLSILPEELQIWVQQHNPESGEEAVTLLEDLEREFDDPGQQVPASPQGPAVPWKDLTCLRASQESTDIHLQPLKTQLKSWKPCLSPKSGEEWEIIWKLLTLRPLFLRMQN

SEQ ID NO: 99912 - protein, 207 aa, Homo sapiens; identical to SEQ ID NO: 99911
  Payload ID: 19915
  Gene Name: zinc finger protein 397
  Uniprot ID: Q8NF99
  ENSP ID: ENSP00000466760

SEQ ID NO: 99913 - protein, 188 aa, Homo sapiens
  Payload ID: 19915
  Gene Name: zinc finger protein 397
  ENSP ID: ENSP00000468413
MAVESGVISTLIPQDPPEQELILVKVEDNFSWDEKFKQNGSTQSCQELFRQQFRKFCYQETPGPREALSRLQELCYQWLMPELHTKEQILELLVLEQFLSILPEELQIWVQQHNPESGEEAVTLLEDLEREFDDPGQQVPASPQGPAVPWKDLTCLRASQESTDIHLQPLKTQLKSWKPCLSPKSDFS

SEQ ID NO: 99914 - protein, 138 aa, Homo sapiens
  Payload ID: 19915
  Gene Name: zinc finger protein 397
  ENSP ID: ENSP00000472393
MAVESGVISTLIPQDPPEQELILVKVEDNFSWDEKFKQNGSTQSCQELFRQQFRKFCYQETPGPREALSRLQELCYQWLMPELHTKEQILELLVLEQFLSILPEELQIWVQQHNPESGEEAVTLLEDLEREFDDPGQQ

SEQ ID NO: 99915 - protein, 471 aa, Homo sapiens
  Payload ID: 19916
  Gene Name: zinc finger protein 398
  Uniprot ID: Q8TD17
  ENSP ID: ENSP00000389972
MKGNYESLISMDYAINQPDVLSQIQPEGEHNTEDQAGPEESEIPTDPSEEPGISTSDILSWIKQEEEPQVGAPPESKESDVYKSTYADEELVIKAEGLARSSLCPEVPVPFSSPPAAAKDAFSDVAFKSQQSTSMTPFGRPATDLPEASEGQVTFTQLGSYPLPPPVGEQVFSCHHCGKNLSQDMLLTHQCSHATEHPLPCAQCPKHFTPQADLSSTSQDHASETPPTCPHCARTFTHPSRLTYHLRVHNSTERPFPCPDCPKRFADQARLTSHRRAHASERPFRCAQCGRSFSLKISLLLHQRGHAQERPFSCPQCGIDFNGHSALIRHQMIHTGERPYPCTDCSKSFMRKEHLLNHRRLHTGERPFSCPHCGKSFIRKHHLMKHQRIHTGERPYPCSYCGRSFRYKQTLKDHLRSGHNGGCGGDSDPSGQPPNPPGPLITGLETSGLGVNTEGLETNQWYGEGSGGGVL

SEQ ID NO: 99916 - protein, 471 aa, Homo sapiens; identical to SEQ ID NO: 99915
  Payload ID: 19916
  Gene Name: zinc finger protein 398
  Uniprot ID: Q8TD17
  ENSP ID: ENSP00000418564

SEQ ID NO: 99917 - protein, 471 aa, Homo sapiens; identical to SEQ ID NO: 99915
  Payload ID: 19916
  Gene Name: zinc finger protein 398
  Uniprot ID: Q8TD17
  ENSP ID: ENSP00000419391

SEQ ID NO: 99918 - protein, 642 aa, Homo sapiens
  Payload ID: 19916
  Gene Name: zinc finger protein 398
  Uniprot ID: Q8TD17
  ENSP ID: ENSP00000420418
MAEAAPAPTSEWDSECLTSLQPLPLPTPPAANEAHLQTAAISLWTVVAAVQAIERKVEIHSRRLLHLEGRTGTAEKKLASCEKTVTELGNQLEGKWAVLGTLLQEYGLLQRRLENLENLLRNRNFWILRLPPGIKGDIPKVPVAFDDVSIYFSTPEWEKLEEWQKELYKNIMKGNYESLISMDYAINQPDVLSQIQPEGEHNTEDQAGPEESEIPTDPSEEPGISTSDILSWIKQEEEPQVGAPPESKESDVYKSTYADEELVIKAEGLARSSLCPEVPVPFSSPPAAAKDAFSDVAFKSQQSTSMTPFGRPATDLPEASEGQVTFTQLGSYPLPPPVGEQVFSCHHCGKNLSQDMLLTHQCSHATEHPLPCAQCPKHFTPQADLSSTSQDHASETPPTCPHCARTFTHPSRLTYHLRVHNSTERPFPCPDCPKRFADQARLTSHRRAHASERPFRCAQCGRSFSLKISLLLHQRGHAQERPFSCPQCGIDFNGHSALIRHQMIHTGERPYPCTDCSKSFMRKEHLLNHRRLHTGERPFSCPHCGKSFIRKHHLMKHQRIHTGERPYPCSYCGRSFRYKQTLKDHLRSGHNGGCGGDSDPSGQPPNPPGPLITGLETSGLGVNTEGLETNQWYGEGSGGGVL

SEQ ID NO: 99919 - protein, 551 aa, Homo sapiens
  Payload ID: 19917
  Gene Name: zinc finger protein 404
  ENSP ID: ENSP00000319479
FQVPLTFSDVAIDFSQEEWEYLNSDQRDLYRDVMLENYTNLVSLDFNFTTESNKLSSEKRNYEVNAYHQETWKRNKTFNLMRFIFRTDPQYTIEFGRQQRPKVGCFSQMIFKKHKSLPLHKRNNTREKSYECKEYKKGFRKYLHLTEHLRDHTGVIPYECNECGKAFVVFQHFIRHRKIHTDLKPYECNGCEKAFRFYSQLIQHQIIHTGMKPYECKQCGKAFRRHSHLTEHQKIHVGLKPFECKECGETFRLYRHMCLHQKIHHGVKPYKCKECGKAFGHRSSLYQHKKIHSGEKPYKCEQCEKAFVRSYLLVEHQRSHTGEKPHECMECGKAFGKGSSLLKHKRIHSSEKLYDCKDCGKAFCRGSQLTQHQRIHTGEKPHECKECGKTFKLHSYLIQHQIIHTDLKPYECKQCGKAFSRVGDLKTHQSIHAGEKPYECKECGKTFRLNSQLIYHQTIHTGLKPYVCKECKKAFRSISGLSQHKRIHTGEKPYECKECDKAFNRSDRLTQHETIHTGVKPQKCKECGKAFSHCYQLSQHQRFHHGERLLM

SEQ ID NO: 99920 - protein, 552 aa, Homo sapiens
  Payload ID: 19917
  Gene Name: zinc finger protein 404
  Uniprot ID: Q494X3
  ENSP ID: ENSP00000466051
MARVPLTFSDVAIDFSQEEWEYLNSDQRDLYRDVMLENYTNLVSLDFNFTTESNKLSSEKRNYEVNAYHQETWKRNKTFNLMRFIFRTDPQYTIEFGRQQRPKVGCFSQMIFKKHKSLPLHKRNNTREKSYECKEYKKGFRKYLHLTEHLRDHTGVIPYECNECGKAFVVFQHFIRHRKIHTDLKPYECNGCEKAFRFYSQLIQHQIIHTGMKPYECKQCGKAFRRHSHLTEHQKIHVGLKPFECKECGETFRLYRHMCLHQKIHHGVKPYKCKECGKAFGHRSSLYQHKKIHSGEKPYKCEQCEKAFVRSYLLVEHQRSHTGEKPHECMECGKAFGKGSSLLKHKRIHSSEKLYDCKDCGKAFCRGSQLTQHQRIHTGEKPHECKECGKTFKLHSYLIQHQIIHTDLKPYECKQCGKAFSRVGDLKTHQSIHAGEKPYECKECGKTFRLNSQLIYHQTIHTGLKPYVCKECKKAFRSISGLSQHKRIHTGEKPYECKECDKAFNRSDRLTQHETIHTGVKPQKCKECGKAFSHCYQLSQHQRFHHGERLLM

SEQ ID NO: 99921 - protein, 2248 aa, Homo sapiens
  Payload ID: 19918
  Gene Name: zinc finger protein 407
  Uniprot ID: Q9C0G0
  ENSP ID: ENSP00000299687
MMDSENKPENDEDEKINKEAQDLTKLSSHNEDGGPVSDVIASFPENSMGKRGFSESSNSDSVVIGEDRNKHASKRRKLDEAEPLKSGKQGICRLETSESSVTEGGIALDETGKETFLSDCTVGGTCLPNALSPSCNFSTIDVVSLKTDTEKTSAQEMVSLDLERESPFPPKEISVSCTIGNVDTVLKCSICGHLFSSCSDLEKHAESHMQQPKEHTCCHCSHKAESSSALHMHIKQAHGPQKVFSCDLCGFQCSEENLLNAHYLGKTHLRRQNLAARGGFVQILTKQPFPKKSRTMATKNVHSKPRTSKSIAKNSDSKGLRNVGSTFKDFRGSISKQSGSSSELLVEMMPSRNTLSQEVEIVEEHVTSLGLAQNPENQSRKLDTLVTSEGLLEKLESTKNTLQAAHGNSVTSRPRPERNILVLGNSFRRRSSTFTLKGQAKKRFNLLGIKRGTSETQRMYMKHLRTQMKTHDAESVLKHLEACSSVQRVCVTTSETQEAEQGQGSARPPDSGLHSLTVKPASGSQTLCACTDCGQVATNRTDLEIHVKRCHAREMKFYCRTCDFSSMSRRDLDEHLHSNQHQQTASVLSCQCCSFISLDEINLRDHMKEKHNMHFLCTPCNLFFLSEKDVEEHKATEKHINSLVQPKTLQSSNSDLVLQTLPLSTLESENAKESMDDSGKASQEEPLKSRVSHGNEVRHSSKPQFQCKKCFYKTRSSTVLTRHIKLRHGQDYHFLCKACNLYSLSKEGMEKHIKRSKHLENAKKNNIGLSFEECIERVCIGANDKKEEFDVSGNGRIEGHIGVQLQEHSYLEKGMLASEELSQSGGSTKDDELASTTTPKRGRPKGNISRTCSHCGLLASSITNLTVHIRRKHSHQYSYLCKVCKYYTVTKGDMERHCATKKHKGRVEIEASGKHSSDIIVGPEGGSLEAGKKNAGSAVTMSDEHANKPAESPTSVLEKPDRGNSIEAEVENVFHSLDGEVNSHLLDKKEQISSEPEDFAQPGDVYSQRDVTGTGENKCLHCEFSAHSSASLELHVKRKHTKEFEFYCMACDYYAVTRREMTRHAATEKHKMKRQSYLNSANVEAGSADMSKNIIMPEEEHQQNSEEFQIISGQPSDTLKSRNAADCSILNENTNLDMSKVLCAADSVEVETEEESNFNEDHSFCETFQQAPVKDKVRKPEEMMSLTMSSNYGSPSRFQNENSGSSALNCETAKKNHEISNDAGELRVHCEGEGGNAGDGGGVVPHRHLCPVTLDGERSAESPVLVVTRITREQGNLESGGQNRVARGHGLEDLKGVQEDPVLGNKEILMNSQHETEFILEEDGPASDSTVESSDVYETIISIDDKGQAMYSFGRFDSSIIRIKNPEDGELIDQSEEGLIATGVRISELPLKDCAQGVKKKKSEGSSIGESTRIRCDDCGFLADGLSGLNVHIAMKHPTKEKHFHCLLCGKSFYTESNLHQHLASAGHMRNEQASVEELPEGGATFKCVKCTEPFDSEQNLFLHIKGQHEELLREVNKYIVEDTEQINREREENQGNVCKYCGKMCRSSNSMAFLAHIRTHTGSKPFKCKICHFATAQLGDARNHVKRHLGMREYKCHVCGVAFVMKKHLNTHLLGKHGVGTPKERKFTCHLCDRSFTEKWALNNHMKLHTGEKPFKCTWPTCHYSFLTASAMKDHYRTHTGEKSFLCDLCGFAGGTRHALTKHRRQHTGEKPFKCDECNFASTTQSHLTRHKRVHTGEKPYRCPWCDYRSNCAENIRKHILHTGKHEGVKMYNCPKCDYGTNVPVEFRNHLKEQHPDIENPDLAYLHAGIVSKSYECRLKGQGATFVETDSPFTAAALAEEPLVKEKPLRSSRRPAPPPEQVQQVIIFQGYDGEFALDPSVEETAAATLQTLAMAGQVARVVHITEDGQVIATSQSGAHVGSVVPGPILPEQLADGATQVVVVGGSMEGHGMDESLSPGGAVIQQVTKQEILNLSEAGVAPPEASSALDALLCAVTELGEVEGRAGLEEQGRPGAKDVLIQLPGQEVSHVAADPEAPEIQMFPQAQESPAAVEVLTQVVHPSAAMASQERAQVAFKKMVQGVLQFAVCDTAAAGQLVKDGVTQVVVSEEGAVHMVAGEGAQIIMQEAQGEHMDLVESDGEISQIIVTEELVQAMVQESSGGFSEGTTHYILTELPPGVQDEPGLYSHTVLETADSQELLQAGATLGTEAGAPSRAEQLASVVIYTQEGSSAAAAIQSQRESSELQEA

SEQ ID NO: 99922 - protein, 1660 aa, Homo sapiens
  Payload ID: 19918
  Gene Name: zinc finger protein 407
  Uniprot ID: Q9C0G0
  ENSP ID: ENSP00000310359
MMDSENKPENDEDEKINKEAQDLTKLSSHNEDGGPVSDVIASFPENSMGKRGFSESSNSDSVVIGEDRNKHASKRRKLDEAEPLKSGKQGICRLETSESSVTEGGIALDETGKETFLSDCTVGGTCLPNALSPSCNFSTIDVVSLKTDTEKTSAQEMVSLDLERESPFPPKEISVSCTIGNVDTVLKCSICGHLFSSCSDLEKHAESHMQQPKEHTCCHCSHKAESSSALHMHIKQAHGPQKVFSCDLCGFQCSEENLLNAHYLGKTHLRRQNLAARGGFVQILTKQPFPKKSRTMATKNVHSKPRTSKSIAKNSDSKGLRNVGSTFKDFRGSISKQSGSSSELLVEMMPSRNTLSQEVEIVEEHVTSLGLAQNPENQSRKLDTLVTSEGLLEKLESTKNTLQAAHGNSVTSRPRPERNILVLGNSFRRRSSTFTLKGQAKKRFNLLGIKRGTSETQRMYMKHLRTQMKTHDAESVLKHLEACSSVQRVCVTTSETQEAEQGQGSARPPDSGLHSLTVKPASGSQTLCACTDCGQVATNRTDLEIHVKRCHAREMKFYCRTCDFSSMSRRDLDEHLHSNQHQQTASVLSCQCCSFISLDEINLRDHMKEKHNMHFLCTPCNLFFLSEKDVEEHKATEKHINSLVQPKTLQSSNSDLVLQTLPLSTLESENAKESMDDSGKASQEEPLKSRVSHGNEVRHSSKPQFQCKKCFYKTRSSTVLTRHIKLRHGQDYHFLCKACNLYSLSKEGMEKHIKRSKHLENAKKNNIGLSFEECIERVCIGANDKKEEFDVSGNGRIEGHIGVQLQEHSYLEKGMLASEELSQSGGSTKDDELASTTTPKRGRPKGNISRTCSHCGLLASSITNLTVHIRRKHSHQYSYLCKVCKYYTVTKGDMERHCATKKHKGRVEIEASGKHSSDIIVGPEGGSLEAGKKNAGSAVTMSDEHANKPAESPTSVLEKPDRGNSIEAEVENVFHSLDGEVNSHLLDKKEQISSEPEDFAQPGDVYSQRDVTGTGENKCLHCEFSAHSSASLELHVKRKHTKEFEFYCMACDYYAVTRREMTRHAATEKHKMKRQSYLNSANVEAGSADMSKNIIMPEEEHQQNSEEFQIISGQPSDTLKSRNAADCSILNENTNLDMSKVLCAADSVEVETEEESNFNEDHSFCETFQQAPVKDKVRKPEEMMSLTMSSNYGSPSRFQNENSGSSALNCETAKKNHEISNDAGELRVHCEGEGGNAGDGGGVVPHRHLCPVTLDGERSAESPVLVVTRITREQGNLESGGQNRVARGHGLEDLKGVQEDPVLGNKEILMNSQHETEFILEEDGPASDSTVESSDVYETIISIDDKGQAMYSFGRFDSSIIRIKNPEDGELIDQSEEGLIATGVRISELPLKDCAQGVKKKKSEGSSIGESTRIRCDDCGFLADGLSGLNVHIAMKHPTKEKHFHCLLCGKSFYTESNLHQHLASAGHMRNEQASVEELPEGGATFKCVKCTEPFDSEQNLFLHIKGQHEELLREVNKYIVEDTEQINREREENQGNVCKYCGKMCRSSNSMAFLAHIRTHTGSKPFKCKICHFATAQLGDARNHVKRHLGMREYKCHVCGVAFVMKKHLNTHLLGKHGVGTPKERVKVAYRKIGTLPGIQNNRNASSASEAQSLCEHFS

SEQ ID NO: 99923 - protein, 1660 aa, Homo sapiens; identical to SEQ ID NO: 99922
  Payload ID: 19918
  Gene Name: zinc finger protein 407
  Uniprot ID: Q9C0G0
  ENSP ID: ENSP00000462348

SEQ ID NO: 99924 - protein, 1815 aa, Homo sapiens
  Payload ID: 19918
  Gene Name: zinc finger protein 407
  Uniprot ID: Q9C0G0
  ENSP ID: ENSP00000463270
MMDSENKPENDEDEKINKEAQDLTKLSSHNEDGGPVSDVIASFPENSMGKRGFSESSNSDSVVIGEDRNKHASKRRKLDEAEPLKSGKQGICRLETSESSVTEGGIALDETGKETFLSDCTVGGTCLPNALSPSCNFSTIDVVSLKTDTEKTSAQEMVSLDLERESPFPPKEISVSCTIGNVDTVLKCSICGHLFSSCSDLEKHAESHMQQPKEHTCCHCSHKAESSSALHMHIKQAHGPQKVFSCDLCGFQCSEENLLNAHYLGKTHLRRQNLAARGGFVQILTKQPFPKKSRTMATKNVHSKPRTSKSIAKNSDSKGLRNVGSTFKDFRGSISKQSGSSSELLVEMMPSRNTLSQEVEIVEEHVTSLGLAQNPENQSRKLDTLVTSEGLLEKLESTKNTLQAAHGNSVTSRPRPERNILVLGNSFRRRSSTFTLKGQAKKRFNLLGIKRGTSETQRMYMKHLRTQMKTHDAESVLKHLEACSSVQRVCVTTSETQEAEQGQGSARPPDSGLHSLTVKPASGSQTLCACTDCGQVATNRTDLEIHVKRCHAREMKFYCRTCDFSSMSRRDLDEHLHSNQHQQTASVLSCQCCSFISLDEINLRDHMKEKHNMHFLCTPCNLFFLSEKDVEEHKATEKHINSLVQPKTLQSSNSDLVLQTLPLSTLESENAKESMDDSGKASQEEPLKSRVSHGNEVRHSSKPQFQCKKCFYKTRSSTVLTRHIKLRHGQDYHFLCKACNLYSLSKEGMEKHIKRSKHLENAKKNNIGLSFEECIERVCIGANDKKEEFDVSGNGRIEGHIGVQLQEHSYLEKGMLASEELSQSGGSTKDDELASTTTPKRGRPKGNISRTCSHCGLLASSITNLTVHIRRKHSHQYSYLCKVCKYYTVTKGDMERHCATKKHKGRVEIEASGKHSSDIIVGPEGGSLEAGKKNAGSAVTMSDEHANKPAESPTSVLEKPDRGNSIEAEVENVFHSLDGEVNSHLLDKKEQISSEPEDFAQPGDVYSQRDVTGTGENKCLHCEFSAHSSASLELHVKRKHTKEFEFYCMACDYYAVTRREMTRHAATEKHKMKRQSYLNSANVEAGSADMSKNIIMPEEEHQQNSEEFQIISGQPSDTLKSRNAADCSILNENTNLDMSKVLCAADSVEVETEEESNFNEDHSFCETFQQAPVKDKVRKPEEMMSLTMSSNYGSPSRFQNENSGSSALNCETAKKNHEISNDAGELRVHCEGEGGNAGDGGGVVPHRHLCPVTLDGERSAESPVLVVTRITREQGNLESGGQNRVARGHGLEDLKGVQEDPVLGNKEILMNSQHETEFILEEDGPASDSTVESSDVYETIISIDDKGQAMYSFGRFDSSIIRIKNPEDGELIDQSEEGLIATGVRISELPLKDCAQGVKKKKSEGSSIGESTRIRCDDCGFLADGLSGLNVHIAMKHPTKEKHFHCLLCGKSFYTESNLHQHLASAGHMRNEQASVEELPEGGATFKCVKCTEPFDSEQNLFLHIKGQHEELLREVNKYIVEDTEQINREREENQGNVCKYCGKMCRSSNSMAFLAHIRTHTGSKPFKCKICHFATAQLGDARNHVKRHLGMREYKCHVCGVAFVMKKHLNTHLLGKHGVGTPKERKFTCHLCDRSFTEKWALNNHMKLHTGEKPFKCTWPTCHYSFLTASAMKDHYRTHTGEKSFLCDLCGFAGGTRHALTKHRRQHTGEKPFKCDECNFASTTQSHLTRHKRVHTGEKPYRCPWCDYRSNCAENIRKHILHTGKHEGVKMYNCPKCDYGTNVPVEFRNHLKEQHPDIENPDLAYLHAGKGQKL

SEQ ID NO: 99925 - protein, 137 aa, Homo sapiens
  Payload ID: 19918
  Gene Name: zinc finger protein 407
  ENSP ID: ENSP00000479246
  MOD_RES (1)..(1): Any amino acid
XCHLCDRSFTEKWALNNHMKLHTGEKPFKCTWPTCHYSFLTASAMKDHYRTHTGEKSFLCDLCGFAGGTRHALTKHRRQHTGEKPFKCDECNFASTTQSHLTRHKRVHTGEKPYRCPWCDYSFFVSTYSEILPVWSL

SEQ ID NO: 99926 - protein, 129 aa, Homo sapiens
  Payload ID: 19918
  Gene Name: zinc finger protein 407
  ENSP ID: ENSP00000481798
KFTCHLCDRSFTEKWALNNHMKLHTGEKPFKCTWPTCHYSFLTASAMKDHYRTHTGEKSFLCDLCGFAGGTRHALTKHRRQHTGEKPFKCDECNFASTTQSHLTRHKRVHTGEKPYRCPWCDYSAYDWV

SEQ ID NO: 99927 - protein, 720 aa, Homo sapiens
  Payload ID: 19919
  Gene Name: zinc finger protein 408
  Uniprot ID: Q9H9D4
  ENSP ID: ENSP00000309606
MEEAEELLLEGKKALQLAREPRLGLDLGWNPSGEGCTQGLKDVPPEPTRDILALKSLPRGLALGPSLAKEQRLGVWCVGDPLQPGLLWGPLEEESASKEKGEGVKPRQEENLSLGPWGDVCACEQSSGWTSLVQRGRLESEGNVAPVRISERLHLQVYQLVLPGSELLLWPQPSSEGPSLTQPGLDKEAAVAVVTEVESAVQQEVASPGEDAAEPCIDPGSQSPSGIQAENMVSPGLKFPTQDRISKDSQPLGPLLQDGDVDEECPAQAQMPPELQSNSATQQDPDGSGASFSSSARGTQPHGYLAKKLHSPSDQCPPRAKTPEPGAQQSGFPTLSRSPPGPAGSSPKQGRRYRCGECGKAFLQLCHLKKHAFVHTGHKPFLCTECGKSYSSEESFKAHMLGHRGVRPFPCPQCDKAYGTQRDLKEHQVVHSGARPFACDQCGKAFARRPSLRLHRKTHQVPAAPAPCPCPVCGRPLANQGSLRNHMRLHTGEKPFLCPHCGRAFRQRGNLRGHLRLHTGERPYRCPHCADAFPQLPELRRHLISHTGEAHLCPVCGKALRDPHTLRAHERLHSGERPFPCPQCGRAYTLATKLRRHLKSHLEDKPYRCPTCGMGYTLPQSLRRHQLSHRPEAPCSPPSVPSAASEPTVVLLQAEPQLLDTHREEEVSPARDVVEVTISESQEKCFVVPEEPDAAPSLVLIHKDMGLGAWAEVVEVEMGT

SEQ ID NO: 99928 - protein, 779 aa, Homo sapiens
  Payload ID: 19920
  Gene Name: zinc finger protein 41
  Uniprot ID: P51814
  ENSP ID: ENSP00000315173
MAANGDSPPWSPALAAEGRGSSCEASVSFEDVTVDFSKEEWQHLDPAQRRLYWDVTLENYSHLLSVGYQIPKSEAAFKLEQGEGPWMLEGEAPHQSCSGEAIGKMQQQGIPGGIFFHCERFDQPIGEDSLCSILEELWQDNDQLEQRQENQNNLLSHVKVLIKERGYEHKNIEKIIHVTTKLVPSIKRLHNCDTILKHTLNSHNHNRNSATKNLGKIFGNGNNFPHSPSSTKNENAKTGANSCEHDHYEKHLSHKQAPTHHQKIHPEEKLYVCTECVMGFTQKSHLFEHQRIHAGEKSRECDKSNKVFPQKPQVDVHPSVYTGEKPYLCTQCGKVFTLKSNLITHQKIHTGQKPYKCSECGKAFFQRSDLFRHLRIHTGEKPYECSECGKGFSQNSDLSIHQKTHTGEKHYECNECGKAFTRKSALRMHQRIHTGEKPYVCADCGKAFIQKSHFNTHQRIHTGEKPYECSDCGKSFTKKSQLHVHQRIHTGEKPYICTECGKVFTHRTNLTTHQKTHTGEKPYMCAECGKAFTDQSNLIKHQKTHTGEKPYKCNGCGKAFIWKSRLKIHQKSHIGERHYECKDCGKAFIQKSTLSVHQRIHTGEKPYVCPECGKAFIQKSHFIAHHRIHTGEKPYECSDCGKCFTKKSQLRVHQKIHTGEKPNICAECGKAFTDRSNLITHQKIHTREKPYECGDCGKTFTWKSRLNIHQKSHTGERHYECSKCGKAFIQKATLSMHQIIHTGKKPYACTECQKAFTDRSNLIKHQKMHSGEKRYKASD

SEQ ID NO: 99929 - protein, 779 aa, Homo sapiens; identical to SEQ ID NO: 99928
  Payload ID: 19920
  Gene Name: zinc finger protein 41
  Uniprot ID: P51814
  ENSP ID: ENSP00000366265

SEQ ID NO: 99930 - protein, 178 aa, Homo sapiens
  Payload ID: 19920
  Gene Name: zinc finger protein 41
  ENSP ID: ENSP00000390385
MGTLPHGPRPWLQRDVAAHVSADHAALNSIVSLQASVSFEDVTVDFSKEEWQHLDPAQRRLYWDVTLENYSHLLSVGYQIPKSEAAFKLEQGEGPWMLEGEAPHQSCSGEAIGKMQQQGIPGGIFFHCERFDQPIGEDSLCSILEELWQDNDQLEQRQENQNNLLSHVKVLIKERGYE

SEQ ID NO: 99931 - protein, 431 aa, Homo sapiens
  Payload ID: 19921
  Gene Name: zinc finger protein 410
  Uniprot ID: Q86VK4
  ENSP ID: ENSP00000323293
MLSDELESKPELLVQFVQNTSIPLGQGLVESEAKDITCLSLLPVTEASECSRLMLPDDTTNHSNSSKEVPSSAVLRSLRVNVGPDGEETRAQTVQKSPEFLSTSESSSLLQDLQPSDSTSFILLNLTRAGLGSSAEHLVFVQDEAEDSGNDFLSSESTDSSIPWFLRVQELAHDSLIAATRAQLAKNAKTSSNGENVHLGSGDGQSKDSGPLPQVEKKLKCTVEGCDRTFVWPAHFKYHLKTHRNDRSFICPAEGCGKSFYVLQRLKVHMRTHNGEKPFMCHESGCGKQFTTAGNLKNHRRIHTGEKPFLCEAQGCGRSFAEYSSLRKHLVVHSGEKPHQCQVCGKTFSQSGSRNVHMRKHHLQLGAAGSQEQEQTEVLAEGSPRSLSSVPDVTHHLVTMQSGRQSYEVSVLTAVNPQELLNQGDLTERRT

SEQ ID NO: 99932 - protein, 425 aa, Homo sapiens
  Payload ID: 19921
  Gene Name: zinc finger protein 410
  ENSP ID: ENSP00000334170
MLPDDTTNHSNSSKEVPSSAVLRSLRVNVGPDGEETRAQTVQKSPEFLSTSESSSLLQDLQPSDSTSFILLNLTRAGLGSSAEHLVFVQDEAEDSGNDFLSSESTDSSIPWFLRVQELAHDSLIAATRAQLAKNAKTSSNGENVHLGSGDGQSKDSGPLPQVEKKLKCTVEGCDRTFVWPAHFKYHLKTHRNDRSFICPAEGCGKSFYVLQRLKVHMRTHNGEKPFMCHESGCGKQFTTAGNLKNHRRIHTGEKPFLCEAQGCGRSFAEYSSLRKHLVVHSGEKPHQCQVCGKTFSQSGSRNVHMRKHHLQLGAAGSQEQEQTAEPLMGSSLLEEASVPSKNLVSMNSQPSLGGESLNLPNTNSILGVDDEVLAEGSPRSLSSVPDVTHHLVTMQSGRQSYEVSVLTAVNPQELLNQGDLTERRT

SEQ ID NO: 99933 - protein, 272 aa, Homo sapiens
  Payload ID: 19921
  Gene Name: zinc finger protein 410
  Uniprot ID: Q86VK4
  ENSP ID: ENSP00000381208
MLSDELESKPELLVQFVQNTSIPLGQGLVESEAKDITCLSLLPVTEASECSRLMLPDDTTNHSNSSKEVPSSAVLRSLRVNVGPDGEETRAQTVQKSPEFLSTSESSSLLQDLQPSDSTSFILLNLTRAGLGSSAEHLVFVQDEAEDSGNDFLSSESTDSSIPWFLRVQELAHDSLIAATRAQLAKNAKTSSNGENVHLGSGDGQSKDSGPLPQVEKKLKCTVEGCDRTFVWPAHFKYHLKTHRRLWEKLLCAAEAEGAHEDPQWREALYVP

SEQ ID NO: 99934 - protein, 516 aa, Homo sapiens
  Payload ID: 19921
  Gene Name: zinc finger protein 410
  Uniprot ID: Q86VK4
  ENSP ID: ENSP00000407130
MLSDELESKPELLVQFVQNTSIPLGQGLVESEAKDITCLSLLPVTEASECSRLMLPEPVPWREEDGKSGCSDLNDTTNHSNSSKEVPSSAVLRSLRVNVGPDGEETRAQTVQKSPEFLSTSESSSLLQDLQPSDSTSFILLNLTRAGLGSSAEHLVFVQDEAEDSGNDFLSSESTDSSIPWFLRVQELAHDSLIAATRAQLAKNAKTSSNGENVHLGSGDGQSKDSGPLPQVEKKLKCTVEGCDRTFVWPAHFKYHLKTHRNDRSFICPAEGCGKSFYVLQRLKVHMRTHNGEKPFMCHESGCGKQFTTAGNLKNHRRIHTGEKPFLCEAQGCGRSFAEYSSLRKHLVVHSGEKPHQCQVCGKTFSQSGSRNVHMRKHHLQLGAAGSQEQEQTAEPLMGSSLLEEASVPSKNLVSMNSQPSLGGESLNLPNTNSILGVDDEVLAEGSPRSLSSVPDVTHHLVTMQSGRQSYEVSVLTAVNPQESLAPLPRLECSGAFSAHCNLCLPGSSDSPASAS

SEQ ID NO: 99935 - protein, 405 aa, Homo sapiens
  Payload ID: 19921
  Gene Name: zinc finger protein 410
  Uniprot ID: Q86VK4
  ENSP ID: ENSP00000442228
MLSDELESKPELLVQFVQNTSIPLGQGLVESEAKDITCLSLLPVTEASECSRLMLPGLGSSAEHLVFVQDEAEDSGNDFLSSESTDSSIPWFLRVQELAHDSLIAATRAQLAKNAKTSSNGENVHLGSGDGQSKDSGPLPQVEKKLKCTVEGCDRTFVWPAHFKYHLKTHRNDRSFICPAEGCGKSFYVLQRLKVHMRTHNGEKPFMCHESGCGKQFTTAGNLKNHRRIHTGEKPFLCEAQGCGRSFAEYSSLRKHLVVHSGEKPHQCQVCGKTFSQSGSRNVHMRKHHLQLGAAGSQEQEQTAEPLMGSSLLEEASVPSKNLVSMNSQPSLGGESLNLPNTNSILGVDDEVLAEGSPRSLSSVPDVTHHLVTMQSGRQSYEVSVLTAVNPQELLNQGDLTERRT

SEQ ID NO: 99936 - protein, 127 aa, Homo sapiens
  Payload ID: 19921
  Gene Name: zinc finger protein 410
  ENSP ID: ENSP00000450569
MLSDELESKPECCLFSPQLLVQFVQNTSIPLGQGLVESEAKDITCLSLLPVTEASECSRLMLPDDTTNHSNSSKEVPSSAVLRSLRVNVGPDGEETRAQTVQKSPEFLSTSESSSLLQDLQPSDSTS

SEQ ID NO: 99937 - protein, 96 aa, Homo sapiens
  Payload ID: 19921
  Gene Name: zinc finger protein 410
  ENSP ID: ENSP00000450650
MLSDELESKPELLVQFVQNTSIPLGQGLVESEAKDITCLSLLPVTEASECSRLMLPGGPFLSCFEKPSGECGSRRRGDESSDCTEIPGVFVHFRVF

SEQ ID NO: 99938 - protein, 110 aa, Homo sapiens
  Payload ID: 19921
  Gene Name: zinc finger protein 410
  ENSP ID: ENSP00000450884
MRKHHLQLGAAGSQEQEQTAEPLMGSSLLEEASVPSKNLVSMNSQPSLGGESLNLPNTNSILGVDDEVLAEGSPRSLSSVPDVTHHLVTMQSGRQSYEVSVLTAVNPQEV

SEQ ID NO: 99939 - protein, 167 aa, Homo sapiens
  Payload ID: 19921
  Gene Name: zinc finger protein 410
  ENSP ID: ENSP00000451073
MLPDDTTNHSNSSKEVPSSAVLRSLRVNVGPDGEETRAQTVQKSPEFLSTSESSSLLQDLQPSDSTSFILLNLTRAGLGSSAEHLVFVQDEAEDSGNDFLSSESTDSSIPWFLRVQELAHDSLIAATRAQLAKNAKTSSNGEARRHFPCHYSVQRDFGNAVAGLSCI

SEQ ID NO: 99940 - protein, 70 aa, Homo sapiens
  Payload ID: 19921
  Gene Name: zinc finger protein 410
  ENSP ID: ENSP00000451116
MLSDELESKPELLVQFVQNTSIPLGQGLVESEAKDITCLSLLPVTEASECSRLMLPDDTTNHSNSSKEVP

SEQ ID NO: 99941 - protein, 74 aa, Homo sapiens
  Payload ID: 19921
  Gene Name: zinc finger protein 410
  ENSP ID: ENSP00000451458
MLSDELESKPELLVQFVQNTSIPLGQGLVESEAKDITCLSLLPVTEASECSRLMLPDDTTNHSNSSKEVPSSAV

SEQ ID NO: 99942 - protein, 169 aa, Homo sapiens
  Payload ID: 19921
  Gene Name: zinc finger protein 410
  ENSP ID: ENSP00000451620
  MOD_RES (1)..(1): Any amino acid
XCQVCGKTFSQSGSRNVHMRKHHLQLGAAGSQEQEQTAEPLMGSSLLEEASVPSKNLVSMNSQPSLGGESLNLPNTNSILGVDDEVLAEGSPRSLSSVPDVTHHLVTMQSGRQSYEVSVLTAVNPQEVESCYVAQAGVQWHHLGSLQPLPPEFKRFFCLSLLSSWDHSY

SEQ ID NO: 99943 - protein, 94 aa, Homo sapiens
  Payload ID: 19921
  Gene Name: zinc finger protein 410
  ENSP ID: ENSP00000451748
MRTHNGEKPFMCHESGCGKQFTTAGNLKNHRRIHTGEKPFLCEAQGCGRSFAEYSSLRKHLVVHSGEKPHQCQVCGKTFSQSGSRNVHMRKHHL

SEQ ID NO: 99944 - protein, 478 aa, Homo sapiens
  Payload ID: 19921
  Gene Name: zinc finger protein 410
  Uniprot ID: Q86VK4
  ENSP ID: ENSP00000451763
MLSDELESKPELLVQFVQNTSIPLGQGLVESEAKDITCLSLLPVTEASECSRLMLPDDTTNHSNSSKEVPSSAVLRSLRVNVGPDGEETRAQTVQKSPEFLSTSESSSLLQDLQPSDSTSFILLNLTRAGLGSSAEHLVFVQDEAEDSGNDFLSSESTDSSIPWFLRVQELAHDSLIAATRAQLAKNAKTSSNGENVHLGSGDGQSKDSGPLPQVEKKLKCTVEGCDRTFVWPAHFKYHLKTHRNDRSFICPAEGCGKSFYVLQRLKVHMRTHNGEKPFMCHESGCGKQFTTAGNLKNHRRIHTGEKPFLCEAQGCGRSFAEYSSLRKHLVVHSGEKPHQCQVCGKTFSQSGSRNVHMRKHHLQLGAAGSQEQEQTAEPLMGSSLLEEASVPSKNLVSMNSQPSLGGESLNLPNTNSILGVDDEVLAEGSPRSLSSVPDVTHHLVTMQSGRQSYEVSVLTAVNPQELLNQGDLTERRT

SEQ ID NO: 99945 - protein, 86 aa, Homo sapiens
  Payload ID: 19921
  Gene Name: zinc finger protein 410
  ENSP ID: ENSP00000451807
MLPDDTTNHSNSSKEVPSSAVLRSLRVNVGPDGEETRAQTVQKSPEFLSTSESSSLLQDLQPSDSTSFILLNLTRAGLGSSAEHLV

SEQ ID NO: 99946 - protein, 96 aa, Homo sapiens; identical to SEQ ID NO: 99937
  Payload ID: 19921
  Gene Name: zinc finger protein 410
  ENSP ID: ENSP00000451867

SEQ ID NO: 99947 - protein, 125 aa, Homo sapiens
  Payload ID: 19921
  Gene Name: zinc finger protein 410
  ENSP ID: ENSP00000452023
MLSDELESKPELLVQFVQNTSIPLGQGLVESEAKDITCLSLLPVTEASECSRLMLPDDTTNHSNSSKEVPSSAVLRSLRVNVGPDGEETRAQTVQKSPEFLSTSESSSLLQDLQPSDSTSFILLN

SEQ ID NO: 99948 - protein, 129 aa, Homo sapiens
  Payload ID: 19921
  Gene Name: zinc finger protein 410
  ENSP ID: ENSP00000452199
MLPDDTTNHSNSSKEVPSSAVLRSLRVNVGPDGEETRAQTVQKSPEFLSTSESSSLLQDLQPSDSTSFILLNLTRAGLGSSAEHLVFVQDEAEDSGNDFLSSESTDSSIPWFLRVQELAHDSLIAATRA

SEQ ID NO: 99949 - protein, 516 aa, Homo sapiens; identical to SEQ ID NO: 99934
  Payload ID: 19921
  Gene Name: zinc finger protein 410
  Uniprot ID: Q86VK4
  ENSP ID: ENSP00000483073

SEQ ID NO: 99950 - protein, 312 aa, Homo sapiens
  Payload ID: 19922
  Gene Name: zinc finger protein 414
  Uniprot ID: Q96IQ9
  ENSP ID: ENSP00000255616
MEEKPSGPIPDMLATAEPSSSETDKEVLSPAVPAAAPSSSMSEEPGPEQAATPPVWERGGAGGMQQGSSPAPDSCQPGPGPSPGLTSIVSGTSEDLRPPRRRPPPGKQIPCSSPGCCLSFPSVRDLAQHLRTHCPPTQSLEGKLFRCSALSCTETFPSMQELVAHSKLHYKPNRYFKCENCLLRFRTHRSLFKHLHVCAEHAQSPAPPPPPALDREPPAPERPPEVDPASAPGLPFPLLEPFTTPAPAPTGPFLPYLNPAPFGLSPPRLRPFLAAAPGPPASSAAVWKKSQGAGSSPRRPQGGSDAPSGACR

SEQ ID NO: 99951 - protein, 390 aa, Homo sapiens
  Payload ID: 19922
  Gene Name: zinc finger protein 414
  Uniprot ID: Q96IQ9
  ENSP ID: ENSP00000377504
MEEKPSGPIPDMLATAEPSSSETDKEVLSPAVPAAAPSSSMSEEPGPEQAATPPVWERGGAGGMQQGSSPAPDSCQPGPGPSPGLTSIVSGTSEDLRPPRRRPPPGKQIPCSSPGCCLSFPSVRDLAQHLRTHCPPTQSLEGKLFRCSALSCTETFPSMQELVAHSKLHYKPNRYFKCENCLLRFRTHRSLFKHLHVCAEHAQSPAPPPPPALDREPPAPERPPEVDPASAPGLPFPLLEPFTTPAPAPTGPFLPYLNPAPFGLSPPRLRPFLAAAPGPPASSAAVWKKSQGAGSSPRRPQGGSDAPSGHAAPSRIVWEHTRGRYSCMQCAFSTASRPAMTLHLEDHRPGAPAAPAAGPPRPDAPADPAPLAPKVSPLLSEGELPVFSQL

SEQ ID NO: 99952 - protein, 120 aa, Homo sapiens
  Payload ID: 19922
  Gene Name: zinc finger protein 414
  ENSP ID: ENSP00000471378
  MOD_RES (1)..(1): Any amino acid
XSPPRLRPFLAAAPGPPASSAAVWKKSQGAGSSPRRPQGGSDAPSGHAAPSRIVWEHTRGRYSCMQCAFSTASRPAMTLHLEDHRPGAPAAPAAGPPRPDAPAGKAEECAGGEGGGGPRR

SEQ ID NO: 99953 - protein, 154 aa, Homo sapiens
  Payload ID: 19922
  Gene Name: zinc finger protein 414
  ENSP ID: ENSP00000471863
  MOD_RES (1)..(1): Any amino acid
XHYKPNRYFKCENCLLRFRTHRSLFKHLHVCAEHAQSPAPPPPPALDREPPAPERPPEVDPASAPGLPFPLLEPFTTPAPAPTGPFLPYLNPAPFGLSPPRLRPFLAAAPGPPASSAAVWKKSQGAGSSPRRPQGGSDAPSGACRARGPEPHRV

SEQ ID NO: 99954 - protein, 45 aa, Homo sapiens
  Payload ID: 19922
  Gene Name: zinc finger protein 414
  ENSP ID: ENSP00000472741
MGSKSLAPALAAASVFPASVTWHSICEPTARPHSPWKASSSAAQP

SEQ ID NO: 99955 - protein, 171 aa, Homo sapiens
  Payload ID: 19922
  Gene Name: zinc finger protein 414
  ENSP ID: ENSP00000473079
  MOD_RES (1)..(1): Any amino acid
XRYFKFPPEVVRKGRCHSCTGAGRCENCLLRFRTHRSLFKHLHVCAEHAQSPAPPPPPALDREPPAPERPPEVDPASAPGLPFPLLEPFTTPAPAPTGPFLPYLNPAPFGLSPPRLRPFLAAAPGPPASSAAVWKKSQGAGSSPRRPQGGSDAPSGHAAPSRIVWEHTRGR

SEQ ID NO: 99956 - protein, 555 aa, Homo sapiens
  Payload ID: 19923
  Gene Name: zinc finger protein 415
  Uniprot ID: Q09FC8
  ENSP ID: ENSP00000243643
MAFTQLTFRDVAIEFSQDEWKCLNSTQRTLYRDVMLENYRNLVSLDLSRNCVIKELAPQQEGNPGEVFHTVTLEQHEKHDIEEFCFREIKKKIHDFDCQWRDDERNCNKVTTAPKENLTCRRDQRDRRGIGNKSIKHQLGLSFLPHPHELQQFQAEGKIYECNHVEKSVNHGSSVSPPQIISSTIKTHVSNKYGTDFICSSLLTQEQKSCIREKPYRYIECDKALNHGSHMTVRQVSHSGEKGYKCDLCGKVFSQKSNLARHWRVHTGEKPYKCNECDRSFSRNSCLALHRRVHTGEKPYKCYECDKVFSRNSCLALHQKTHIGEKPYTCKECGKAFSVRSTLTNHQVIHSGKKPYKCNECGKVFSQTSSLATHQRIHTGEKPYKCNECGKVFSQTSSLARHWRIHTGEKPYKCNECGKVFSYNSHLASHRRVHTGEKPYKCNECGKAFSVHSNLTTHQVIHTGEKPYKCNQCGKGFSVHSSLTTHQVIHTGEKPYKCNECGKSFSVRPNLTRHQIIHTGKKPYKCSDCGKSFSVRPNLFRHQIIHTKEKPYKRN

SEQ ID NO: 99957 - protein, 555 aa, Homo sapiens; identical to SEQ ID NO: 99956
  Payload ID: 19923
  Gene Name: zinc finger protein 415
  Uniprot ID: Q09FC8
  ENSP ID: ENSP00000395055

SEQ ID NO: 99958 - protein, 555 aa, Homo sapiens
  Payload ID: 19923
  Gene Name: zinc finger protein 415
  Uniprot ID: Q09FC8
  ENSP ID: ENSP00000439435
MDGDGLTFRDVAIEFSQDEWKCLNSTQRTLYRDVMLENYRNLVSLDLSRNCVIKELAPQQEGNPGEVFHTVTLEQHEKHDIEEFCFREIKKKIHDFDCQWRDDERNCNKVTTAPKENLTCRRDQRDRRGIGNKSIKHQLGLSFLPHPHELQQFQAEGKIYECNHVEKSVNHGSSVSPPQIISSTIKTHVSNKYGTDFICSSLLTQEQKSCIREKPYRYIECDKALNHGSHMTVRQVSHSGEKGYKCDLCGKVFSQKSNLARHWRVHTGEKPYKCNECDRSFSRNSCLALHRRVHTGEKPYKCYECDKVFSRNSCLALHQKTHIGEKPYTCKECGKAFSVRSTLTNHQVIHSGKKPYKCNECGKVFSQTSSLATHQRIHTGEKPYKCNECGKVFSQTSSLARHWRIHTGEKPYKCNECGKVFSYNSHLASHRRVHTGEKPYKCNECGKAFSVHSNLTTHQVIHTGEKPYKCNQCGKGFSVHSSLTTHQVIHTGEKPYKCNECGKSFSVRPNLTRHQIIHTGKKPYKCSDCGKSFSVRPNLFRHQIIHTKEKPYKRN

SEQ ID NO: 99959 - protein, 73 aa, Homo sapiens
  Payload ID: 19923
  Gene Name: zinc finger protein 415
  ENSP ID: ENSP00000468917
MAFTQLTFRDVAIEFSQDEWKCLNSTQRTLYRDVMLENYRNLVSLGWSAMVQSRLTATFASRIQMILLPQPPE

SEQ ID NO: 99960 - protein, 75 aa, Homo sapiens
  Payload ID: 19923
  Gene Name: zinc finger protein 415
  ENSP ID: ENSP00000469483
MAFTQLTFRDVAIEFSQDEWKCLNSTQRTLYRDVMLENYRNLVSLGEDNFLPEVKICPWYLSIFPCVPLGSPCIT

SEQ ID NO: 99961 - protein, 73 aa, Homo sapiens; identical to SEQ ID NO: 99959
  Payload ID: 19923
  Gene Name: zinc finger protein 415
  ENSP ID: ENSP00000469656

SEQ ID NO: 99962 - protein, 73 aa, Homo sapiens
  Payload ID: 19923
  Gene Name: zinc finger protein 415
  ENSP ID: ENSP00000470272
MDGDGLTFRDVAIEFSQDEWKCLNSTQRTLYRDVMLENYRNLVSLGWSAMVQSRLTATFASRIQMILLPQPPE

SEQ ID NO: 99963 - protein, 106 aa, Homo sapiens
  Payload ID: 19923
  Gene Name: zinc finger protein 415
  ENSP ID: ENSP00000470410
MAFTQLTFRDVAIEFSQDEWKCLNSTQRTLYRDVMLENYRNLVSLDLSRNCVIKELAPQQEGNPGEVFHTVTLEQHEKHDIEEFCFREIKKKIHDFDCQWRDDERN

SEQ ID NO: 99964 - protein, 109 aa, Homo sapiens
  Payload ID: 19923
  Gene Name: zinc finger protein 415
  ENSP ID: ENSP00000471167
MDGDGLTFRDVAIEFSQDEWKCLNSTQRTLYRDVMLENYRNLVSLEYYPMWEHRKEPWTIESQVRVARKPKGWEWIKGVKTGWSAMVQSRLTATFASRIQMILLPQPPE

SEQ ID NO: 99965 - protein, 163 aa, Homo sapiens
  Payload ID: 19923
  Gene Name: zinc finger protein 415
  ENSP ID: ENSP00000471386
MTPSLSLSEPTCNRDKGLDQKTSIIDFQRLLAHEEETQKRRAKESGMAFTQLTFRDVAIEFSQDEWKCLNSTQRTLYRDVMLENYRNLVSLDLSRNCVIKELAPQQEGNPGEVFHTVTLEQHEKHDIEEFCFREIKKKIHDFDCQWRDDERNCNKVTTAPKEN

SEQ ID NO: 99966 - protein, 103 aa, Homo sapiens
  Payload ID: 19923
  Gene Name: zinc finger protein 415
  ENSP ID: ENSP00000471718
MTPSLSLSEPTCNRDKGLDQKTSMTSLTSSPACVLLAPSAPAKHASFLFLGRACSCLKAFTWAVPLLELAGPSAAALTSKDSWHMRKKPRRGEQRSQEWLLLS

SEQ ID NO: 99967 - protein, 59 aa, Homo sapiens
  Payload ID: 19923
  Gene Name: zinc finger protein 415
  ENSP ID: ENSP00000471834
MAFTQLTFRDVAIEFSQDEWKCLNSTQRTLYRDVMLENYRNLVSLDPSVIASLLIQAKG

SEQ ID NO: 99968 - protein, 59 aa, Homo sapiens; identical to SEQ ID NO: 99967
  Payload ID: 19923
  Gene Name: zinc finger protein 415
  ENSP ID: ENSP00000472003

SEQ ID NO: 99969 - protein, 109 aa, Homo sapiens
  Payload ID: 19923
  Gene Name: zinc finger protein 415
  ENSP ID: ENSP00000472516
MAFTQLTFRDVAIEFSQDEWKCLNSTQRTLYRDVMLENYRNLVSLEYYPMWEHRKEPWTIESQVRVARKPKGWEWIKGVKTGWSAMVQSRLTATFASRIQMILLPQPPE

SEQ ID NO: 99970 - protein, 109 aa, Homo sapiens; identical to SEQ ID NO: 99969
  Payload ID: 19923
  Gene Name: zinc finger protein 415
  ENSP ID: ENSP00000472584

SEQ ID NO: 99971 - protein, 59 aa, Homo sapiens; identical to SEQ ID NO: 99967
  Payload ID: 19923
  Gene Name: zinc finger protein 415
  ENSP ID: ENSP00000472673

SEQ ID NO: 99972 - protein, 106 aa, Homo sapiens
  Payload ID: 19923
  Gene Name: zinc finger protein 415
  ENSP ID: ENSP00000472797
MTPSLSLSEPTCNRDKGLDQKTSMTSLTSSPACVLLAPSAPAKHASFLFLGRACSCLKAFTWAVPLLELAGPSAAALTSKDSWHMRKKPRRGEQRSQEWLLLRSVS

SEQ ID NO: 99973 - protein, 325 aa, Homo sapiens
  Payload ID: 19923
  Gene Name: zinc finger protein 415
  Uniprot ID: Q09FC8
  ENSP ID: ENSP00000472911
MTVRQVSHSGEKGYKCDLCGKVFSQKSNLARHWRVHTGEKPYKCNECDRSFSRNSCLALHRRVHTGEKPYKCYECDKVFSRNSCLALHQKTHIGEKPYTCKECGKAFSVRSTLTNHQVIHSGKKPYKCNECGKVFSQTSSLATHQRIHTGEKPYKCNECGKVFSQTSSLARHWRIHTGEKPYKCNECGKVFSYNSHLASHRRVHTGEKPYKCNECGKAFSVHSNLTTHQVIHTGEKPYKCNQCGKGFSVHSSLTTHQVIHTGEKPYKCNECGKSFSVRPNLTRHQIIHTGKKPYKCSDCGKSFSVRPNLFRHQIIHTKEKPYKRN

SEQ ID NO: 99974 - protein, 23 aa, Homo sapiens
  Payload ID: 19923
  Gene Name: zinc finger protein 415
  ENSP ID: ENSP00000473008
MAFTQLTFRDVAIEFSQDEWKCL

SEQ ID NO: 99975 - protein, 594 aa, Homo sapiens
  Payload ID: 19924
  Gene Name: zinc finger protein 416
  Uniprot ID: Q9BWM5
  ENSP ID: ENSP00000196489
MAAAVLRDSTSVPVTAEAKLMGFTQGCVTFEDVAIYFSQEEWGLLDEAQRLLYRDVMLENFALITALVCWHGMEDEETPEQSVSVEGVPQVRTPEASPSTQKIQSCDMCVPFLTDILHLTDLPGQELYLTGACAVFHQDQKHHSAEKPLESDMDKASFVQCCLFHESGMPFTSSEVGKDFLAPLGILQPQAIANYEKPNKISKCEEAFHVGISHYKWSQCRRESSHKHTFFHPRVCTGKRLYESSKCGKACCCECSLVQLQRVHPGERPYECSECGKSFSQTSHLNDHRRIHTGERPYVCGQCGKSFSQRATLIKHHRVHTGERPYECGECGKSFSQSSNLIEHCRIHTGERPYECDECGKAFGSKSTLVRHQRTHTGEKPYECGECGKLFRQSFSLVVHQRIHTTARPYECGQCGKSFSLKCGLIQHQLIHSGARPFECDECGKSFSQRTTLNKHHKVHTAERPYVCGECGKAFMFKSKLVRHQRTHTGERPFECSECGKFFRQSYTLVEHQKIHTGLRPYDCGQCGKSFIQKSSLIQHQVVHTGERPYECGKCGKSFTQHSGLILHRKSHTVERPRDSSKCGKPYSPRSNIV

SEQ ID NO: 99976 - protein, 575 aa, Homo sapiens
  Payload ID: 19925
  Gene Name: zinc finger protein 417
  Uniprot ID: Q8TAU3
  ENSP ID: ENSP00000311319
MAAAAPRRPTQQGTVTFEDVAVNFSQEEWCLLSEAQRCLYRDVMLENLALISSLGCWCGSKDEEAPCKQRISVQRESQSRTPRAGVSPKKAHPCEMCGLILEDVFHFADHQETHHKQKLNRSGACGKNLDDTAYLHQHQKQHIGEKFYRKSVREASFVKKRKLRVSQEPFVFREFGKDVLPSSGLCQEAAAVEKTDSETMHGPPFQEGKTNYSCGKRTKAFSTKHSVIPHQKLFTRDGCYVCSDCGKSFSRYVSFSNHQRDHTAKGPYDCGECGKSYSRKSSLIQHQRVHTGKTAYPCEECGKSFSQKGSLISHQRVHTGERPYECREYGKSFGQKGNLIQHQQGHTGERAYHCGECGKSFRQKFCFINHQRVHTGERPYKCGECGKSFGQKGNLVQHQRGHTGERPYECKECGKSFRYRSHLTEHQRLHTGERPYNCRECGKLFNRKYHLLVHERVHTGERPYACEVCGKLFGNKNCVTIHQRIHTGERPYECNECGKSFLSSSALHVHKRVHSGQKPYKCSECGKSFAECSSLIKHRRIHTGERPYECTKCGKTFQRSSTLLHHQSSHRRKAL

SEQ ID NO: 99977 - protein, 15 aa, Homo sapiens
  Payload ID: 19925
  Gene Name: zinc finger protein 417
  ENSP ID: ENSP00000469176
MLENLALISSLGCWC

SEQ ID NO: 99978 - protein, 51 aa, Homo sapiens
  Payload ID: 19925
  Gene Name: zinc finger protein 417
  ENSP ID: ENSP00000471325
MLENLALISSLGCWCGSKDEEAPCKQRISVQRESQSRTPRAGVSPKKAHPC

SEQ ID NO: 99979 - protein, 21 aa, Homo sapiens
  Payload ID: 19925
  Gene Name: zinc finger protein 417
  ENSP ID: ENSP00000471471
MLENLALISSLGCWCGSKDEE

SEQ ID NO: 99980 - protein, 57 aa, Homo sapiens
  Payload ID: 19925
  Gene Name: zinc finger protein 417
  ENSP ID: ENSP00000471689
MLENLALISSLGCWCGSKDEEAPCKQRISVQRESQSRTPRAGVSPKKAHPCEMCGLI

SEQ ID NO: 99981 - protein, 574 aa, Homo sapiens
  Payload ID: 19925
  Gene Name: zinc finger protein 417
  ENSP ID: ENSP00000472272
MAAAAPRRPTQGTVTFEDVAVNFSQEEWCLLSEAQRCLYRDVMLENLALISSLGCWCGSKDEEAPCKQRISVQRESQSRTPRAGVSPKKAHPCEMCGLILEDVFHFADHQETHHKQKLNRSGACGKNLDDTAYLHQHQKQHIGEKFYRKSVREASFVKKRKLRVSQEPFVFREFGKDVLPSSGLCQEAAAVEKTDSETMHGPPFQEGKTNYSCGKRTKAFSTKHSVIPHQKLFTRDGCYVCSDCGKSFSRYVSFSNHQRDHTAKGPYDCGECGKSYSRKSSLIQHQRVHTGKTAYPCEECGKSFSQKGSLISHQRVHTGERPYECREYGKSFGQKGNLIQHQQGHTGERAYHCGECGKSFRQKFCFINHQRVHTGERPYKCGECGKSFGQKGNLVQHQRGHTGERPYECKECGKSFRYRSHLTEHQRLHTGERPYNCRECGKLFNRKYHLLVHERVHTGERPYACEVCGKLFGNKNCVTIHQRIHTGERPYECNECGKSFLSSSALHVHKRVHSGQKPYKCSECGKSFAECSSLIKHRRIHTGERPYECTKCGKTFQRSSTLLHHQSSHRRKAL

SEQ ID NO: 99982 - protein, 90 aa, Homo sapiens
  Payload ID: 19925
  Gene Name: zinc finger protein 417
  ENSP ID: ENSP00000472352
  MOD_RES (1)..(1): Any amino acid
XVAVNFSQEEWCLLSEAQRCLYRDVMLENLALISSLDCPLHLCQFPDLSPCWRVCLDKPYLFLRPAALRWVKEWNVCASAKAAETSASAL

SEQ ID NO: 99983 - protein, 676 aa, Homo sapiens
  Payload ID: 19926
  Gene Name: zinc finger protein 418
  Uniprot ID: Q8TF45
  ENSP ID: ENSP00000379451
MQGTVAFEDVAVNFSQEEWSLLSEVQRCLYHDVMLENWVLISSLGCWCGSEDEEAPSKKSISIQRVSQVSTPGAGVSPKKAHSCEMCGAILGDILHLADHQGTHHKQKLHRCEAWGNKLYDSSNRPHQNQYLGEKPYRSSVEEALFVKRCKFHVSEESSIFIQSGKDFLPSSGLLLQEATHTGEKSNSKPECESPFQWGDTHYSCGECMKHSSTKHVFVQQQRLPSREECYCWECGKSFSKYDSVSNHQRVHTGKRPYECGECGKSFSHKGSLVQHQRVHTGKRPYECGECGKSFSHKGSLVQHQRVHTGERPYECGECGKSFSQNGTLIKHQRVHTGERPYECEECGKCFTQKGNLIQHQRGHTSERPYECEECGKCFSQKGTLTEHHRVHTRERPYECGECGKSFSRKGHLRNHQRGHTGERPYECGECGKSFSRKGNLIQHQRSHTGERPYECRECRKLFRGKSHLIEHQRVHTGERPYECNECGKSFQDSSGFRVHQRVHTGEKPFECSECGKSFPQSCSLLRHRRVHTGERPYECGECGKSFHQSSSLLRHQKTHTAERPYECRECGKFFSSLLEHRRVHTGERPYECRECGKTFTRRSAHFKHQRLHTRGKPYECSECGKSFAETFSLTEHRRVHTGERPYECSECGKSFHRSSSLLRHQRVHTERSPYK

SEQ ID NO: 99984 - protein, 697 aa, Homo sapiens
  Payload ID: 19926
  Gene Name: zinc finger protein 418
  ENSP ID: ENSP00000407039
MQEGLHRMTWDCIAIGSHENSVQGTVAFEDVAVNFSQEEWSLLSEVQRCLYHDVMLENWVLISSLGCWCGSEDEEAPSKKSISIQRVSQVSTPGAGVSPKKAHSCEMCGAILGDILHLADHQGTHHKQKLHRCEAWGNKLYDSSNRPHQNQYLGEKPYRSSVEEALFVKRCKFHVSEESSIFIQSGKDFLPSSGLLLQEATHTGEKSNSKPECESPFQWGDTHYSCGECMKHSSTKHVFVQQQRLPSREECYCWECGKSFSKYDSVSNHQRVHTGKRPYECGECGKSFSHKGSLVQHQRVHTGKRPYECGECGKSFSHKGSLVQHQRVHTGERPYECGECGKSFSQNGTLIKHQRVHTGERPYECEECGKCFTQKGNLIQHQRGHTSERPYECEECGKCFSQKGTLTEHHRVHTRERPYECGECGKSFSRKGHLRNHQRGHTGERPYECGECGKSFSRKGNLIQHQRSHTGERPYECRECRKLFRGKSHLIEHQRVHTGERPYECNECGKSFQDSSGFRVHQRVHTGEKPFECSECGKSFPQSCSLLRHRRVHTGERPYECGECGKSFHQSSSLLRHQKTHTAERPYECRECGKFFSSLLEHRRVHTGERPYECRECGKTFTRRSAHFKHQRLHTRGKPYECSECGKSFAETFSLTEHRRVHTGERPYECSECGKSFHRSSSLLRHQRVHTERSPYK

SEQ ID NO: 99985 - protein, 73 aa, Homo sapiens
  Payload ID: 19926
  Gene Name: zinc finger protein 418
  ENSP ID: ENSP00000468855
MQEGLHRMTWDCIAIGSHENSVEEWSLLSEVQRCLYHDVMLENWVLISSLGCWCGSEDEEAPSKKSISIQRVS

SEQ ID NO: 99986 - protein, 591 aa, Homo sapiens
  Payload ID: 19926
  Gene Name: zinc finger protein 418
  ENSP ID: ENSP00000468968
MCGAILGDILHLADHQGTHHKQKLHRCEAWGNKLYDSSNRPHQNQYLGEKPYRSSVEEALFVKRCKFHVSEESSIFIQSGKDFLPSSGLLLQEATHTGEKSNSKPECESPFQWGDTHYSCGECMKHSSTKHVFVQQQRLPSREECYCWECGKSFSKYDSVSNHQRVHTGKRPYECGECGKSFSHKGSLVQHQRVHTGKRPYECGECGKSFSHKGSLVQHQRVHTGERPYECGECGKSFSQNGTLIKHQRVHTGERPYECEECGKCFTQKGNLIQHQRGHTSERPYECEECGKCFSQKGTLTEHHRVHTRERPYECGECGKSFSRKGHLRNHQRGHTGERPYECGECGKSFSRKGNLIQHQRSHTGERPYECRECRKLFRGKSHLIEHQRVHTGERPYECNECGKSFQDSSGFRVHQRVHTGEKPFECSECGKSFPQSCSLLRHRRVHTGERPYECGECGKSFHQSSSLLRHQKTHTAERPYECRECGKFFSSLLEHRRVHTGERPYECRECGKTFTRRSAHFKHQRLHTRGKPYECSECGKSFAETFSLTEHRRVHTGERPYECSECGKSFHRSSSLLRHQRVHTERSPYK

SEQ ID NO: 99987 - protein, 98 aa, Homo sapiens
  Payload ID: 19926
  Gene Name: zinc finger protein 418
  ENSP ID: ENSP00000469034
MQQGTVAFEDVAVNFSQEEWSLLSEVQRCLYHDVMLENWVLISSLGCWCGSEDEEAPSKKSISIQRVSQVSTPGAGVSPKKAHSCEMCGAILGDILHL

SEQ ID NO: 99988 - protein, 128 aa, Homo sapiens
  Payload ID: 19926
  Gene Name: zinc finger protein 418
  ENSP ID: ENSP00000470127
MQGTVAFEDVAVNFSQEEWSLLSEVQRCLYHDVMLENWVLISSLGCWCGSEDEEAPSKKSISIQRVSQNVRLSAQAGVARSQLTAASTSRVQAILLPQPPGDLKGISLCPPHLFIFGKLYAFASSPRL

SEQ ID NO: 99989 - protein, 676 aa, Homo sapiens; identical to SEQ ID NO: 99983
  Payload ID: 19926
  Gene Name: zinc finger protein 418
  Uniprot ID: Q8TF45
  ENSP ID: ENSP00000471652

SEQ ID NO: 99990 - protein, 93 aa, Homo sapiens
  Payload ID: 19926
  Gene Name: zinc finger protein 418
  ENSP ID: ENSP00000472062
MQQGTVAFEDVAVNFSQEEWSLLSEVQRCLYHDVMLENWVLISSLGCWCGSEDEEAPSKKSISIQRVSQVSTPGAGVSPKKAHSCEMCGAILG

SEQ ID NO: 99991 - protein, 676 aa, Homo sapiens; identical to SEQ ID NO: 99983
  Payload ID: 19926
  Gene Name: zinc finger protein 418
  Uniprot ID: Q8TF45
  ENSP ID: ENSP00000483763

SEQ ID NO: 99992 - protein, 510 aa, Homo sapiens
  Payload ID: 19927
  Gene Name: zinc finger protein 419
  Uniprot ID: Q96HQ0
  ENSP ID: ENSP00000221735
MAAAALRDPAQVPVAADLLTDHEEGYVTFEDVAVYFSQEEWRLLDDAQRLLYRNVMLENFTLLASLGLASSKTHEITQLESWEEPFMPAWEVVTSAIPRGCWHGAEAEEAPEQIASVGLLSSNIQQHQKQHCGEKPLKRQEGRVPVLRSCKVHLSEKSLQSREVGKALLISSGVLKHQVTHTGEKSHRSSKSREAFHAGKRHYKCSECGKAFGQKYLLVQHQRLHAGKKTYECSECGKLFRDMSNLFIHQIVHTGERPYGCSNCGKSFSRNAHLIEHQRVHTGEKPFTCSECGKAFRHNSTLVQHHKIHTGVRPYECSECGKLFSFNSSLMKHQRIHTGERPYKCSECGKFYSHKSNLIKHWRVHTGERPYKCSDCGKFFTQCSSLMQHQKVHTGEKPFKCNECGRFFRENSTLVRHQRVHTGAKPYECRECGKFFSQSSTLMQHRKVHIGEKPFKCNECGRLFRENSSLVKHQRVHTGAKPYECRECGKFFRHNSSLFKHRRIHTGEMQ

SEQ ID NO: 99993 - protein, 478 aa, Homo sapiens
  Payload ID: 19927
  Gene Name: zinc finger protein 419
  Uniprot ID: Q96HQ0
  ENSP ID: ENSP00000299860
MAAAALRDPAQVPVAADLLTDHEEQGYVTFEDVAVYFSQEEWRLLDDAQRLLYRNVMLENFTLLASLGCWHGAEAEEAPEQIASVGLLSSNIQQHQKQHCGEKPLKRQEGRVPVLRSCKVHLSEKSLQSREVGKALLISSGVLKHQVTHTGEKSHRSSKSREAFHAGKRHYKCSECGKAFGQKYLLVQHQRLHAGKKTYECSECGKLFRDMSNLFIHQIVHTGERPYGCSNCGKSFSRNAHLIEHQRVHTGEKPFTCSECGKAFRHNSTLVQHHKIHTGVRPYECSECGKLFSFNSSLMKHQRIHTGERPYKCSECGKFYSHKSNLIKHWRVHTGERPYKCSDCGKFFTQCSSLMQHQKVHTGEKPFKCNECGRFFRENSTLVRHQRVHTGAKPYECRECGKFFSQSSTLMQHRKVHIGEKPFKCNECGRLFRENSSLVKHQRVHTGAKPYECRECGKFFRHNSSLFKHRRIHTGEMQ

SEQ ID NO: 99994 - protein, 442 aa, Homo sapiens
  Payload ID: 19927
  Gene Name: zinc finger protein 419
  ENSP ID: ENSP00000346136
MAAAALRDPAQQGYVTFEDVAVYFSQEEWRLLDDAQRLLYRNVMLENFTLLASLGLASSKTHEITQLESWEEPFMPAWEVVTSAIPRGCWHGAEAEEAPEQIASVGLLSSNIQQHQKQHCGEKPLKRQEGRVPVLRSCKVHLSEKSLQSREVGKALLISSGVLKHQVTHTGEKSHRSSKSREAFHAGKRHYKCSECGKAFGQKYLLVQHQRLHAGKKTYECSECGKLFRDMSNLFIHQIVHTGERPYGCSNCGKSFSRNAHLIEHQRVHTGEKPFTCSECGKAFRHNSTLVQHHKIHTGVRPYECSECGKLFSFNSSLMKHQRIHTGERPYKCSECGKFYSHKSNLIKHWRVHTGERPYKCSDCGKFFTQCSSLMQHQKVHTGEKPFKCNECGRFFRENSSLVKHQRVHTGAKPYECRECGKFFRHNSSLFKHRRIHTGEMQ

SEQ ID NO: 99995 - protein, 511 aa, Homo sapiens
  Payload ID: 19927
  Gene Name: zinc finger protein 419
  Uniprot ID: Q96HQ0
  ENSP ID: ENSP00000388864
MAAAALRDPAQVPVAADLLTDHEEQGYVTFEDVAVYFSQEEWRLLDDAQRLLYRNVMLENFTLLASLGLASSKTHEITQLESWEEPFMPAWEVVTSAIPRGCWHGAEAEEAPEQIASVGLLSSNIQQHQKQHCGEKPLKRQEGRVPVLRSCKVHLSEKSLQSREVGKALLISSGVLKHQVTHTGEKSHRSSKSREAFHAGKRHYKCSECGKAFGQKYLLVQHQRLHAGKKTYECSECGKLFRDMSNLFIHQIVHTGERPYGCSNCGKSFSRNAHLIEHQRVHTGEKPFTCSECGKAFRHNSTLVQHHKIHTGVRPYECSECGKLFSFNSSLMKHQRIHTGERPYKCSECGKFYSHKSNLIKHWRVHTGERPYKCSDCGKFFTQCSSLMQHQKVHTGEKPFKCNECGRFFRENSTLVRHQRVHTGAKPYECRECGKFFSQSSTLMQHRKVHIGEKPFKCNECGRLFRENSSLVKHQRVHTGAKPYECRECGKFFRHNSSLFKHRRIHTGEMQ

SEQ ID NO: 99996 - protein, 498 aa, Homo sapiens
  Payload ID: 19927
  Gene Name: zinc finger protein 419
  Uniprot ID: Q96HQ0
  ENSP ID: ENSP00000390916
MAAAALRDPAQQGYVTFEDVAVYFSQEEWRLLDDAQRLLYRNVMLENFTLLASLGLASSKTHEITQLESWEEPFMPAWEVVTSAIPRGCWHGAEAEEAPEQIASVGLLSSNIQQHQKQHCGEKPLKRQEGRVPVLRSCKVHLSEKSLQSREVGKALLISSGVLKHQVTHTGEKSHRSSKSREAFHAGKRHYKCSECGKAFGQKYLLVQHQRLHAGKKTYECSECGKLFRDMSNLFIHQIVHTGERPYGCSNCGKSFSRNAHLIEHQRVHTGEKPFTCSECGKAFRHNSTLVQHHKIHTGVRPYECSECGKLFSFNSSLMKHQRIHTGERPYKCSECGKFYSHKSNLIKHWRVHTGERPYKCSDCGKFFTQCSSLMQHQKVHTGEKPFKCNECGRFFRENSTLVRHQRVHTGAKPYECRECGKFFSQSSTLMQHRKVHIGEKPFKCNECGRLFRENSSLVKHQRVHTGAKPYECRECGKFFRHNSSLFKHRRIHTGEMQ

SEQ ID NO: 99997 - protein, 464 aa, Homo sapiens
  Payload ID: 19927
  Gene Name: zinc finger protein 419
  Uniprot ID: Q96HQ0
  ENSP ID: ENSP00000392129
MAAAALRDPAQGYVTFEDVAVYFSQEEWRLLDDAQRLLYRNVMLENFTLLASLGCWHGAEAEEAPEQIASVGLLSSNIQQHQKQHCGEKPLKRQEGRVPVLRSCKVHLSEKSLQSREVGKALLISSGVLKHQVTHTGEKSHRSSKSREAFHAGKRHYKCSECGKAFGQKYLLVQHQRLHAGKKTYECSECGKLFRDMSNLFIHQIVHTGERPYGCSNCGKSFSRNAHLIEHQRVHTGEKPFTCSECGKAFRHNSTLVQHHKIHTGVRPYECSECGKLFSFNSSLMKHQRIHTGERPYKCSECGKFYSHKSNLIKHWRVHTGERPYKCSDCGKFFTQCSSLMQHQKVHTGEKPFKCNECGRFFRENSTLVRHQRVHTGAKPYECRECGKFFSQSSTLMQHRKVHIGEKPFKCNECGRLFRENSSLVKHQRVHTGAKPYECRECGKFFRHNSSLFKHRRIHTGEMQ

SEQ ID NO: 99998 - protein, 497 aa, Homo sapiens
  Payload ID: 19927
  Gene Name: zinc finger protein 419
  Uniprot ID: Q96HQ0
  ENSP ID: ENSP00000414709
MAAAALRDPAQGYVTFEDVAVYFSQEEWRLLDDAQRLLYRNVMLENFTLLASLGLASSKTHEITQLESWEEPFMPAWEVVTSAIPRGCWHGAEAEEAPEQIASVGLLSSNIQQHQKQHCGEKPLKRQEGRVPVLRSCKVHLSEKSLQSREVGKALLISSGVLKHQVTHTGEKSHRSSKSREAFHAGKRHYKCSECGKAFGQKYLLVQHQRLHAGKKTYECSECGKLFRDMSNLFIHQIVHTGERPYGCSNCGKSFSRNAHLIEHQRVHTGEKPFTCSECGKAFRHNSTLVQHHKIHTGVRPYECSECGKLFSFNSSLMKHQRIHTGERPYKCSECGKFYSHKSNLIKHWRVHTGERPYKCSDCGKFFTQCSSLMQHQKVHTGEKPFKCNECGRFFRENSTLVRHQRVHTGAKPYECRECGKFFSQSSTLMQHRKVHIGEKPFKCNECGRLFRENSSLVKHQRVHTGAKPYECRECGKFFRHNSSLFKHRRIHTGEMQ

SEQ ID NO: 99999 - protein, 110 aa, Homo sapiens
  Payload ID: 19927
  Gene Name: zinc finger protein 419
  ENSP ID: ENSP00000427723
MAAAALRDPAQVPVAADLLTDHEEQGYVTFEDVAVYFSQEEWRLLDDAQRLLYRNVMLENFTLLASLGLASSKTHEITQLESWEEPFMPAWEVVTSAIPRGSWWVELREV

SEQ ID NO: 100000 - protein, 114 aa, Homo sapiens
  Payload ID: 19927
  Gene Name: zinc finger protein 419
  ENSP ID: ENSP00000428181
MAAAALRDPAQVPVAADLLTDHEEQGYVTFEDVAVYFSQEEWRLLDDAQRLLYRNVMLENFTLLASLGKVLTPHPSILSWARLFLLFLGRGLFFPKLNCGHSFLLQYPEVAIVI

SEQ ID NO: 100001 - protein, 113 aa, Homo sapiens
  Payload ID: 19927
  Gene Name: zinc finger protein 419
  ENSP ID: ENSP00000428515
MAAAALRDPAQGYVTFEDVAVYFSQEEWRLLDDAQRLLYRNVMLENFTLLASLGKVLTPHPSILSWARLFLLFLGRGLFFPKLNCGHSFLLQYPEVAIVIGLGCVYYHLLSPS

SEQ ID NO: 100002 - protein, 121 aa, Homo sapiens
  Payload ID: 19927
  Gene Name: zinc finger protein 419
  ENSP ID: ENSP00000428523
MAAAALRDPAQQGYVTFEDVAVYFSQEEWRLLDDAQRLLYRNVMLENFTLLASLGCWHGAEAEEAPEQIASVGLLSSNIQQHQKQHCGEKPLKRQEGRVPVLRSCKVHLSEKSLQSREVGK

SEQ ID NO: 100003 - protein, 97 aa, Homo sapiens
  Payload ID: 19927
  Gene Name: zinc finger protein 419
  ENSP ID: ENSP00000429471
MAAAALRDPAQQGYVTFEDVAVYFSQEEWRLLDDAQRLLYRNVMLENFTLLASLGLASSKTHEITQLESWEEPFMPAWEVVTSAIPRGSWWVELREV

SEQ ID NO: 100004 - protein, 87 aa, Homo sapiens
  Payload ID: 19927
  Gene Name: zinc finger protein 419
  ENSP ID: ENSP00000429504
MAAAALRDPAQVPVAADLLTDHEEGYVTFEDVAVYFSQEEWRLLDDAQRLLYRNVMLENFTLLASLGKVLTPHPSILSWARLFLLFL

SEQ ID NO: 100005 - protein, 173 aa, Homo sapiens
  Payload ID: 19927
  Gene Name: zinc finger protein 419
  ENSP ID: ENSP00000429628
MAAAALRDPAQVPVAADLLTDHEEGYVTFEDVAVYFSQEEWRLLDDAQRLLYRNVMLENFTLLASLGCWHGAEAEEAPEQIASVGLLSSNIQQHQKQHCGEKPLKRQEGRVPVLRSCKVHLSEKSLQSREVGKALLISSGVLKHQVTHTGEKSHRSSKSREAFHAGKRHYKCS

SEQ ID NO: 100006 - protein, 50 aa, Homo sapiens
  Payload ID: 19927
  Gene Name: zinc finger protein 419
  ENSP ID: ENSP00000429880
MLENFTLLASLGCWHGAEAEEAPEQIASVGLLSSNIQQHQKQHCGEKPLK

SEQ ID NO: 100007 - protein, 427 aa, Homo sapiens
  Payload ID: 19927
  Gene Name: zinc finger protein 419
  ENSP ID: ENSP00000481121
QGYVTFEDVAVYFSQEEWRLLDDAQRLLYRNVMLENFTLLASLGKVLTPHPSILSWARLFLLFLGRGLFFPKLNFVTSAIPRGSWAIPHLSVLHVSPSHQQNPSAVAFTECVQIASVGLLSSNIQQHQKQHCGEKPLKRQEGRVPVLRSCKVHLSEKSLQSREVGKALLISSGVLKHQVTHTGEKSHRSSKSREAFHAGKRHYKCSECGKAFGQKYLLVQHQRLHAGKKTPYGCSNCGKSFSRNAHLIEHQRVHTGEKPFTCSECGKAFRHNSTLVQHHKIHTGVRPYECSECGKLFSFNSSLMKHQRIHTGERPYKCSECGKFYSHKSNLIKHWRVHTGERPYKCSDCGKFFTQCSSLMQHQKVHTGEKPFKCNECGRFFRENSTLVRHQRVHTGAKPYECRECGKFFSQSSTLMQHRKVHIGEKP

SEQ ID NO: 100008 - protein, 536 aa, Homo sapiens
  Payload ID: 19928
  Gene Name: zinc finger protein 420
  Uniprot ID: Q8TAQ5
  ENSP ID: ENSP00000306102
MARKLVMFRDVAIDFSQEEWECLDSAQRDLYRDVMLENYSNLVSLDLPSRCASKDLSPEKNTYETELSQWEMSDRLENCDLEESNSRDYLEAKGKMEKQQENQKEYFRQGMIIYDKMSIFNQHTYLSQHSRCHSTEKPYKCKECGKAFRRASHLTQHQSIHTGEKPYECKQCGKAFSRDSQLSLHQRLHTGEKPYACKECGKAFTQSSQLILHHRIHTGEKPYKCEECGKAFIRSSQLTRHQKVHTGEKPYECKECGKAFTQNSQLTLHQRLHTGEKLYECKECRKVFTQLSQLILHKRIHTGEKPYECKECGKAFICGSQLSQHQKIHNGEKPYECKECGRAFIRGSLLMQHQRIHTGEKPYKCEECGKAFIRGSQLTQHQRIHTNEKPYECKECGKMFSHGSQLTQHQRIHTGEKPYQCKECGKAFNRGSLLTRHQRIHTGEKPYECKECGKTFSRGSELTQHERIHTAFLAGQQDRSDIYMSRRFTKSIFPVFFSVPTMWTSKLELRYSHGDFENGIWVLWIMEQKYRRSLQP

SEQ ID NO: 100009 - protein, 688 aa, Homo sapiens
  Payload ID: 19928
  Gene Name: zinc finger protein 420
  Uniprot ID: Q8TAQ5
  ENSP ID: ENSP00000338770
MARKLVMFRDVAIDFSQEEWECLDSAQRDLYRDVMLENYSNLVSLDLPSRCASKDLSPEKNTYETELSQWEMSDRLENCDLEESNSRDYLEAKGKMEKQQENQKEYFRQGMIIYDKMSIFNQHTYLSQHSRCHSTEKPYKCKECGKAFRRASHLTQHQSIHTGEKPYECKQCGKAFSRDSQLSLHQRLHTGEKPYACKECGKAFTQSSQLILHHRIHTGEKPYKCEECGKAFIRSSQLTRHQKVHTGEKPYECKECGKAFTQNSQLTLHQRLHTGEKLYECKECRKVFTQLSQLILHKRIHTGEKPYECKECGKAFICGSQLSQHQKIHNGEKPYECKECGRAFIRGSLLMQHQRIHTGEKPYKCEECGKAFIRGSQLTQHQRIHTNEKPYECKECGKMFSHGSQLTQHQRIHTGEKPYQCKECGKAFNRGSLLTRHQRIHTGEKPYECKECGKTFSRGSELTQHERIHTGEKPYECKECGKSFIRGSQLTQHQRIHTGEKPYECKECRMAFTQSSHLSQHQRLHTGEKPYVCNECGKAFARGLLLIQHQRIHTGEKPYQCKECGKAFIRGSQLTQHQRIHTGEKPYECKECGKAFSHGSQLTLHQRIHTGEKPYECRECRKAFTQSSHLSRHQRIHTGEKPYQCKECGKAFTRGSQLTQHQRIHISEKSFEYKECGIDFSHGSQVYM

SEQ ID NO: 100010 - protein, 51 aa, Homo sapiens
  Payload ID: 19928
  Gene Name: zinc finger protein 420
  ENSP ID: ENSP00000465346
MARKLVMFRDVAIDFSQEEWECLDSAQRDLYRDVMLENYSNLVSLAHQIST

SEQ ID NO: 100011 - protein, 88 aa, Homo sapiens
  Payload ID: 19928
  Gene Name: zinc finger protein 420
  ENSP ID: ENSP00000466057
MARKLVMFRDVAIDFSQEEWECLDSAQRDLYRDVMLENYSNLVSLDLPSRCASKDLSPEKNTYETELSQWEMSDRLENCDLEESNSRD

SEQ ID NO: 100012 - protein, 47 aa, Homo sapiens
  Payload ID: 19928
  Gene Name: zinc finger protein 420
  ENSP ID: ENSP00000467369
MARKLVMFRDVAIDFSQEEWECLDSAQRDLYRDVMLENYSNLVSLAL

SEQ ID NO: 100013 - protein, 163 aa, Homo sapiens
  Payload ID: 19928
  Gene Name: zinc finger protein 420
  ENSP ID: ENSP00000467772
MARKLVMFRDVAIDFSQEEWECLDSAQRDLYRDVMLENYSNLVSLDLPSRCASKDLSPEKNTYETELSQWEMSDRLENCDLEESNSRDYLEAKGKMEKQQENQKEYFRQGMIIYDKMSIFNQHTYLSQHSRCHSTEKPYKCKECGKAFRRASHLTQHQSIHTG

SEQ ID NO: 100014 - protein, 79 aa, Homo sapiens
  Payload ID: 19928
  Gene Name: zinc finger protein 420
  ENSP ID: ENSP00000468387
MSDRLENCDLEESNSRDYLEAKGKMEKQQENQKEYFRQGMIIYDKMSIFNQHTYLSQHSRCHSTEKPYKCKECGKAFRR

SEQ ID NO: 100015 - protein, 89 aa, Homo sapiens
  Payload ID: 19928
  Gene Name: zinc finger protein 420
  ENSP ID: ENSP00000468736
  MOD_RES (1)..(1): Any amino acid
XCKECGKMFSHGSQLTQHQRIHTGEKPYQCKECGKAFNRGSLLTRHQRIHTGEKPYECKECGKTFSRGSELTQHERIHTAGAPLLSWGL

SEQ ID NO: 100016 - protein, 1284 aa, Homo sapiens
  Payload ID: 19929
  Gene Name: zinc finger protein 423
  Uniprot ID: Q2M1K9
  ENSP ID: ENSP00000262383
MHKKRVEEGEASDFSLAWDSSVTAAGGLEGEPECDQKTSRALEDRNSVTSQEERNEDDEDMEDESIYTCDHCQQDFESLADLTDHRAHRCPGDGDDDPQLSWVASSPSSKDVASPTQMIGDGCDLGLGEEEGGTGLPYPCQFCDKSFIRLSYLKRHEQIHSDKLPFKCTYCSRLFKHKRSRDRHIKLHTGDKKYHCHECEAAFSRSDHLKIHLKTHSSSKPFKCTVCKRGFSSTSSLQSHMQAHKKNKEHLAKSEKEAKKDDFMCDYCEDTFSQTEELEKHVLTRHPQLSEKADLQCIHCPEVFVDENTLLAHIHQAHANQKHKCPMCPEQFSSVEGVYCHLDSHRQPDSSNHSVSPDPVLGSVASMSSATPDSSASVERGSTPDSTLKPLRGQKKMRDDGQGWTKVVYSCPYCSKRDFNSLAVLEIHLKTIHADKPQQSHTCQICLDSMPTLYNLNEHVRKLHKNHAYPVMQFGNISAFHCNYCPEMFADINSLQEHIRVSHCGPNANPSDGNNAFFCNQCSMGFLTESSLTEHIQQAHCSVGSAKLESPVVQPTQSFMEVYSCPYCTNSPIFGSILKLTKHIKENHKNIPLAHSKKSKAEQSPVSSDVEVSSPKRQRLSASANSISNGEYPCNQCDLKFSNFESFQTHLKLHLELLLRKQACPQCKEDFDSQESLLQHLTVHYMTTSTHYVCESCDKQFSSVDDLQKHLLDMHTFVLYHCTLCQEVFDSKVSIQVHLAVKHSNEKKMYRCTACNWDFRKEADLQVHVKHSHLGNPAKAHKCIFCGETFSTEVELQCHITTHSKKYNCKFCSKAFHAIILLEKHLREKHCVFDAATENGTANGVPPMATKKAEPADLQGMLLKNPEAPNSHEASEDDVDASEPMYGCDICGAAYTMEVLLQNHRLRDHNIRPGEDDGSRKKAEFIKGSHKCNVCSRTFFSENGLREHLQTHRGPAKHYMCPICGERFPSLLTLTEHKVTHSKSLDTGTCRICKMPLQSEEEFIEHCQMHPDLRNSLTGFRCVVCMQTVTSTLELKIHGTFHMQKLAGSSAASSPNGQGLQKLYKCALCLKEFRSKQDLVKLDVNGLPYGLCAGCMARSANGQVGGLAPPEPADRPCAGLRCPECSVKFESAEDLESHMQVDHRDLTPETSGPRKGTQTSPVPRKKTYQCIKCQMTFENEREIQIHVANHMIEEGINHECKLCNQMFDSPAKLLCHLIEHSFEGMGGTFKCPVCFTVFVQANKLQQHIFAVHGQEDKIYDCSQCPQKFFFQTELQNHTMSQHAQ

SEQ ID NO: 100017 - protein, 1167 aa, Homo sapiens
  Payload ID: 19929
  Gene Name: zinc finger protein 423
  ENSP ID: ENSP00000442321
MIGDGCDLGLGEEEGGTGLPYPCQFCDKSFIRLSYLKRHEQIHSDKLPFKCTYCSRLFKHKRSRDRHIKLHTGDKKYHCHECEAAFSRSDHLKIHLKTHSSSKPFKCTVCKRGFSSTSSLQSHMQAHKKNKEHLAKSEKEAKKDDFMCDYCEDTFSQTEELEKHVLTRHPQLSEKADLQCIHCPEVFVDENTLLAHIHQAHANQKHKCPMCPEQFSSVEGVYCHLDSHRQPDSSNHSVSPDPVLGSVASMSSATPDSSASVERGSTPDSTLKPLRGQKKMRDDGQGWTKVVYSCPYCSKRDFNSLAVLEIHLKTIHADKPQQSHTCQICLDSMPTLYNLNEHVRKLHKNHAYPVMQFGNISAFHCNYCPEMFADINSLQEHIRVSHCGPNANPSDGNNAFFCNQCSMGFLTESSLTEHIQQAHCSVGSAKLESPVVQPTQSFMEVYSCPYCTNSPIFGSILKLTKHIKENHKNIPLAHSKKSKAEQSPVSSDVEVSSPKRQRLSASANSISNGEYPCNQCDLKFSNFESFQTHLKLHLELLLRKQACPQCKEDFDSQESLLQHLTVHYMTTSTHYVCESCDKQFSSVDDLQKHLLDMHTFVLYHCTLCQEVFDSKVSIQVHLAVKHSNEKKMYRCTACNWDFRKEADLQVHVKHSHLGNPAKAHKCIFCGETFSTEVELQCHITTHSKKYNCKFCSKAFHAIILLEKHLREKHCVFDAATENGTANGVPPMATKKAEPADLQGMLLKNPEAPNSHEASEDDVDASEPMYGCDICGAAYTMEVLLQNHRLRDHNIRPGEDDGSRKKAEFIKGSHKCNVCSRTFFSENGLREHLQTHRGPAKHYMCPICGERFPSLLTLTEHKVTHSKSLDTGTCRICKMPLQSEEEFIEHCQMHPDLRNSLTGFRCVVCMQTVTSTLELKIHGTFHMQKLAGSSAASSPNGQGLQKLYKCALCLKEFRSKQDLVKLDVNGLPYGLCAGCMARSANGQVGGLAPPEPADRPCAGLRCPECSVKFESAEDLESHMQVDHRDLTPETSGPRKGTQTSPVPRKKTYQCIKCQMTFENEREIQIHVANHMIEEGINHECKLCNQMFDSPAKLLCHLIEHSFEGMGGTFKCPVCFTVFVQANKLQQHIFAVHGQEDKIYDCSQCPQKFFFQTELQNHTMSQHAQ

SEQ ID NO: 100018 - protein, 1167 aa, Homo sapiens; identical to SEQ ID NO: 100017
  Payload ID: 19929
  Gene Name: zinc finger protein 423
  ENSP ID: ENSP00000455061

SEQ ID NO: 100019 - protein, 1284 aa, Homo sapiens; identical to SEQ ID NO: 100016
  Payload ID: 19929
  Gene Name: zinc finger protein 423
  Uniprot ID: Q2M1K9
  ENSP ID: ENSP00000455426

SEQ ID NO: 100020 - protein, 1224 aa, Homo sapiens
  Payload ID: 19929
  Gene Name: zinc finger protein 423
  Uniprot ID: Q2M1K9
  ENSP ID: ENSP00000455588
MEDESIYTCDHCQQDFESLADLTDHRAHRCPGDGDDDPQLSWVASSPSSKDVASPTQMIGDGCDLGLGEEEGGTGLPYPCQFCDKSFIRLSYLKRHEQIHSDKLPFKCTYCSRLFKHKRSRDRHIKLHTGDKKYHCHECEAAFSRSDHLKIHLKTHSSSKPFKCTVCKRGFSSTSSLQSHMQAHKKNKEHLAKSEKEAKKDDFMCDYCEDTFSQTEELEKHVLTRHPQLSEKADLQCIHCPEVFVDENTLLAHIHQAHANQKHKCPMCPEQFSSVEGVYCHLDSHRQPDSSNHSVSPDPVLGSVASMSSATPDSSASVERGSTPDSTLKPLRGQKKMRDDGQGWTKVVYSCPYCSKRDFNSLAVLEIHLKTIHADKPQQSHTCQICLDSMPTLYNLNEHVRKLHKNHAYPVMQFGNISAFHCNYCPEMFADINSLQEHIRVSHCGPNANPSDGNNAFFCNQCSMGFLTESSLTEHIQQAHCSVGSAKLESPVVQPTQSFMEVYSCPYCTNSPIFGSILKLTKHIKENHKNIPLAHSKKSKAEQSPVSSDVEVSSPKRQRLSASANSISNGEYPCNQCDLKFSNFESFQTHLKLHLELLLRKQACPQCKEDFDSQESLLQHLTVHYMTTSTHYVCESCDKQFSSVDDLQKHLLDMHTFVLYHCTLCQEVFDSKVSIQVHLAVKHSNEKKMYRCTACNWDFRKEADLQVHVKHSHLGNPAKAHKCIFCGETFSTEVELQCHITTHSKKYNCKFCSKAFHAIILLEKHLREKHCVFDAATENGTANGVPPMATKKAEPADLQGMLLKNPEAPNSHEASEDDVDASEPMYGCDICGAAYTMEVLLQNHRLRDHNIRPGEDDGSRKKAEFIKGSHKCNVCSRTFFSENGLREHLQTHRGPAKHYMCPICGERFPSLLTLTEHKVTHSKSLDTGTCRICKMPLQSEEEFIEHCQMHPDLRNSLTGFRCVVCMQTVTSTLELKIHGTFHMQKLAGSSAASSPNGQGLQKLYKCALCLKEFRSKQDLVKLDVNGLPYGLCAGCMARSANGQVGGLAPPEPADRPCAGLRCPECSVKFESAEDLESHMQVDHRDLTPETSGPRKGTQTSPVPRKKTYQCIKCQMTFENEREIQIHVANHMIEEGINHECKLCNQMFDSPAKLLCHLIEHSFEGMGGTFKCPVCFTVFVQANKLQQHIFAVHGQEDKIYDCSQCPQKFFFQTELQNHTMSQHAQ

SEQ ID NO: 100021 - protein, 1224 aa, Homo sapiens; identical to SEQ ID NO: 100020
  Payload ID: 19929
  Gene Name: zinc finger protein 423
  Uniprot ID: Q2M1K9
  ENSP ID: ENSP00000457664

SEQ ID NO: 100022 - protein, 1224 aa, Homo sapiens; identical to SEQ ID NO: 100020
  Payload ID: 19929
  Gene Name: zinc finger protein 423
  Uniprot ID: Q2M1K9
  ENSP ID: ENSP00000457928

SEQ ID NO: 100023 - protein, 102 aa, Homo sapiens
  Payload ID: 19929
  Gene Name: zinc finger protein 423
  ENSP ID: ENSP00000479288
  MOD_RES (1)..(1): Any amino acid
XEEGEASDFSLAWDSSVTAAGGLEGEPECDQKTSRALEDRNSVTSQEERNEDDEDMEDESIYTCDHCQQDFESLADLTDHRAHRCPGGNAKQPQDSDRWLHG

SEQ ID NO: 100024 - protein, 752 aa, Homo sapiens
  Payload ID: 19930
  Gene Name: zinc finger protein 425
  Uniprot ID: Q6IV72
  ENSP ID: ENSP00000367300
MAEPASVTVTFDDVALYFSEQEWEILEKWQKQMYKQEMKTNYETLDSLGYAFSKPDLITWMEQGRMLLISEQGCLDKTRRTTSPPTDEQLNMKNTGKLLCFDDEGTPRTKEEDCRLNGPQKQDLCAALRGKERKILLAQTATFQSPSLRETEILNKKVSITAYDPDKKDLRHKPRETPGRLEIPTGPRCYSCYVCRKVFQVRRDLLKHKRSHSKSQLCRYPKYKNSSRGKSELRRTQRLLCQKKRFQCSECEKSYFLKGSLVTHQVVHTGQRPYPCPECDKTFRYRANLKKHLCLHRGERPFCCGECGRAFVQQCELTEHLRLHSGEKPFQCPQCDRCFRLKRGMKVHLTQHSGKRPFHCPECGRSFSRKAALKTHQRTHSEEKPFSCGECGRKFIYKIKLDEHIRVHTGEKPFSCPECNKSFRLKRSLKAHGLQHIGKRPFQCPECSRGFFWRNAMRAHQRLHSEQKPFPCAECGKRFTRPSKLACHTRVHDRQKEFPCGECKKTFSQQSRLTQHLKVHTTEKPFSCAECGRSFRRRAHLTEHTRLHSGEEPFQCPECDKSFSWKASMKFHQRMHRDEKPFACGECDKTYTHQSQLTEHLRLHSGEKPYQCPECEKTFRLKGNLKSHLLQHSGQKPFSCVMCGKSFTQQYRLTEHIRVHSGEKPFQCPECDKSYCIRGSLKVHLYKHSGERPFQCPECGKGFLQKRSLKAHLCLHSGERPFSCDECGRSFTYVGALKTHIAVHAKEKPSSL

SEQ ID NO: 100025 - protein, 149 aa, Homo sapiens
  Payload ID: 19930
  Gene Name: zinc finger protein 425
  ENSP ID: ENSP00000420379
MAEPASVRRAGGGCRLCRNSGPCRSWIGVTVTFDDVALYFSEQEWEILEKWQKQMYKQEMKTNYETLDSLGYAFSKPDLITWMEQGRMLLISEQGCLDKTRRTTSPPTDEQLNMKNTGKLLCFDDEGTPRTKEEDCRLNGPQKQDLCAA

SEQ ID NO: 100026 - protein, 554 aa, Homo sapiens
  Payload ID: 19931
  Gene Name: zinc finger protein 426
  Uniprot ID: Q9BUY5
  ENSP ID: ENSP00000253115
MAAADLSHGHYLSGDPVCLHEEKTPAGRIVADCLTDCYQDSVTFDDVAVDFTQEEWTLLDSTQRSLYSDVMLENYKNLATVGGQIIKPSLISWLEQEESRTVQGGVLQGWEMRLETQWSILQQDFLRGQTSIGIQLEGKHNGRELCDCEQCGEVFSEHSCLKTHVRTQSTGNTHDCNQYGKDFLTLCEKTSTGEKLSEFNQSEKIFSLTPNIVYQRTSTQEKSFECSHCGKSFINESYLQAHMRTHNGEKLYEWRNYGPGFIDSTSLSVLIETLNAKKPYKCKECGKGYRYPAYLSIHMRTHTGEKPYECKECGKAFNYSNSFQIHGRTHTGEKPYVCKECGKAFTQYSGLSMHVRSHSGDKPYECKECGKSFLTSSRLIQHIRTHTGEKPFVCVECGKAFAVSSNLSGHLRTHTEEKACECKICGKVFGYPSCLNNHMRTHSAQKPYTCKECGKAFNYSTHLKIHMRIHTGEKPYECKQCGKAFSHSSSFQIHERTHTGEKPYECKECGKAFTCSSSFRIHEKTHTEEKPYKCQQCGKAYSHPRSLRRHEQIH

SEQ ID NO: 100027 - protein, 554 aa, Homo sapiens; identical to SEQ ID NO: 100026
  Payload ID: 19931
  Gene Name: zinc finger protein 426
  Uniprot ID: Q9BUY5
  ENSP ID: ENSP00000439017

SEQ ID NO: 100028 - protein, 118 aa, Homo sapiens
  Payload ID: 19931
  Gene Name: zinc finger protein 426
  ENSP ID: ENSP00000466469
MAAADLSHGHYLSGDPVCLHEEKTPAGRIVADCLTDCYQDSVTFDDVAVDFTQEEWTLLDSTQRSLYSDVMLENYKNLATVGGQIIKPSLISWLEQEESRTVQGGVLQGRKTQWKGTL

SEQ ID NO: 100029 - protein, 516 aa, Homo sapiens
  Payload ID: 19931
  Gene Name: zinc finger protein 426
  ENSP ID: ENSP00000468100
MDSVTFDDVAVDFTQEEWTLLDSTQRSLYSDVMLENYKNLATVGGQIIKPSLISWLEQEESRTVQGGVLQGWEMRLETQWSILQQDFLRGQTSIGIQLEGKHNGRELCDCEQCGEVFSEHSCLKTHVRTQSTGNTHDCNQYGKDFLTLCEKTSTGEKLSEFNQSEKIFSLTPNIVYQRTSTQEKSFECSHCGKSFINESYLQAHMRTHNGEKLYEWRNYGPGFIDSTSLSVLIETLNAKKPYKCKECGKGYRYPAYLSIHMRTHTGEKPYECKECGKAFNYSNSFQIHGRTHTGEKPYVCKECGKAFTQYSGLSMHVRSHSGDKPYECKECGKSFLTSSRLIQHIRTHTGEKPFVCVECGKAFAVSSNLSGHLRTHTEEKACECKICGKVFGYPSCLNNHMRTHSAQKPYTCKECGKAFNYSTHLKIHMRIHTGEKPYECKQCGKAFSHSSSFQIHERTHTGEKPYECKECGKAFTCSSSFRIHEKTHTEEKPYKCQQCGKAYSHPRSLRRHEQIH

SEQ ID NO: 100030 - protein, 188 aa, Homo sapiens
  Payload ID: 19932
  Gene Name: zinc finger protein 428
  Uniprot ID: Q96B54
  ENSP ID: ENSP00000300811
MTETREPAETGGYASLEEDDEDLSPGPEHSSDSEYTLSEPDSEEEEDEEEEEEETTDDPEYDPGYKVKQRLGGGRGGPSRRAPRAAQPPAQPCQLCGRSPLGEAPPGTPPCRLCCPATAPQEAPAPEGRALGEEEEEPPRAGEGRPAGREEEEEEEEEGTYHCTECEDSFDNLGELHGHFMLHARGEV

SEQ ID NO: 100031 - protein, 218 aa, Homo sapiens
  Payload ID: 19932
  Gene Name: zinc finger protein 428
  ENSP ID: ENSP00000469484
MTETREPAETGGYASLEEDDEDLSPGWKGVAQSWLKCSLELLGSSDPPASASREAGTTGPEHSSDSEYTLSEPDSEEEEDEEEEEEETTDDPEYDPGYKVKQRLGGGRGGPSRRAPRAAQPPAQPCQLCGRSPLGEAPPGTPPCRLCCPATAPQEAPAPEGRALGEEEEEPPRAGEGRPAGREEEEEEEEEGTYHCTECEDSFDNLGELHGHFMLHAR

SEQ ID NO: 100032 - protein, 674 aa, Homo sapiens
  Payload ID: 19933
  Gene Name: zinc finger protein 429
  Uniprot ID: Q86V71
  ENSP ID: ENSP00000351280
MGPLTFTDVAIEFSLEEWQCLDTAQQNLYRNVMLENYRNLVFLGIAVSKPDLITCLEKEKEPCKMKRHEMVDEPPVVCSHFAEDFWPEQDIKDSFQKVTLRRYDKRGHENLQLRKGYKTVGDCKLYKGGYNGLNQCLTLTQSKMYHCDIYVKVFYAFSNADRYKTRHTGKKPFQCKKCGKSFCMLSQLTQHKKIHIRENTYRCKEFGNAFNQSSALTNHKRIYVGEKHYRCEECGKAFNHYSTLTNHKRIHTGEKPYKCKECGKAFSRYSTLTTHKRIHSGEKPYKCDECGKTFSISSTFTKHKIIHTEEKPYKCKECGKAFNRSSTLTSHKRIHTGEKPYKCEECGKAFNWSSTLTKHKVIHTGEKPYKCEECGKAFNQSSRLTRHKKIHTGEEPYKFEKCGRVFTCSSTLTQDKKIHTGEKPYNCEECGKVFTYSSTLTRHKRIHTEEKPYKCNECGKAFNRSSHLTSHRRIHTGEKPYKCEECGKAFKQSSNLNSHKKIHSGEKPYKCEECGKAFILSSRLTQHKKIHTGEKPYKCEECGKAFNRSSRLTQHKKIHTGEKPYKCKQCDKAFTHSSNLSSHKKIHSGEKPYKCEECGKAFNRSSRLTQHKKIHTREKPYKCEECAKAFTRSSRLTQHKKIHRMGVVAHACNPSTLGGRGGRITRSGDRDRPG

SEQ ID NO: 100033 - protein, 93 aa, Homo sapiens
  Payload ID: 19933
  Gene Name: zinc finger protein 429
  ENSP ID: ENSP00000469739
  MOD_RES (1)..(1): Any amino acid
XGVSLLLPRLECSGTISAHYNFPLPGSSDSPASASSVVGITGLLQLARGPLQTLFTWESQIEAVEWQKLLPAPSSGSFITEGHQPDANRSSPV

SEQ ID NO: 100034 - protein, 122 aa, Homo sapiens
  Payload ID: 19933
  Gene Name: zinc finger protein 429
  ENSP ID: ENSP00000470300
MGPLTFTDVAIEFSLEEWQCLDTAQQNLYRNVMLENYRNLVFLGIAVSKPDLITCLEKEKEPCKMKRHEMVDEPPDGVSLLLPRLECSGTISAHYNFPLPGSSDSPASASSVVGITGWGTSG

SEQ ID NO: 100035 - protein, 585 aa, Homo sapiens
  Payload ID: 19933
  Gene Name: zinc finger protein 429
  ENSP ID: ENSP00000479286
MGPLTFTDVAIEFSLEEWQCLDTAQQNLYRNVMLENYRNLVFLGIAVSKPDLITCLEKEKEPCKMKRHEMVDEPPVVCSHFAEDFWPEQDIKDSFQKVTLRRYDKRGHENLQLRKGYKTVGDCKLYKGGYNGLNQCLTLTQSKMYHCDIYVKVFYAFSNADRYKTRHTGKKPFQCKKCGKSFCMLSQLTQHKKIHIRENTYRCKEFGNAFNQSSALTNHKRIYVGEKHYRCEECGKAFNHYSTLTNHKRIHSGEKPYKCDECGKTFSISSTFTKHKIIHTEEKPYKCKECGKAFNRPQPLLAIIHTGEKPYKCEECAKPLTGLQLTKHKVIHTGEKPYKCEECGKAFNQSSRLTRHKKIHTGEEPYKFEKCGRVFTCSSTLTQDKKIHTGEKPYNCEECGKVFTYSSTLTRHKRIHTEEKPYKCNECGKAFNRSSHLTSHRRIHTGEKPYKCEECGKAFKQSSNLNSHKKIHSGEKPYKCEECGKAFILSSRLTQHKKIHTGEKPYKCEECGKAFNRSSRLTQHKKIHTGEKPYKCKQCDKAFTHSSNLSSHKKIHSGEKPYKCEECGKAFNRSSRLTQHKKENS

SEQ ID NO: 100036 - protein, 809 aa, Homo sapiens
  Payload ID: 19934
  Gene Name: zinc finger protein 43
  Uniprot ID: P17038
  ENSP ID: ENSP00000347045
MGPLTFMDVAIEFCLEEWQCLDIAQQNLYRNVMLENYRNLVFLGIAVSKPDLITCLEQEKEPWEPMRRHEMVAKPPVMCSHFTQDFWPEQHIKDPFQKATLRRYKNCEHKNVHLKKDHKSVDECKVHRGGYNGFNQCLPATQSKIFLFDKCVKAFHKFSNSNRHKISHTEKKLFKCKECGKSFCMLPHLAQHKIIHTRVNFCKCEKCGKAFNCPSIITKHKRINTGEKPYTCEECGKVFNWSSRLTTHKKNYTRYKLYKCEECGKAFNKSSILTTHKIIRTGEKFYKCKECAKAFNQSSNLTEHKKIHPGEKPYKCEECGKAFNWPSTLTKHKRIHTGEKPYTCEECGKAFNQFSNLTTHKRIHTAEKFYKCTECGEAFSRSSNLTKHKKIHTEKKPYKCEECGKAFKWSSKLTEHKLTHTGEKPYKCEECGKAFNWPSTLTKHNRIHTGEKPYKCEVCGKAFNQFSNLTTHKRIHTAEKPYKCEECGKAFSRSSNLTKHKKIHIEKKPYKCEECGKAFKWSSKLTEHKITHTGEKPYKCEECGKAFNHFSILTKHKRIHTGEKPYKCEECGKAFTQSSNLTTHKKIHTGEKFYKCEECGKAFTQSSNLTTHKKIHTGGKPYKCEECGKAFNQFSTLTKHKIIHTEEKPYKCEECGKAFKWSSTLTKHKIIHTGEKPYKCEECGKAFKLSSTLSTHKIIHTGEKPYKCEKCGKAFNRSSNLIEHKKIHTGEQPYKCEECGKAFNYSSHLNTHKRIHTKEQPYKCKECGKAFNQYSNLTTHNKIHTGEKLYKPEDVTVILTTPQTFSNIK

SEQ ID NO: 100037 - protein, 818 aa, Homo sapiens
  Payload ID: 19934
  Gene Name: zinc finger protein 43
  ENSP ID: ENSP00000350085
MPGHPGSWEMGPLTFMDVAIEFCLEEWQCLDIAQQNLYRNVMLENYRNLVFLGIAVSKPDLITCLEQEKEPWEPMRRHEMVAKPPVMCSHFTQDFWPEQHIKDPFQKATLRRYKNCEHKNVHLKKDHKSVDECKVHRGGYNGFNQCLPATQSKIFLFDKCVKAFHKFSNSNRHKISHTEKKLFKCKECGKSFCMLPHLAQHKIIHTRVNFCKCEKCGKAFNCPSIITKHKRINTGEKPYTCEECGKVFNWSSRLTTHKKNYTRYKLYKCEECGKAFNKSSILTTHKIIRTGEKFYKCKECAKAFNQSSNLTEHKKIHPGEKPYKCEECGKAFNWPSTLTKHKRIHTGEKPYTCEECGKAFNQFSNLTTHKRIHTAEKFYKCTECGEAFSRSSNLTKHKKIHTEKKPYKCEECGKAFKWSSKLTEHKLTHTGEKPYKCEECGKAFNWPSTLTKHNRIHTGEKPYKCEVCGKAFNQFSNLTTHKRIHTAEKPYKCEECGKAFSRSSNLTKHKKIHIEKKPYKCEECGKAFKWSSKLTEHKITHTGEKPYKCEECGKAFNHFSILTKHKRIHTGEKPYKCEECGKAFTQSSNLTTHKKIHTGEKFYKCEECGKAFTQSSNLTTHKKIHTGGKPYKCEECGKAFNQFSTLTKHKIIHTEEKPYKCEECGKAFKWSSTLTKHKIIHTGEKPYKCEECGKAFKLSSTLSTHKIIHTGEKPYKCEKCGKAFNRSSNLIEHKKIHTGEQPYKCEECGKAFNYSSHLNTHKRIHTKEQPYKCKECGKAFNQYSNLTTHNKIHTGEKLYKPEDVTVILTTPQTFSNIK

SEQ ID NO: 100038 - protein, 121 aa, Homo sapiens
  Payload ID: 19934
  Gene Name: zinc finger protein 43
  ENSP ID: ENSP00000469424
MRRHEMVAKPPVMCSHFTQDFWPEQHIKDPFQKATLRRYKNCEHKNVHLKKDHKSVDECKVHRGGYNGFNQCLPATQSKIFLFDKCVKAFHKFSNSNRHKISHTEKKLFKCKECGKSFCML

SEQ ID NO: 100039 - protein, 803 aa, Homo sapiens
  Payload ID: 19934
  Gene Name: zinc finger protein 43
  Uniprot ID: P17038
  ENSP ID: ENSP00000469578
MDVAIEFCLEEWQCLDIAQQNLYRNVMLENYRNLVFLGIAVSKPDLITCLEQEKEPWEPMRRHEMVAKPPVMCSHFTQDFWPEQHIKDPFQKATLRRYKNCEHKNVHLKKDHKSVDECKVHRGGYNGFNQCLPATQSKIFLFDKCVKAFHKFSNSNRHKISHTEKKLFKCKECGKSFCMLPHLAQHKIIHTRVNFCKCEKCGKAFNCPSIITKHKRINTGEKPYTCEECGKVFNWSSRLTTHKKNYTRYKLYKCEECGKAFNKSSILTTHKIIRTGEKFYKCKECAKAFNQSSNLTEHKKIHPGEKPYKCEECGKAFNWPSTLTKHKRIHTGEKPYTCEECGKAFNQFSNLTTHKRIHTAEKFYKCTECGEAFSRSSNLTKHKKIHTEKKPYKCEECGKAFKWSSKLTEHKLTHTGEKPYKCEECGKAFNWPSTLTKHNRIHTGEKPYKCEVCGKAFNQFSNLTTHKRIHTAEKPYKCEECGKAFSRSSNLTKHKKIHIEKKPYKCEECGKAFKWSSKLTEHKITHTGEKPYKCEECGKAFNHFSILTKHKRIHTGEKPYKCEECGKAFTQSSNLTTHKKIHTGEKFYKCEECGKAFTQSSNLTTHKKIHTGGKPYKCEECGKAFNQFSTLTKHKIIHTEEKPYKCEECGKAFKWSSTLTKHKIIHTGEKPYKCEECGKAFKLSSTLSTHKIIHTGEKPYKCEKCGKAFNRSSNLIEHKKIHTGEQPYKCEECGKAFNYSSHLNTHKRIHTKEQPYKCKECGKAFNQYSNLTTHNKIHTGEKLYKPEDVTVILTTPQTFSNIK

SEQ ID NO: 100040 - protein, 803 aa, Homo sapiens; identical to SEQ ID NO: 100039
  Payload ID: 19934
  Gene Name: zinc finger protein 43
  Uniprot ID: P17038
  ENSP ID: ENSP00000469645

SEQ ID NO: 100041 - protein, 803 aa, Homo sapiens; identical to SEQ ID NO: 100039
  Payload ID: 19934
  Gene Name: zinc finger protein 43
  Uniprot ID: P17038
  ENSP ID: ENSP00000470275

SEQ ID NO: 100042 - protein, 53 aa, Homo sapiens
  Payload ID: 19934
  Gene Name: zinc finger protein 43
  ENSP ID: ENSP00000470996
MRRHEMVAKPPVMCSHFTQDFWPEQHIKDPFQKATLRRYKNCEHKNVHLKKDH

SEQ ID NO: 100043 - protein, 60 aa, Homo sapiens
  Payload ID: 19934
  Gene Name: zinc finger protein 43
  ENSP ID: ENSP00000471176
MDVAIEFCLEEWQCLDIAQQNLYRNVMLENYRNLVFLGIAVSKPDLITCLEQEKEPWEPM

SEQ ID NO: 100044 - protein, 84 aa, Homo sapiens
  Payload ID: 19934
  Gene Name: zinc finger protein 43
  ENSP ID: ENSP00000471373
MDVAIEFCLEEWQCLDIAQQNLYRNVMLENYRNLVFLGIAVSKPDLITCLEQEKEPWEPMRRHEMVAKPPGGIVSLLNVFFDVQ

SEQ ID NO: 100045 - protein, 475 aa, Homo sapiens
  Payload ID: 19934
  Gene Name: zinc finger protein 43
  ENSP ID: ENSP00000485165
  MOD_RES (1)..(1): Any amino acid
XHTGEKPYTCEECGKAFNQFSNLTTHKRIHTAEKFYKCTECGEAFSRSSNLTKHKKIHTEKKPYKCEECGKAFKWSSKLTEHKLTHTGEKPYKCEECGKAFNWPSTLTKHNRIHTGEKPYKCEVCGKAFNQFSNLTTHKRIHTAEKPYKCEECGKAFSRSSNLTKHKKIHIEKKPYKCEECGKAFKWSSKLTEHKITHTGEKPYKCEECGKAFNHFSILTKHKRIHTGEKPYKCEECGKAFTQSSNLTTHKKIHTGEKFYKCEECGKAFTQSSNLTTHKKIHTGGKPYKCEECGKAFNQFSTLTKHKIIHTEEKPYKCEECGKAFKWSSTLTKHKIIHTGEKPYKCEECGKAFKLSSTLSTHKIIHTGEKPYKCEKCGKAFNRSSNLIEHKKIHTGEQPYKCEECGKAFNYSSHLNTHKRIHTKEQPYKCKECGKAFNQYSNLTTHNKIHTGEKLYKPEDVTVILTTPQTFSNIK

SEQ ID NO: 100046 - protein, 475 aa, Homo sapiens; identical to SEQ ID NO: 100045
  Payload ID: 19934
  Gene Name: zinc finger protein 43
  ENSP ID: ENSP00000485406
  MOD_RES (1)..(1): Any amino acid

SEQ ID NO: 100047 - protein, 475 aa, Homo sapiens; identical to SEQ ID NO: 100045
  Payload ID: 19934
  Gene Name: zinc finger protein 43
  ENSP ID: ENSP00000485470
  MOD_RES (1)..(1): Any amino acid

SEQ ID NO: 100048 - protein, 475 aa, Homo sapiens; identical to SEQ ID NO: 100045
  Payload ID: 19934
  Gene Name: zinc finger protein 43
  ENSP ID: ENSP00000485651
  MOD_RES (1)..(1): Any amino acid

SEQ ID NO: 100049 - protein, 570 aa, Homo sapiens
  Payload ID: 19935
  Gene Name: zinc finger protein 430
  Uniprot ID: Q9H8G1
  ENSP ID: ENSP00000261560
MENLKSGVYPLKEASGCPGADRNLLVYSFYEKGPLTFRDVAIEFSLEEWQCLDTAQQDLYRKVMLENYRNLVFLAGIAVSKPDLITCLEQGKEPWNMKRHAMVDQPPVTYSHFAQDLWPEQGIKDSFQEVILRRYGKCGHEDLQLRTGCKSVDECNLHKECYDELNQCLTTTQSEIFQYDKYVNVFYKFSNPNIQKIRHTGKKPFKCKKCDKSFCMLLHLTQHKRIHIRENSYQCEECGKVFNWFSTLTRHRRIHTGEKPYKCEQCGKAFKQSSTLTTHKIIHTGEKPYRCEECGKTFNRSSHLTTHKRIHTGEKPYRCEECGRAFNRSSHLTTHKIIHTGEKPYKCEECGKAFNQSSTLTTHKIIHAGEKPYKCEECGKAFYRFSYLTKHKIIHTGEKFYKCEECGKGFNWSSTLTKHKRIHTGEKPYKCEQCGKAFNESSNLTAHKIIHTGEKPYKCEECGKAFNRSPKLTAHKVIHSGEKPYKCEECGKAFNQFSNLTKHKITHIGDTSYKYLECDKAFSQSSTLTKHKVIHTGEKPYNCEEYGKAFNQSSNLIEQSNSYWRETLQM

SEQ ID NO: 100050 - protein, 108 aa, Homo sapiens
  Payload ID: 19935
  Gene Name: zinc finger protein 430
  ENSP ID: ENSP00000469148
MENLKSGVYPLKEASGCPGADRNLLVYSFYEKGPLTFRDVAIEFSLEEWQCLDTAQQDLYRKVMLENYRNLVFLGIAVSKPDLITCLEQGKEPWNMKRHAMVDQPPGR

SEQ ID NO: 100051 - protein, 73 aa, Homo sapiens
  Payload ID: 19935
  Gene Name: zinc finger protein 430
  ENSP ID: ENSP00000469787
  MOD_RES (1)..(1): Any amino acid
XLTKHKITHIGDTSYKYLECDKAFSQSSTLTKHKNIHTEEEPYECEEYGKAFNKSSILTRHKIILAGCGGSHL

SEQ ID NO: 100052 - protein, 113 aa, Homo sapiens
  Payload ID: 19935
  Gene Name: zinc finger protein 430
  ENSP ID: ENSP00000471313
MENLKSGVYPLKEASGCPGADRNLLVYSFYEKGPLTFRDVAIEFSLEEWQCLDTAQQDLYRKVMLENYRNLVFLAGIAVSKPDLITCLEQGKEPWNMKRHAMVDQPPGWSAMA

SEQ ID NO: 100053 - protein, 128 aa, Homo sapiens
  Payload ID: 19935
  Gene Name: zinc finger protein 430
  ENSP ID: ENSP00000473069
MENLKSGVYPLKEASGCPGADRNLLVYSFYEKGPLTFRDVAIEFSLEEWQCLDTAQQDLYRKVMLENYRNLVFLAGIAVSKPDLITCLEQGKEPWNMKRHAMVDQPPESVFLRLDLGLLVSRDLTALA

SEQ ID NO: 100054 - protein, 107 aa, Homo sapiens
  Payload ID: 19935
  Gene Name: zinc finger protein 430
  ENSP ID: ENSP00000481970
MENLKSGVYPLKEASGCPGADRNLLVYSFYEKGPLTFRDVAIEFSLEEWQCLDTAQQDLYRKVMLENYRNLVFLAGIAVSKPDLITCLEQGKEPWNMKRHAMVDQPP

SEQ ID NO: 100055 - protein, 107 aa, Homo sapiens; identical to SEQ ID NO: 100054
  Payload ID: 19935
  Gene Name: zinc finger protein 430
  ENSP ID: ENSP00000485069

SEQ ID NO: 100056 - protein, 108 aa, Homo sapiens; identical to SEQ ID NO: 100050
  Payload ID: 19935
  Gene Name: zinc finger protein 430
  ENSP ID: ENSP00000485210

SEQ ID NO: 100057 - protein, 107 aa, Homo sapiens; identical to SEQ ID NO: 100054
  Payload ID: 19935
  Gene Name: zinc finger protein 430
  ENSP ID: ENSP00000485410

SEQ ID NO: 100058 - protein, 107 aa, Homo sapiens
  Payload ID: 19935
  Gene Name: zinc finger protein 430
  ENSP ID: ENSP00000487036
ENLKSGVYPLKEASGCPGADRNLLVYSFYEKGPLTFRDVAIEFSLEEWQCLDTAQQDLYRKVMLENYRNLVFLGIAVSKPDLITCLEQGKEPWNMKRHAMVDQPPGR

SEQ ID NO: 100059 - protein, 576 aa, Homo sapiens
  Payload ID: 19936
  Gene Name: zinc finger protein 431
  Uniprot ID: Q8TF32
  ENSP ID: ENSP00000308578
MDDLKYGVYPLKEASGCPGAERNLLVYSYFEKETLTFRDVAIEFSLEEWECLNPAQQNLYMNVMLENYKNLVFLGVAVSKQDPVTCLEQEKEPWNMKRHEMVDEPPAMCSYFTKDLWPEQDIKDSFQQVILRRYGKCEHENLQLRKGSASVDEYKVHKEGYNELNQCLTTTQSKIFPCDKYVKVFHKFLNANRHKTRHTGKKPFKCKKCGKSFCMLLHLSQHKRIHIRENSYQCEECGKAFKWFSTLTRHKRIHTGEKPFKCEECGKAFKQSSTLTTHKIIHTGEKPYRCEECGKAFNRSSHLTTHKIIHTGEKPYKCEECGKAFNQSSTLSTHKFIHAGEKPYKCEECDKAFNRFSYLTKHKIIHTGEKSYKCEECGKGFNWSSTLTKHKRIHTGEKPYKCEVCGKAFNESSNLTTHKMIHTGEKPYKCEECGKAFNRSPQLTAHKIIHTGEKPYKCEECGKAFSQSSILTTHKRIHTGEKPYKCEECGKAFNRSSNLTKHKIIHTGEKSYKCEECGKAFNQSSTLTKHRKIHTRQKPYNCEECDNTFNQSSNLIKQNNSYWRETLQMSRMWESL

SEQ ID NO: 100060 - protein, 40 aa, Homo sapiens
  Payload ID: 19936
  Gene Name: zinc finger protein 431
  ENSP ID: ENSP00000469460
MDDLKYGVYPLKEASGCPGAERNLLVYSYFEKARSGGSHL

SEQ ID NO: 100061 - protein, 122 aa, Homo sapiens
  Payload ID: 19936
  Gene Name: zinc finger protein 431
  ENSP ID: ENSP00000470528
MDDLKYGVYPLKEASGCPGAERNLLVYSYFEKETLTFRDVAIEFSLEEWECLNPAQQNLYMNVMLENYKNLVFLGVAVSKQDPVTCLEQEKEPWNMKRHEMVDEPPGKTDHDLRLRELELSQ

SEQ ID NO: 100062 - protein, 144 aa, Homo sapiens
  Payload ID: 19936
  Gene Name: zinc finger protein 431
  ENSP ID: ENSP00000470668
MDDLKYGVYPLKEASGCPGAERNLLVYSYFEKETLTFRDVAIEFSLEEWECLNPAQQNLYMNVMLENYKNLVFLGVAVSKQDPVTCLEQEKEPWNMKRHEMVDEPPGYMCRMCSYVFLFYQRPLARARHKRFFSTSNTEKIWQM

SEQ ID NO: 100063 - protein, 325 aa, Homo sapiens
  Payload ID: 19936
  Gene Name: zinc finger protein 431
  ENSP ID: ENSP00000471876
MDDLKYGVYPLKEASGCPGAERNLLVYSYFEKSRSVAQAGMQWRSLSWLTVISASQVQVILVPQPPELLGLQETLTFRDVAIEFSLEEWECLNPAQQNLYMNVMLENYKNLVFLGVAVSKQDPVTCLEQEKEPWNMKRHEMVDEPPAMCSYFTKDLWPEQDIKDSFQQVILRRYGKCEHENLQLRKGSASVDEYKVHKEGYNELNQCLTTTQSKIFPCDKYVKVFHKFLNANRHKTRHTGKKPFKCKKCGKSFCMLLHLSQHKRIHIRENSYQCEECGKAFKWFSTLTRHKRIHTGEKPFKCEECGKAFKQSSTLTTHKIIHTGE

SEQ ID NO: 100064 - protein, 652 aa, Homo sapiens
  Payload ID: 19937
  Gene Name: zinc finger protein 432
  Uniprot ID: O94892
  ENSP ID: ENSP00000221315
MINAQELLTLEDVTVEFTWEEWQLLGPFQKDLYRDVMLEIYSNLLSMGYQVSKPDALSKLERGEEPWTMEDERHSRICPENNEVDDHLQDHLENQRMLKSVEQYHEHNAFGNTASQTKSLCLFRENHDTFELYIKTLKSNLSLVNQNKSCEINNSTKFSGDGKSFLHGNYEELYSAAKFSVSTKANSTKSQVSKHQRTHEIEKNHVCSECGKAFVKKSQLTDHERVHTGEKPYGCTLCAKVFSRKSRLNEHQRIHKREKSFICSECGKVFTMKSRLIEHQRTHTGEKPYICNECGKGFPGKRNLIVHQRNHTGEKSYICSECGKGFTGKSMLIIHQRTHTGEKPYICSECGKGFTTKHYVIIHQRNHTGEKPYICNECGKGFTMKSRMIEHQRTHTGEKPYICSECGKGFPRKSNLIVHQRNHTVEKSYLCSECGKGFTVKSMLIIHQRTHTGEKPYTCSECGKGFPLKSRLIVHQRTHTGEKPYRCSECGKGFIVNSGLMLHQRTHTGEKPYICNECGKGFAFKSNLVVHQRTHTGEKPFMCSECGKGFTMKRYLIVHQQIHTEEKSCICSECGRGFAKETELALHKQVHTGEKPYGCNECGKGFTMKSRLIVHQRTHTGEKPFVCSECRKAFSSKRNLIVHQRTHNGNKP

SEQ ID NO: 100065 - protein, 81 aa, Homo sapiens
  Payload ID: 19937
  Gene Name: zinc finger protein 432
  ENSP ID: ENSP00000470341
MINAQELLTLEDVTVEFTWEEWQLLGPFQKDLYRDVMLEIYSNLLSMGYQVSKPDALSKLERGEEPWTMEDERHSRICPGM

SEQ ID NO: 100066 - protein, 652 aa, Homo sapiens; identical to SEQ ID NO: 100064
  Payload ID: 19937
  Gene Name: zinc finger protein 432
  Uniprot ID: O94892
  ENSP ID: ENSP00000470488

SEQ ID NO: 100067 - protein, 179 aa, Homo sapiens
  Payload ID: 19937
  Gene Name: zinc finger protein 432
  ENSP ID: ENSP00000471172
MINAQELLTLEDVTVEFTWEEWQLLGPFQKDLYRDVMLEIYSNLLSMGYQVSKPDALSKLERGEEPWTMEDERHSRICPENNEVDDHLQDHLENQRMLKSVEQYHEHNAFGNTASQTKSLCLFRENHDTFELYIKTLKSNLSLVNQNKSCEINNSTKFSGDGKSFLHGNYEELYSAAKF

SEQ ID NO: 100068 - protein, 124 aa, Homo sapiens
  Payload ID: 19937
  Gene Name: zinc finger protein 432
  ENSP ID: ENSP00000471244
MINAQELLTLEDVTVEFTWEEWQLLGPFQKDLYRDVMLEIYSNLLSMGYQVSKPDALSKLERGEEPWTMEDERHSRICPENNEVDDHLQDHLENQRMLKSVEQYHEHNAFGNTASQTKSLCLFR

SEQ ID NO: 100069 - protein, 36 aa, Homo sapiens
  Payload ID: 19937
  Gene Name: zinc finger protein 432
  ENSP ID: ENSP00000472337
MINAQELLTLEDVTVEFTWEEWQLLGPFQKDLYRDV

SEQ ID NO: 100070 - protein, 673 aa, Homo sapiens
  Payload ID: 19938
  Gene Name: zinc finger protein 433
  Uniprot ID: Q8N7K0
  ENSP ID: ENSP00000339767
MMFQDSVAFEDVAVTFTQEEWALLDPSQKNLCRDVMQETFRNLASIGKKWKPQNIYVEYENLRRNLRIVGERLFESKEGHQHGEILTQVPDDMLKKTTTGVKSCESSVYGEVGSAHSSLNRHIRDDTGHKAYEYQEYGQKPYKCKYCKKPFNCLSSVQTHERAHSGRKLYVCEECGKTFISHSNLQRHRIMHRGDGPYKCKFCGKALMFLSLYLIHKRTHTGEKPYQCKQCGKAFSHSSSLRIHERTHTGEKPYKCNECGKAFHSSTCLHAHKRTHTGEKPYECKQCGKAFSSSHSFQIHERTHTGEKPYECKECGKAFKCPSSVRRHERTHSRKKPYECKHCGKVLSYLTSFQNHLGMHTGEISHKCKICGKAFYSPSSLQTHEKTHTGEKPYKCNQCGKAFNSSSSFRYHERTHTGEKPYECKQCGKAFRSASLLQTHGRTHTGEKPYACKECGKPFSNFSFFQIHERMHREEKPYECKGYGKTFSLPSLFHRHERTHTGGKTYECKQCGRSFNCSSSFRYHGRTHTGEKPYECKQCGKAFRSASQLQIHGRTHTGEKPYECKQCGKAFGSASHLQMHGRTHTGEKPYECKQCGKSFGCASRLQMHGRTHTGEKPYKCKQCGKAFGCPSNLRRHGRTHTGEKPYKCNQCGKVFRCSSQLQVHGRAHCIDTP

SEQ ID NO: 100071 - protein, 638 aa, Homo sapiens
  Payload ID: 19938
  Gene Name: zinc finger protein 433
  Uniprot ID: Q8N7K0
  ENSP ID: ENSP00000393416
MQETFRNLASIGKKWKPQNIYVEYENLRRNLRIVGERLFESKEGHQHGEILTQVPDDMLKKTTTGVKSCESSVYGEVGSAHSSLNRHIRDDTGHKAYEYQEYGQKPYKCKYCKKPFNCLSSVQTHERAHSGRKLYVCEECGKTFISHSNLQRHRIMHRGDGPYKCKFCGKALMFLSLYLIHKRTHTGEKPYQCKQCGKAFSHSSSLRIHERTHTGEKPYKCNECGKAFHSSTCLHAHKRTHTGEKPYECKQCGKAFSSSHSFQIHERTHTGEKPYECKECGKAFKCPSSVRRHERTHSRKKPYECKHCGKVLSYLTSFQNHLGMHTGEISHKCKICGKAFYSPSSLQTHEKTHTGEKPYKCNQCGKAFNSSSSFRYHERTHTGEKPYECKQCGKAFRSASLLQTHGRTHTGEKPYACKECGKPFSNFSFFQIHERMHREEKPYECKGYGKTFSLPSLFHRHERTHTGGKTYECKQCGRSFNCSSSFRYHGRTHTGEKPYECKQCGKAFRSASQLQIHGRTHTGEKPYECKQCGKAFGSASHLQMHGRTHTGEKPYECKQCGKSFGCASRLQMHGRTHTGEKPYKCKQCGKAFGCPSNLRRHGRTHTGEKPYKCNQCGKVFRCSSQLQVHGRAHCIDTP

SEQ ID NO: 100072 - protein, 77 aa, Homo sapiens
  Payload ID: 19938
  Gene Name: zinc finger protein 433
  ENSP ID: ENSP00000407475
MASFGASLWPDLGACSQHLSLYHSVTVELAASTARHPASSLQEDSVAFEDVAVTFTQEEWALLDPSQKNLCRDVMQE

SEQ ID NO: 100073 - protein, 166 aa, Homo sapiens
  Payload ID: 19938
  Gene Name: zinc finger protein 433
  ENSP ID: ENSP00000414857
MLVLSILLYTCEMFQDSVAFEDVAVTFTQEEWALLDPSQKNLCRDVMQETFRNLASIGKKWKPQNIYVEYENLRRNLRIVGERLFESKEGHQHGEILTQVPDDMLKKTTTGVKSCESSVYGEVGSAHSSLNRHIRDDTGHKAYEYQEYGQKPYKCKYCKKPFNCLS

SEQ ID NO: 100074 - protein, 41 aa, Homo sapiens
  Payload ID: 19938
  Gene Name: zinc finger protein 433
  ENSP ID: ENSP00000446484
MGDRNCRENHASMPGKVSGSLEVMKSMFKVLTDLVPGFSGL

SEQ ID NO: 100075 - protein, 77 aa, Homo sapiens
  Payload ID: 19938
  Gene Name: zinc finger protein 433
  ENSP ID: ENSP00000447205
MFQDSVAFEDVAVTFTQEEWALLDPSQKNLCRDVMQETFRNLASIGKKWKPQNIYVEYENLRRNLRIVGERLFESKE

SEQ ID NO: 100076 - protein, 117 aa, Homo sapiens
  Payload ID: 19938
  Gene Name: zinc finger protein 433
  ENSP ID: ENSP00000447951
MLVLSILLYTCEMFQDSVAFEDVAVTFTQEEWALLDPSQKNLCRDVMQETFRNLASIGKKWKPQNIYVEYENLRRNLRIVGERLFESKEGHQHGEILTQVPDDMLKKTTTGVKSCES

SEQ ID NO: 100077 - protein, 207 aa, Homo sapiens
  Payload ID: 19938
  Gene Name: zinc finger protein 433
  ENSP ID: ENSP00000448099
MDSVAFEDVAVTFTQEEWALLDPSQKNLCRDVMQETFRNLASIGKKWKPQNIYVEYENLRRNLRIVGERLFESKEGHQHGEILTQVPDDMLKKTTTGVKSCESSVYGEVGSAHSSLNRHIRDDTGHKAYEYQEYGQKPYKCKYCKKPFNCLSSVQTHERAHSGRKLYVCEECGKTFISHSNLQRHRIMHRGDGPYKCKFCGKALMFL

SEQ ID NO: 100078 - protein, 119 aa, Homo sapiens
  Payload ID: 19938
  Gene Name: zinc finger protein 433
  ENSP ID: ENSP00000448233
MQETFRNLASIGKKWKPQNIYVEYENLRRNLRIVGERLFESKEGHQHGEILTQVPDDMLKKTTTGVKSCESSVYGEVGSAHSSLNRHIRDDTGHKAYEYQEYGQKPYKCKYCKKPFNCL

SEQ ID NO: 100079 - protein, 52 aa, Homo sapiens
  Payload ID: 19938
  Gene Name: zinc finger protein 433
  ENSP ID: ENSP00000448806
MQETFRNLASIGKKWKPQNIYVEYENLRRNLRIVGERLFESKEGHQHGEILT

SEQ ID NO: 100080 - protein, 470 aa, Homo sapiens
  Payload ID: 19939
  Gene Name: zinc finger protein 436
  Uniprot ID: Q9C0F3
  ENSP ID: ENSP00000313582
MAATLLMAGSQAPVTFEDMAMYLTREEWRPLDAAQRDLYRDVMQENYGNVVSLDFEIRSENEVNPKQEISEDVQFGTTSERPAENAEENPESEEGFESGDRSERQWGDLTAEEWVSYPLQPVTDLLVHKEVHTGIRYHICSHCGKAFSQISDLNRHQKTHTGDRPYKCYECGKGFSRSSHLIQHQRTHTGERPYDCNECGKSFGRSSHLIQHQTIHTGEKPHKCNECGKSFCRLSHLIQHQRTHSGEKPYECEECGKSFSRSSHLAQHQRTHTGEKPYECNECGRGFSERSDLIKHYRVHTGERPYKCDECGKNFSQNSDLVRHRRAHTGEKPYHCNECGENFSRISHLVQHQRTHTGEKPYECNACGKSFSRSSHLITHQKIHTGEKPYECNECWRSFGERSDLIKHQRTHTGEKPYECVQCGKGFTQSSNLITHQRVHTGEKPYECTECEKSFSRSSALIKHKRVHTD

SEQ ID NO: 100081 - protein, 470 aa, Homo sapiens; identical to SEQ ID NO: 100080
  Payload ID: 19939
  Gene Name: zinc finger protein 436
  Uniprot ID: Q9C0F3
  ENSP ID: ENSP00000363736

SEQ ID NO: 100082 - protein, 470 aa, Homo sapiens; identical to SEQ ID NO: 100080
  Payload ID: 19939
  Gene Name: Zinc finger protein 436
  ENSP ID: ENSP00000489127

SEQ ID NO: 100083 - protein, 470 aa, Homo sapiens; identical to SEQ ID NO: 100080
  Payload ID: 19939
  Gene Name: Zinc finger protein 436
  ENSP ID: ENSP00000489469

SEQ ID NO: 100084 - protein, 818 aa, Homo sapiens
  Payload ID: 19940
  Gene Name: zinc finger protein 438
  Uniprot ID: Q7Z4V0
  ENSP ID: ENSP00000333571
MDSESNIPSGTIQSRKGLQNKSQFRTIAPKIVPKVLTSRMLPCHSPSRSDQVNLGPSINSKLLGMSTQNYALMQVAGQEGTFSLVALPHVASAQPIQKPRMSLPENLKLPIPRYQPPRNSKASRKKPILIFPKSGCSKAPAQTQMCPQMSPSPPHHPELLYKPSPFEEVPSLEQAPASISTAALTNGSDHGDLRPPVTNTHGSLNPPATPASSTPEEPAKQDLTALSGKAHFVSKITSSKPSAVASEKFKEQVDLAKTMTNLSPTILGNAVQLISSVPKGKLPIPPYSRMKTMEVYKIKSDANIAGFSLPGPKADCDKIPSTTEGFNAATKVASRLPVPQVSQQSACESAFCPPTKLDLNHKTKLNSGAAKRKGRKRKVPDEILAFQGKRRKYIINKCRDGKERVKNDPQEFRDQKLGTLKKYRSIMPKPIMVIPTLASLASPTTLQSQMLGGLGQDVLLNNSLTPKYLGCKQDNSSSPKPSSVFRNGFSGIKKPWHRCHVCNHHFQFKQHLRDHMNTHTNRRPYSCRICRKSYVRPGSLSTHMKLHHGENRLKKLMCCEFCAKVFGHIRVYFGHLKEVHRVVISTEPAPSELQPGDIPKNRDMSVRGMEGSLERENKSNLEEDFLLNQADEVKLQIKCGRCQITAQSFAEIKFHLLDVHGEEIEGRLQEGTFPGSKGTQEELVQHASPDWKRHPERGKPEKVHSSSEESHACPRLKRQLHLHQNGVEMLMENEGPQSGTNKPRETCQGPECPGLHTFLLWSHSGFNCLLCAEMLGRKEDLLHHWKHQHNCEDPSKLWAILNTVSNQGVIELSSEAEK

SEQ ID NO: 100085 - protein, 828 aa, Homo sapiens
  Payload ID: 19940
  Gene Name: zinc finger protein 438
  Uniprot ID: Q7Z4V0
  ENSP ID: ENSP00000354663
MQNSVSVPPKDEGESNIPSGTIQSRKGLQNKSQFRTIAPKIVPKVLTSRMLPCHSPSRSDQVNLGPSINSKLLGMSTQNYALMQVAGQEGTFSLVALPHVASAQPIQKPRMSLPENLKLPIPRYQPPRNSKASRKKPILIFPKSGCSKAPAQTQMCPQMSPSPPHHPELLYKPSPFEEVPSLEQAPASISTAALTNGSDHGDLRPPVTNTHGSLNPPATPASSTPEEPAKQDLTALSGKAHFVSKITSSKPSAVASEKFKEQVDLAKTMTNLSPTILGNAVQLISSVPKGKLPIPPYSRMKTMEVYKIKSDANIAGFSLPGPKADCDKIPSTTEGFNAATKVASRLPVPQVSQQSACESAFCPPTKLDLNHKTKLNSGAAKRKGRKRKVPDEILAFQGKRRKYIINKCRDGKERVKNDPQEFRDQKLGTLKKYRSIMPKPIMVIPTLASLASPTTLQSQMLGGLGQDVLLNNSLTPKYLGCKQDNSSSPKPSSVFRNGFSGIKKPWHRCHVCNHHFQFKQHLRDHMNTHTNRRPYSCRICRKSYVRPGSLSTHMKLHHGENRLKKLMCCEFCAKVFGHIRVYFGHLKEVHRVVISTEPAPSELQPGDIPKNRDMSVRGMEGSLERENKSNLEEDFLLNQADEVKLQIKCGRCQITAQSFAEIKFHLLDVHGEEIEGRLQEGTFPGSKGTQEELVQHASPDWKRHPERGKPEKVHSSSEESHACPRLKRQLHLHQNGVEMLMENEGPQSGTNKPRETCQGPECPGLHTFLLWSHSGFNCLLCAEMLGRKEDLLHHWKHQHNCEDPSKLWAILNTVSNQGVIELSSEAEK

SEQ ID NO: 100086 - protein, 392 aa, Homo sapiens
  Payload ID: 19940
  Gene Name: zinc finger protein 438
  ENSP ID: ENSP00000364460
MPKPIMVIPTLASLASPTTLQSQMLGGLGQDVLLNNSLTPKYLGCKQDNSSSPKPSSVFRNGFSGIKKPWHRCHVCNHHFQFKQHLRDHMNTHTNRRPYSCRICRKSYVRPGSLSTHMKLHHGENRLKKLMCCEFCAKVFGHIRVYFGHLKEVHRVVISTEPAPSELQPGDIPKNRDMSVRGMEGSLERENKSNLEEDFLLNQADEVKLQIKCGRCQITAQSFAEIKFHLLDVHGEEIEGRLQEGTFPGSKGTQEELVQHASPDWKRHPERGKPEKVHSSSEESHACPRLKRQLHLHQNGVEMLMENEGPQSGTNKPRETCQGPECPGLHTFLLWSHSGFNCLLCAEMLGRKEDLLHHWKHQHNCEDPSKLWAILNTVSNQGVIELSSEAEK

SEQ ID NO: 100087 - protein, 828 aa, Homo sapiens; identical to SEQ ID NO: 100085
  Payload ID: 19940
  Gene Name: zinc finger protein 438
  Uniprot ID: Q7Z4V0
  ENSP ID: ENSP00000387546

SEQ ID NO: 100088 - protein, 828 aa, Homo sapiens; identical to SEQ ID NO: 100085
  Payload ID: 19940
  Gene Name: zinc finger protein 438
  Uniprot ID: Q7Z4V0
  ENSP ID: ENSP00000406934

SEQ ID NO: 100089 - protein, 828 aa, Homo sapiens; identical to SEQ ID NO: 100085
  Payload ID: 19940
  Gene Name: zinc finger protein 438
  Uniprot ID: Q7Z4V0
  ENSP ID: ENSP00000412363

SEQ ID NO: 100090 - protein, 818 aa, Homo sapiens; identical to SEQ ID NO: 100084
  Payload ID: 19940
  Gene Name: zinc finger protein 438
  Uniprot ID: Q7Z4V0
  ENSP ID: ENSP00000413060

SEQ ID NO: 100091 - protein, 779 aa, Homo sapiens
  Payload ID: 19940
  Gene Name: zinc finger protein 438
  Uniprot ID: Q7Z4V0
  ENSP ID: ENSP00000445461
MLPCHSPSRSDQVNLGPSINSKLLGMSTQNYALMQVAGQEGTFSLVALPHVASAQPIQKPRMSLPENLKLPIPRYQPPRNSKASRKKPILIFPKSGCSKAPAQTQMCPQMSPSPPHHPELLYKPSPFEEVPSLEQAPASISTAALTNGSDHGDLRPPVTNTHGSLNPPATPASSTPEEPAKQDLTALSGKAHFVSKITSSKPSAVASEKFKEQVDLAKTMTNLSPTILGNAVQLISSVPKGKLPIPPYSRMKTMEVYKIKSDANIAGFSLPGPKADCDKIPSTTEGFNAATKVASRLPVPQVSQQSACESAFCPPTKLDLNHKTKLNSGAAKRKGRKRKVPDEILAFQGKRRKYIINKCRDGKERVKNDPQEFRDQKLGTLKKYRSIMPKPIMVIPTLASLASPTTLQSQMLGGLGQDVLLNNSLTPKYLGCKQDNSSSPKPSSVFRNGFSGIKKPWHRCHVCNHHFQFKQHLRDHMNTHTNRRPYSCRICRKSYVRPGSLSTHMKLHHGENRLKKLMCCEFCAKVFGHIRVYFGHLKEVHRVVISTEPAPSELQPGDIPKNRDMSVRGMEGSLERENKSNLEEDFLLNQADEVKLQIKCGRCQITAQSFAEIKFHLLDVHGEEIEGRLQEGTFPGSKGTQEELVQHASPDWKRHPERGKPEKVHSSSEESHACPRLKRQLHLHQNGVEMLMENEGPQSGTNKPRETCQGPECPGLHTFLLWSHSGFNCLLCAEMLGRKEDLLHHWKHQHNCEDPSKLWAILNTVSNQGVIELSSEAEK

SEQ ID NO: 100092 - protein, 95 aa, Homo sapiens
  Payload ID: 19940
  Gene Name: zinc finger protein 438
  ENSP ID: ENSP00000476810
MQNSVSVPPKDEGESNIPSGTIQSRKGLQNKSQFRTIAPKIVPKVLTSRMLPCHSPSRSDQVRCPGPLKRKLRFSFSCHLAQTSQRFINIVVKMS

SEQ ID NO: 100093 - protein, 499 aa, Homo sapiens
  Payload ID: 19941
  Gene Name: zinc finger protein 439
  Uniprot ID: Q8NDP4
  ENSP ID: ENSP00000305077
MLSLSPILLYTCEMFQDPVAFKDVAVNFTQEEWALLDISQKNLYREVMLETFWNLTSIGKKWKDQNIEYEYQNPRRNFRSVTEEKVNEIKEDSHCGETFTPVPDDRLNFQKKKASPEVKSCDSFVCEVGLGNSSSNMNIRGDTGHKACECQEYGPKPWKSQQPKKAFRYHPSLRTQERDHTGKKPYACKECGKNIIYHSSIQRHMVVHSGDGPYKCKFCGKAFHCLSLYLIHERTHTGEKPYECKQCGKSFSYSATHRIHERTHIGEKPYECQECGKAFHSPRSCHRHERSHMGEKAYQCKECGKAFMCPRYVRRHERTHSRKKLYECKQCGKALSSLTSFQTHIRMHSGERPYECKTCGKGFYSAKSFQRHEKTHSGEKPYKCKQCGKAFTRSGSFRYHERTHTGEKPYECKQCGKAFRSAPNLQLHGRTHTGEKPYQCKECGKAFRSASQLRIHRRIHTGEKPYECKKCGKAFRYVQNFRFHERTQTHKNALWRKTL

SEQ ID NO: 100094 - protein, 118 aa, Homo sapiens
  Payload ID: 19941
  Gene Name: zinc finger protein 439
  ENSP ID: ENSP00000388234
MFQDPVAFKDVAVNFTQEEWALLDISQKNLYREVMLETFWNLTSIGKKWKDQNIEYEYQNPRRNFRSVTEEKVNEIKEDSHCGETFTPVPDDRLNFQKKKASPEVKSCDSFVCEVGLG

SEQ ID NO: 100095 - protein, 363 aa, Homo sapiens
  Payload ID: 19941
  Gene Name: zinc finger protein 439
  ENSP ID: ENSP00000395632
MNIRGDTGHKACECQEYGPKPWKSQQPKKAFRYHPSLRTQERDHTGKKPYACKECGKNIIYHSSIQRHMVVHSGDGPYKCKFCGKAFHCLSLYLIHERTHTGEKPYECKQCGKSFSYSATHRIHERTHIGEKPYECQECGKAFHSPRSCHRHERSHMGEKAYQCKECGKAFMCPRYVRRHERTHSRKKLYECKQCGKALSSLTSFQTHIRMHSGERPYECKTCGKGFYSAKSFQRHEKTHSGEKPYKCKQCGKAFTRSGSFRYHERTHTGEKPYECKQCGKAFRSAPNLQLHGRTHTGEKPYQCKECGKAFRSASQLRIHRRIHTGEKPYECKKCGKAFRYVQNFRFHERTQTHKNALWRKTL

SEQ ID NO: 100096 - protein, 64 aa, Homo sapiens
  Payload ID: 19942
  Gene Name: zinc finger protein 44
  ENSP ID: ENSP00000346681
MALCYGTFWGYPKMLEAANLMEGLVDIGPWVTLPRGQPEVLEWGLPKDQAGELGTVDKSGLSGL

SEQ ID NO: 100097 - protein, 615 aa, Homo sapiens
  Payload ID: 19942
  Gene Name: zinc finger protein 44
  ENSP ID: ENSP00000347910
MDSVAFEDVAVNFTHEEWALLGPSQKNLYRDVMRETIRNLNCIGMKWENQNIDDQHQNLRRNPRCDVVERFGKSKDGSQCGETLSQIRNSIVNKNTPARVDACGSSVNGEVIMGHSSLNCYIRVDTGHKHRECHEYAEKSYTHKQCGKGLSYRHSFQTCERPHTGKKPYDCKECGKTFSSPGNLRRHMVVKGGDGPYKCELCGKAFFWPSLLRMHERTHTGEKPYECKQCSKAFPVYSSYLRHEKIHTGEKPYECKQCSKAFPDYSSYLRHERTHTGEKPYKCKQCGKAFSVSGSLRVHERIHTGEKPYTCKQCGKAFCHLGSFQRHMIMHSGDGPHKCKICGKGFDFPGSARIHEGTHTLEKPYECKQCGKLLSHRSSFRRHMMAHTGDGPHKCTVCGKAFDSPSVFQRHERTHTGEKPYECKQCGKAFRTSSSLRKHETTHTGEQPYKCKCGKAFSDLFSFQSHETTHSEEEPYECKECGKAFSSFKYFCRHERTHSEEKSYECQICGKAFSRFSYLKTHERTHTAEKPYECKQCRKAFFWPSFLLRHERTHTGERPYECKHCGKAFSRSSFCREHERTHTGEKPYECKECGKAFSSLSSFNRHKRTHWKDIL

SEQ ID NO: 100098 - protein, 663 aa, Homo sapiens
  Payload ID: 19942
  Gene Name: zinc finger protein 44
  Uniprot ID: P15621
  ENSP ID: ENSP00000348419
MALCYGTFWGYPKMLEAANLMEGLVDIGPWVTLPRGQPEVLEWGLPKDQDSVAFEDVAVNFTHEEWALLGPSQKNLYRDVMRETIRNLNCIGMKWENQNIDDQHQNLRRNPRCDVVERFGKSKDGSQCGETLSQIRNSIVNKNTPARVDACGSSVNGEVIMGHSSLNCYIRVDTGHKHRECHEYAEKSYTHKQCGKGLSYRHSFQTCERPHTGKKPYDCKECGKTFSSPGNLRRHMVVKGGDGPYKCELCGKAFFWPSLLRMHERTHTGEKPYECKQCSKAFPVYSSYLRHEKIHTGEKPYECKQCSKAFPDYSSYLRHERTHTGEKPYKCKQCGKAFSVSGSLRVHERIHTGEKPYTCKQCGKAFCHLGSFQRHMIMHSGDGPHKCKICGKGFDFPGSARIHEGTHTLEKPYECKQCGKLLSHRSSFRRHMMAHTGDGPHKCTVCGKAFDSPSVFQRHERTHTGEKPYECKQCGKAFRTSSSLRKHETTHTGEQPYKCKCGKAFSDLFSFQSHETTHSEEEPYECKECGKAFSSFKYFCRHERTHSEEKSYECQICGKAFSRFSYLKTHERTHTAEKPYECKQCRKAFFWPSFLLRHERTHTGERPYECKHCGKAFSRSSFCREHERTHTGEKPYECKECGKAFSSLSSFNRHKRTHWKDIL

SEQ ID NO: 100099 - protein, 637 aa, Homo sapiens
  Payload ID: 19942
  Gene Name: zinc finger protein 44
  Uniprot ID: P15621
  ENSP ID: ENSP00000377008
MALCYGTFWGYPKMLEAANLMEGLVDIGPWVTLPRGQPEVLEWGLPKDQDSVAFEDVAVNFTHEEWALLGPSQKNLYRDVMRETIRNLNCIGMKWENQNIDDQHQNLRRNPRCDVVERFGKSKDGSQCGETLSQIRNSIVNKNTPARVDACGSSVNGEVIMGHSSLNCYIRVDTGHKHRECHEYAEKSYTHKQCGKGLSYRHSFQTCERPHTGKKPYDCKECGKTFSSPGNLRRHMVVKGGDGPYKCELCGKAFFWPSLLRMHERTHTGEKPYECKQCSKAFPVYSSYLRHEKIHTGEKPYECKQCSKAFPDYSSYLRHERTHTGEKPYKCKQCGKAFSVSGSLRVHERIHTGEKPYTCKQCGKAFCHLGSFQRHMIMHSGDGPHKCKICGKGFDFPGSARIHEGTHTLEKPYECKQCGKLLSHRSSFRRHMMAHTGDGPHKCTVCGKAFDSPSVFQRHERTHTGEKPYECKQCGKAFRTSSSLRKHETTHTGEQPYKCKCGKAFSDLFSFQSHETTHSEEEPYECKECGKAFSSFKYFCRHERTHSEEKSYECQICGKAFSRFSYLKTHERTHTAEKPYECKQCRKAFFWPSFLLRHERTHTGERPYECKHCGKAFSRSSFCREHERTHTGEKPYE

SEQ ID NO: 100100 - protein, 589 aa, Homo sapiens
  Payload ID: 19942
  Gene Name: zinc finger protein 44
  Uniprot ID: P15621
  ENSP ID: ENSP00000380850
MDSVAFEDVAVNFTHEEWALLGPSQKNLYRDVMRETIRNLNCIGMKWENQNIDDQHQNLRRNPRCDVVERFGKSKDGSQCGETLSQIRNSIVNKNTPARVDACGSSVNGEVIMGHSSLNCYIRVDTGHKHRECHEYAEKSYTHKQCGKGLSYRHSFQTCERPHTGKKPYDCKECGKTFSSPGNLRRHMVVKGGDGPYKCELCGKAFFWPSLLRMHERTHTGEKPYECKQCSKAFPVYSSYLRHEKIHTGEKPYECKQCSKAFPDYSSYLRHERTHTGEKPYKCKQCGKAFSVSGSLRVHERIHTGEKPYTCKQCGKAFCHLGSFQRHMIMHSGDGPHKCKICGKGFDFPGSARIHEGTHTLEKPYECKQCGKLLSHRSSFRRHMMAHTGDGPHKCTVCGKAFDSPSVFQRHERTHTGEKPYECKQCGKAFRTSSSLRKHETTHTGEQPYKCKCGKAFSDLFSFQSHETTHSEEEPYECKECGKAFSSFKYFCRHERTHSEEKSYECQICGKAFSRFSYLKTHERTHTAEKPYECKQCRKAFFWPSFLLRHERTHTGERPYECKHCGKAFSRSSFCREHERTHTGEKPYE

SEQ ID NO: 100101 - protein, 154 aa, Homo sapiens
  Payload ID: 19942
  Gene Name: zinc finger protein 44
  ENSP ID: ENSP00000471655
MALCYGTFWGYPKMLEAANLMEGLVDIGPWVTLPRGQPEVLEWGLPKDQDSVAFEDVAVNFTHEEWALLGPSQKNLYRDVMRETIRNLNCIGMKWENQNIDDQHQNLRRNPRLSETWLQNFILIHYGHLVALSDGGLLQFSTGQGLPVTQAGVQ

SEQ ID NO: 100102 - protein, 595 aa, Homo sapiens
  Payload ID: 19943
  Gene Name: zinc finger protein 440
  Uniprot ID: Q8IYI8
  ENSP ID: ENSP00000305373
MDPVAFKDVAVNFTQEEWALLDISQRKLYREVMLETFRNLTSLGKRWKDQNIEYEHQNPRRNFRSLIEEKVNEIKDDSHCGETFTPVPDDRLNFQEKKASPEVKSCESFVCGEVGLGNSSFNMNIRGDIGHKAYEYQEYGPKPCKCQQPKKAFRYRPSFRTQERDHTGEKPNACKVCGKTFISHSSVRRHMVMHSGDGPYKCKFCGKAFHCLRLYLIHERIHTGEKPCECKQCGKSFSYSATHRIHKRTHTGEKPYEYQECGKAFHSPRSYRRHERIHMGEKAYQCKECGKAFTCPRYVRIHERTHSRKNLYECKQCGKALSSLTSFQTHVRLHSGERPYECKICGKDFCSVNSFQRHEKIHSGEKPYKCKQCGKAFPHSSSLRYHERTHTGEKPYECKQCGKAFRSASHLRVHGRTHTGEKPYECKECGKAFRYVNNLQSHERTQTHIRIHSGERRYKCKICGKGFYCPKSFQRHEKTHTGEKLYECKQRSVVPSVVPVPFDIMKGLTLERSPINASNVGKPSELCQSFECMVGLTLKRNPMSVSNDGKPSDLPHTFEYVVGHTMERSPMHVRNVGNPSDLPRTFEFMKGHKHT

SEQ ID NO: 100103 - protein, 272 aa, Homo sapiens
  Payload ID: 19943
  Gene Name: zinc finger protein 440
  ENSP ID: ENSP00000393489
MMFQDPVAFKDVAVNFTQEEWALLDISQRKLYREVMLETFRNLTSLGKRWKDQNIEYEHQNPRRNFRSLIEEKVNEIKDDSHCGETFTPVPDDRLNFQEKKASPEVKSCESFVCGEVGLGNSSFNMNIRGDIGHKAYEYQEYGPKPCKCQQPKKAFRYRPSFRTQERDHTGEKPNACKVCGKTFISHSSVRRHMVMHSGDGPYKCKFCGKAFHCLRLYLIHERIHTGEKPCECKQCGKSFSYSATHRIHKRTHTGEKPYEYQECGKAFHSPR

SEQ ID NO: 100104 - protein, 53 aa, Homo sapiens
  Payload ID: 19943
  Gene Name: zinc finger protein 440
  ENSP ID: ENSP00000404425
MNIRGDIGHKAYEYQEYGPKPCKCQQPKKAFRYRPSFRTQERDHTGEKPNACK

SEQ ID NO: 100105 - protein, 169 aa, Homo sapiens
  Payload ID: 19943
  Gene Name: zinc finger protein 440
  ENSP ID: ENSP00000411974
MFQDPVAFKDVAVNFTQEEWALLDISQRKLYREVMLETFRNLTSLGKRWKDQNIEYEHQNPRRNFRSLIEEKVNEIKDDSHCGETFTPVPDDRLNFQEKKASPEVKSCESFVCGEVGLGNSSFNMNIRGDIGHKAYEYQEYGPKPCKCQQPKKAFRYRPSFRTQERDHT

SEQ ID NO: 100106 - protein, 49 aa, Homo sapiens
  Payload ID: 19943
  Gene Name: zinc finger protein 440
  ENSP ID: ENSP00000465030
MLETFRNLTSLGKRWKDQNIEYEHQNPRRNFRSLIEEKVNEIKDDSHCG

SEQ ID NO: 100107 - protein, 693 aa, Homo sapiens
  Payload ID: 19944
  Gene Name: zinc finger protein 441
  Uniprot ID: Q8N8Z8
  ENSP ID: ENSP00000350576
MDSVAFEDVAINFTCEEWALLGPSQKSLYRDVMQETIRNLDCIGMIWQNHDIEEDQYKDLRRNLRCHMVERACEIKDNSQCGGPFTQTQDSIVNEKIPGVDPWESSECTDVLMGRSSLNCYVRVDSEHKPCEYQEYGEKPYTHTQCGTAFSYQPCFQIHERPQHGKKLYDCKECASFSSLENLQRHMAAHHGDGPRICKLCGNAFIWPSLFHMLRRTHTEEKPYEYEQCSTAFPAYSSTLRHERTHSGEKPYQCKQCGKAFSCSCYTQLYERTHTGEQSYECKQCGKAFYHLGSFQRHMIVHTGDGPHKCKICGKGFLSPSSVRRHKRTHTGEKPYECKYCGKAFSDCTGFRRHMITHTGDGPHKCKVCGKAFDSPSLCRRHETTHTGEKPYKCECGKAFSDFYYFRNHETTHTGEKPYKCKQCGKAFICCTYLQIHERIHTGERPYKCKQCGKAFRSSNYIRVHEKTHTGEKPYECKQCGKALSHLKSFQRHMIMHTGDGPHKCKICGKSFDSPSSFRRHERIHTGERPYKCKLCGKGFRSSSYIQLHERTHTGEKPYGCQQCGKALSDLSSFRRHMITHTGNGPHKCKICGKGFDYPSSVQRHERTHTGEKPYECKECGKAFSHSSYLRIHERVHTGEKPYKCKECGKPFHCPSAFHKHERTHSMEKPYKCKECGEAFHCISSFHKHEMTH

SEQ ID NO: 100108 - protein, 44 aa, Homo sapiens
  Payload ID: 19944
  Gene Name: zinc finger protein 441
  ENSP ID: ENSP00000386658
MDSVAFEDVAINFTCEEWALLGPSQKSLYRDVMQETIRNLDCID

SEQ ID NO: 100109 - protein, 627 aa, Homo sapiens
  Payload ID: 19945
  Gene Name: zinc finger protein 442
  Uniprot ID: Q9H7R0
  ENSP ID: ENSP00000242804
MIVFGGEDRSDLFLPDSQTNEERKQYDSVAFEDVAVNFTQEEWALLGPSQKSLYRDVMWETIRNLDCIGMKWEDTNIEDQHRNPRRSLRCHIIERFSESRQPDSTVNEKPPGVDPCKSSVCGEIMGCSFLNCYITFDAGHKPDECQEYGEKPHTHKQCGTAFNYHHSFQTQERPHTGKKRYDCKECGKTFSSSGNLRRHIIVQRGGGPYICKLCGKAFFWPSLFRMHERTHTGEKPYECKQCCKAFPIYSSYLRHERTHTGEKPYECKHCSKAFPDYSSYVRHERTHTGEKPYKCKRCGRAFSVSSSLRIHERTHTGEKPYECKQCGKAFHHLGSFQRHMIRHTGDGPHKCKICGKGFDCPSSLQSHERTHTGEKPYECKQCGKALSHHSSFRSHMIMHTGDGPHKCKVCGKAFIYPSVFQGHERTHTGEKPYECKECGKAFRISSSLRRHETTHTGEKPYKCKCGKAFIDFYSFQNHETTHTGEKPYECKECGKAFSCFTYLSQHRRTHMAEKPYECKTCKKAFSHFGNLKVHERIHTGEKPYECKECRKAFSWLTCLLRHERIHTGKKSYECQQCGKAFTRSRFLRGHEKTHTGEKMHECKECGKALSSLSSLHRHKRTHWRDTL

SEQ ID NO: 100110 - protein, 558 aa, Homo sapiens
  Payload ID: 19945
  Gene Name: zinc finger protein 442
  Uniprot ID: Q9H7R0
  ENSP ID: ENSP00000388634
MKWEDTNIEDQHRNPRRSLRCHIIERFSESRQPDSTVNEKPPGVDPCKSSVCGEIMGCSFLNCYITFDAGHKPDECQEYGEKPHTHKQCGTAFNYHHSFQTQERPHTGKKRYDCKECGKTFSSSGNLRRHIIVQRGGGPYICKLCGKAFFWPSLFRMHERTHTGEKPYECKQCCKAFPIYSSYLRHERTHTGEKPYECKHCSKAFPDYSSYVRHERTHTGEKPYKCKRCGRAFSVSSSLRIHERTHTGEKPYECKQCGKAFHHLGSFQRHMIRHTGDGPHKCKICGKGFDCPSSLQSHERTHTGEKPYECKQCGKALSHHSSFRSHMIMHTGDGPHKCKVCGKAFIYPSVFQGHERTHTGEKPYECKECGKAFRISSSLRRHETTHTGEKPYKCKCGKAFIDFYSFQNHETTHTGEKPYECKECGKAFSCFTYLSQHRRTHMAEKPYECKTCKKAFSHFGNLKVHERIHTGEKPYECKECRKAFSWLTCLLRHERIHTGKKSYECQQCGKAFTRSRFLRGHEKTHTGEKMHECKECGKALSSLSSLHRHKRTHWRDTL

SEQ ID NO: 100111 - protein, 154 aa, Homo sapiens
  Payload ID: 19945
  Gene Name: zinc finger protein 442
  ENSP ID: ENSP00000404935
MKWEDTNIEDQHRNPRRSLRCHIIERFSESRQPDSTVNEKPPGVDPCKSSVCGEIMGCSFLNCYITFDAGHKPDECQEYGEKPHTHKQCGTAFNYHHSFQTQERPHTGKKRYDCKECGKTFSSSGNLRRHIIVQRGGGPYICKLCGKAFFWPSL

SEQ ID NO: 100112 - protein, 627 aa, Homo sapiens; identical to SEQ ID NO: 100109
  Payload ID: 19945
  Gene Name: zinc finger protein 442
  Uniprot ID: Q9H7R0
  ENSP ID: ENSP00000440162

SEQ ID NO: 100113 - protein, 671 aa, Homo sapiens
  Payload ID: 19946
  Gene Name: zinc finger protein 443
  Uniprot ID: Q9Y2A4
  ENSP ID: ENSP00000301547
MASVALEDVAVNFTREEWALLGPCQKNLYKDVMQETIRNLDCVVMKWKDQNIEDQYRYPRKNLRCRMLERFVESKDGTQCGETSSQIQDSIVTKNTLPGVGPCESSMRGEKVMGHSSLNCYIRVGAGHKPHEYHECGEKPDTHKQRGKAFSYHNSFQTHERLHTGKKPYDCKECGKSFSSLGNLQRHMAVQRGDGPYKCKLCGKAFFWPSLLHMHERTHTGEKPYECKQCSKAFSFYSSYLRHERTHTGEKPYECKQCSKAFPFYSSYLRHERTHTGEKPYKCKQCSKAFPDSSSCLIHERTHTGEKPYTCKQCGKAFSVSGSLQRHETTHSAEKPYACQQCGKAFHHLGSFQRHMIRHTGNGPHKCKICGKGFDCPSSLQSHERTHTGEKPYECKQCGKALSHRSSFRSHMIMHTGDGPHKCKVCGKAFVYPSVFQRHERTHTAEKPYKCKQCGKAYRISSSLRRHETTHTGEKPYKCKLGKACIDFCSFQNHKTTHTGEKPYECKECGKAFSRFRYLSRHKRTHTGEKPYECKTCRKAFGHYDNLKVHERIHSGEKPYECKECGKAFSWLTCFLRHERIHMREKSYECPQCGKAFTHSRFLQGHEKTHTGENPYECKECGKAFASLSSLHRHKKTHWKKTHTGENPYECKECGKAFASLSSLHRHKKTH

SEQ ID NO: 100114 - protein, 64 aa, Homo sapiens
  Payload ID: 19946
  Gene Name: zinc finger protein 443
  ENSP ID: ENSP00000389105
MASVALEDVAVNFTREEWALLGPCQKNLYKDVMQETIRNLDCVVMKWKDQNIEDQYRYPRKNLR

SEQ ID NO: 100115 - protein, 327 aa, Homo sapiens
  Payload ID: 19947
  Gene Name: zinc finger protein 444
  Uniprot ID: Q8N0Y2
  ENSP ID: ENSP00000338860
MEVAVPVKQEAEGLALDSPWHRFRRFHLGDAPGPREALGLLRALCRDWLRPEVHTKEQMLELLVLEQFLSALPADTQAWVCSRQPQSGEEAVALLEELWGPAASPDGSSATRVPQDVTQGPGATGGKEDSGMIPLAGTAPGAEGPAPGDSQAVRPYKQEPSSPPLAPGLPAFLAAPGTTSCPECGKTSLKPAHLLRHRQSHSGEKPHACPECGKAFRRKEHLRRHRDTHPGSPGSPGPALRPLPAREKPHACCECGKTFYWREHLVRHRKTHSGARPFACWECGKGFGRREHVLRHQRIHGRAAASAQGAVAPGPDGGGPFPPWPLG

SEQ ID NO: 100116 - protein, 99 aa, Homo sapiens
  Payload ID: 19947
  Gene Name: zinc finger protein 444
  ENSP ID: ENSP00000465070
MEVAVPVKQEAEGLALDSPWHRFRRFHLGDAPGPREALGLLRALCRDWLRPEVHTKEQMLELLVLEQFLSALPADTQAWVCSRQPQSGEEAVALLEELW

SEQ ID NO: 100117 - protein, 90 aa, Homo sapiens
  Payload ID: 19947
  Gene Name: zinc finger protein 444
  ENSP ID: ENSP00000465171
MEVAVPVKQEAEGLALDSPWHRFRRFHLGDAPGPREALGLLRALCRDWLRPEVHTKEQMLELLVLEQFLSALPADTQAWVCSRQPQSGEE

SEQ ID NO: 100118 - protein, 44 aa, Homo sapiens
  Payload ID: 19947
  Gene Name: zinc finger protein 444
  ENSP ID: ENSP00000465466
MEVAVPVKQEAEGLALDSPWHRFRRFHLGDAPGPREALGLLRAL

SEQ ID NO: 100119 - protein, 72 aa, Homo sapiens
  Payload ID: 19947
  Gene Name: zinc finger protein 444
  ENSP ID: ENSP00000466287
MEVAVPVKQEAEGLALDSPWHRFRRFHLGDAPGPREALGLLRALCRDWLRPEVHTKEQMLELLVLEQFLSAL

SEQ ID NO: 100120 - protein, 70 aa, Homo sapiens
  Payload ID: 19947
  Gene Name: zinc finger protein 444
  ENSP ID: ENSP00000466666
MEVAVPVKQEAEGLALDSPWHRFRRFHLGDAPGPREALGLLRALCRDWLRPEVHTKEQMLELLVLEQFLS

SEQ ID NO: 100121 - protein, 326 aa, Homo sapiens
  Payload ID: 19947
  Gene Name: zinc finger protein 444
  Uniprot ID: Q8N0Y2
  ENSP ID: ENSP00000468069
MEVAVPVKQEAEGLALDSPWHRFRRFHLGDAPGPREALGLLRALCRDWLRPEVHTKEQMLELLVLEQFLSALPADTQAWVCSRQPQSGEEAVALLEELWGPAASPDGSSATRVPQDVTQGPGATGGKEDSGMIPLGTAPGAEGPAPGDSQAVRPYKQEPSSPPLAPGLPAFLAAPGTTSCPECGKTSLKPAHLLRHRQSHSGEKPHACPECGKAFRRKEHLRRHRDTHPGSPGSPGPALRPLPAREKPHACCECGKTFYWREHLVRHRKTHSGARPFACWECGKGFGRREHVLRHQRIHGRAAASAQGAVAPGPDGGGPFPPWPLG

SEQ ID NO: 100122 - protein, 77 aa, Homo sapiens
  Payload ID: 19947
  Gene Name: zinc finger protein 444
  ENSP ID: ENSP00000468762
MEVAVPVKQEAEGLALDSPWHRFRRFHLGDAPGPREALGLLRALCRDWLRPEVHTKEQMLELLVLEQFLSALPADTQ

SEQ ID NO: 100123 - protein, 1031 aa, Homo sapiens
  Payload ID: 19948
  Gene Name: zinc finger protein 445
  Uniprot ID: P59923
  ENSP ID: ENSP00000379387
MPPGRWHAAYPAQAQSSRERGRLQTVKKEEEDESYTPVQAARPQTLNRPGQELFRQLFRQLRYHESSGPLETLSRLRELCRWWLRPDVLSKAQILELLVLEQFLSILPGELRVWVQLHNPESGEEAVALLEELQRDLDGTSWRDPGPAQSPDVHWMGTGALRSAQIWSLASPLRSSSALGDHLEPPYEIEARDFLAGQSDTPAAQMPALFPREGCPGDQVTPTRSLTAQLQETMTFKDVEVTFSQDEWGWLDSAQRNLYRDVMLENYRNMASLVGPFTKPALISWLEAREPWGLNMQAAQPKGNPVAAPTGDDLQSKTNKFILNQEPLEEAETLAVSSGCPATSVSEGIGLRESFQQKSRQKDQCENPIQVRVKKEETNFSHRTGKDSEVSGSNSLDLKHVTYLRVSGRKESLKHGCGKHFRMSSHHYDYKKYGKGLRHMIGGFSLHQRIHSGLKGNKKDVCGKDFSLSSHHQRGQSLHTVGVSFKCSDCGRTFSHSSHLAYHQRLHTQEKAFKCRVCGKAFRWSSNCARHEKIHTGVKPYKCDLCEKAFRRLSAYRLHRETHAKKKFLELNQYRAALTYSSGFDHHLGDQSGEKLFDCSQCRKSFHCKSYVLEHQRIHTQEKPYKCTKCRKTFRWRSNFTRHMRLHEEEKFYKQDECREGFRQSPDCSQPQGAPAVEKTFLCQQCGKTFTRKKTLVDHQRIHTGEKPYQCSDCGKDFAYRSAFIVHKKKHAMKRKPEGGPSFSQDTVFQVPQSSHSKEEPYKCSQCGKAFRNHSFLLIHQRVHTGEKPYKCRECGKAFRWSSNLYRHQRIHSLQKQYDCHESEKTPNVEPKILTGEKRFWCQECGKTFTRKRTLLDHKGIHSGEKRYKCNLCGKSYDRNYRLVNHQRIHSTERPFKCQWCGKEFIGRHTLSSHQRKHTRAAQAERSPPARSSSQDTKLRLQKLKPSEEMPLEDCKEACSQSSRLTGLQDISIGKKCHKCSICGKTFNKSSQLISHKRFHTRERPFKCSKCGKTFRWSSNLARHMKNHIRD

SEQ ID NO: 100124 - protein, 1031 aa, Homo sapiens; identical to SEQ ID NO: 100123
  Payload ID: 19948
  Gene Name: zinc finger protein 445
  Uniprot ID: P59923
  ENSP ID: ENSP00000413073

SEQ ID NO: 100125 - protein, 273 aa, Homo sapiens [sequence omitted]

SEQ ID NO: 100126 - protein, 273 aa, Homo sapiens [sequence omitted]

SEQ ID NO: 100127 - protein, 1031 aa, Homo sapiens; identical to SEQ ID NO: 100123
  Payload ID: 19948
  Gene Name: zinc finger protein 445
  ENSP ID: ENSP00000489139

SEQ ID NO: 100128 - protein, 1031 aa, Homo sapiens; identical to SEQ ID NO: 100123
  Payload ID: 19948
  Gene Name: zinc finger protein 445
  ENSP ID: ENSP00000489368

SEQ ID NO: 100129 - protein, 336 aa, Homo sapiens
  Payload ID: 19949
  Gene Name: zinc finger protein 446
  ENSP ID: ENSP00000336565
MPSPLGPPCLPVMDPETTLEEPETARLRFRGFCYQEVAGPREALARLRELCCQWLQPEAHSKEQMLEMLVLEQFLGTLPPEIQAWVRGQRPGSPEEAAALVEGLQHDPGQLLGWITAHVLKQEVLPAAQKTEEPLGSPHPSGTVESPGEGPQDTRIEGSVQLSCSVKEEPNVDGQEVAPSSPPLAAQSPEGNHGHQEPASTSFHPPRIQGYRPTSQRHRPSQSWGCCSRGQASAEACAREMRVRVHLAAQRPSRPRAQGRQPGRACLGLPLLPPLCAQGHRQCPLSPHLQRRDWSRLPPPGSPTRASSVAAASTGSQCSSSTTGHTRVGQVCSPRG

SEQ ID NO: 100130 - protein, 141 aa, Homo sapiens
  Payload ID: 19949
  Gene Name: zinc finger protein 446
  ENSP ID: ENSP00000470963
MPSPLGPPCLPVMDPETTLEEPETARLRFRGFCYQEVAGPREALARLRELCCQWLQPEAHSKEQMLEMLVLEQFLGTLPPEIQAWVRGQRPGSPEEAAALVEGLQHDPGQLLGWITAHVLKQEVLPAAQKTEEPLGSPHPS

SEQ ID NO: 100131 - protein, 399 aa, Homo sapiens
  Payload ID: 19949
  Gene Name: zinc finger protein 446
  ENSP ID: ENSP00000472219
MPSPLGPPCLPVMDPETTLEEPETARLRFRGFCYQEVAGPREALARLRELCCQWLQPEAHSKEQMLEMLVLEQFLGTLPPEIQAWVRGQRPGSPEEAAALVEGLQHDPGQLLGWITAHVLKQEVLPAAQKTEEPLGSPHPSGTVESPGEGPQDTRIEGSVQLSCSVKEEPNVDGQEVAPSSPPLAAQSPEGNHGHQEPASTSFHPPRIQEEWGLLDRSQKELYWDAMLEKYGTVVSLGLPPHQPEAQAQSELGMLLTGTGVCRSLRSETRLEPAATPRKPYTCEQCGRGFDWKSVFVIHHRTHTSGPGVQSPGLATGESTEKPPQGEVAFPHHPRRSLTGPRSYPCEECGCSFSWKSQLVIHRKSHTGQRRHFCSDCGRAFDWKSQLVIHRKGHRPEVP

SEQ ID NO: 100132 - protein, 450 aa, Homo sapiens
  Payload ID: 19949
  Gene Name: zinc finger protein 446
  Uniprot ID: Q9NWS9
  ENSP ID: ENSP00000472802
MPSPLGPPCLPVMDPETTLEEPETARLRFRGFCYQEVAGPREALARLRELCCQWLQPEAHSKEQMLEMLVLEQFLGTLPPEIQAWVRGQRPGSPEEAAALVEGLQHDPGQLLGWITAHVLKQEVLPAAQKTEEPLGSPHPSGTVESPGEGPQDTRIEGSVQLSCSVKEEPNVDGQEVAPSSPPLAAQSPEGNHGHQEPASTSFHPPRIQEEWGLLDRSQKELYWDAMLEKYGTVVSLGLPPHQPEAQAQSELGMLLTGTGVCRSLRSGNESEGPPGCPEAQPPQGPGPAAWEGLSGAATPAPTVRPGTPPVPTQPTPAETRLEPAATPRKPYTCEQCGRGFDWKSVFVIHHRTHTSGPGVQSPGLATGESTEKPPQGEVAFPHHPRRSLTGPRSYPCEECGCSFSWKSQLVIHRKSHTGQRRHFCSDCGRAFDWKSQLVIHRKGHRPEVP

SEQ ID NO: 100133 - protein, 422 aa, Homo sapiens
  Payload ID: 19949
  Gene Name: zinc finger protein 446
  ENSP ID: ENSP00000478778
MPSPLGPPCLPVMDPETTLEEPETARLRFRGFCYQEVAGPREALARLRELCCQWLQPEAHSKEQMLEMLVLEQFLGTLPPEIQAWVRGQRPGSPEEAAALVEGLQHDPGQLLGWITAHVLKQEVLPAAQKTEEPLGSPHPSGTVESPGEGPQDTRIEGSVQLSCSVKEEPNVDGQEVAPSSPPLAAQSPEGNHGHQEPASTSFHPPRIQEEWGLLDRSQKELYWDAMLEKYGTVVSLGLPPHQPEAQAQSELGMLLTGTGVCRSLRSGNESEGPPGCPEAQPPQGPGPAAWEGLSGAATPAPTVRPGTPPVPTQPTPAETRLEPAATPRKPYTCEQCGRGFDWKSVFVIHHRTHTSGPGVQSPGLATGESTEKPPQGEVAFPHHPRRSLTGPRSYPCEECGCSFSWKSQLVIHRKSHRPEVP

SEQ ID NO: 100134 - protein, 422 aa, Homo sapiens
  Payload ID: 19949
  Gene Name: zinc finger protein 446
  ENSP ID: ENSP00000484676
MPSPLGPPCLPVMDPETTLEEPETARLRFRGFCYQEVAGPREALARLRELCCQWLQPEAHSKEQMLEMLVLEQFLGTLPPEIQAWVRGQRPGSPEEAAALVEGLQHDPGQLLGWITAHVLKQEVLPAAQKTEEPLGSPHPSGTVESPGEGPQDTRIEGSVQLSCSVKEEPNVDGQEVAPSSPPLAAQSPEGNHGHQEPASTSFHPPRIQGLPPHQPEAQAQSELGMLLTGTGVCRSLRSGNESEGPPGCPEAQPPQGPGPAAWEGLSGAATPAPTVRPGTPPVPTQPTPAETRLEPAATPRKPYTCEQCGRGFDWKSVFVIHHRTHTSGPGVQSPGLATGESTEKPPQGEVAFPHHPRRSLTGPRSYPCEECGCSFSWKSQLVIHRKSHTGQRRHFCSDCGRAFDWKSQLVIHRKGHRPEVP

SEQ ID NO: 100135 - protein, 518 aa, Homo sapiens
  Payload ID: 19950
  Gene Name: zinc finger protein 449
  Uniprot ID: Q6P9G9
  ENSP ID: ENSP00000339585
MAVALGCAIQASLNQGSVFQEYDTDCEVFRQRFRQFQYREAAGPHEAFNKLWELCCQWLKPKMRSKEQILELLVLEQFLTILPTEIETWVREHCPENRERVVSLIEDLQRELEIPEQQVDMHDMLLEELAPVGTAHIPPTMHLESPALQVMGPAQEAPVAEAWIPQAGPPELNYGATGECQNFLDPGYPLPKLDMNFSLENREEPWVKELQDSKEMKQLLDSKIGFEIGIENEEDTSKQKKMETMYPFIVTLEGNALQGPILQKDYVQLENQWETPPEDLQTDLAKLVDQQNPTLGETPENSNLEEPLNPKPHKKKSPGEKPHRCPQCGKCFARKSQLTGHQRIHSGEEPHKCPECGKRFLRSSDLYRHQRLHTGERPYECTVCKKRFTRRSHLIGHQRTHSEEETYKCLECGKSFCHGSSLKRHLKTHTGEKPHRCHNCGKSFSRLTALTLHQRTHTEERPFKCNYCGKSFRQRPSLVIHLRIHTGEKPYKCTHCSKSFRQRAGLIMHQVTHFRGLI

SEQ ID NO: 100136 - protein, 164 aa, Homo sapiens
  Payload ID: 19950
  Gene Name: zinc finger protein 449
  Uniprot ID: Q6P9G9
  ENSP ID: ENSP00000359797
MAVALGCAIQASLNQGSVFQEYDTDCEVFRQRFRQFQYREAAGPHEAFNKLWELCCQWLKPKMRSKEQILELLVLEQFLTILPTEIETWVREHCPENRERVVSLIEDLQRELEIPEQQVRKECGIFVIGPKEVAEAAGTRPHICLYVIPQPQDFSRVLFLFLFC

SEQ ID NO: 100137 - protein, 682 aa, Homo sapiens
  Payload ID: 19951
  Gene Name: zinc finger protein 45
  Uniprot ID: Q02386
  ENSP ID: ENSP00000269973
MTKSKEAVTFKDVAVVFSEEELQLLDLAQRKLYRDVMLENFRNVVSVGHQSTPDGLPQLEREEKLWMMKMATQRDNSSGAKNLKEMETLQEVGLRYLPHEELFCSQIWQQITRELIKYQDSVVNIQRTGCQLEKRDDLHYKDEGFSNQSSHLQVHRVHTGEKPYKGEHCVKSFSWSSHLQINQRAHAGEKPYKCEKCDNAFRRFSSLQAHQRVHSRAKSYTNDASYRSFSQRSHLPHHQRVPTGENPYKYEECGRNVGKSSHCQAPLIVHTGEKPYKCEECGVGFSQRSYLQVHLKVHTGKKPYKCEECGKSFSWRSRLQAHERIHTGEKPYKCNACGKSFSYSSHLNIHCRIHTGEKPYKCEECGKGFSVGSHLQAHQISHTGEKPYKCEECGKGFCRASNLLDHQRGHTGEKPYQCDACGKGFSRSSDFNIHFRVHTGEKPYKCEECGKGFSQASNLLAHQRGHTGEKPYKCGTCGKGFSRSSDLNVHCRIHTGEKPYKCERCGKAFSQFSSLQVHQRVHTGEKPYQCAECGKGFSVGSQLQAHQRCHTGEKPYQCEECGKGFCRASNFLAHRGVHTGEKPYRCDVCGKRFRQRSYLQAHQRVHTGERPYKCEECGKVFSWSSYLQAHQRVHTGEKPYKCEECGKGFSWSSSLIIHQRVHADDEGDKDFPSSEDSHRKTR

SEQ ID NO: 100138 - protein, 129 aa, Homo sapiens
  Payload ID: 19951
  Gene Name: zinc finger protein 45
  ENSP ID: ENSP00000467551
MLENFRNVVSVGHQSTPDGLPQLEREEKLWMMKMATQRDNSSGAKNLKEMETLQEVGLRYLPHEELFCSQIWQQITRELIKYQDSVVNIQRTGCQLEKRDDLHYKDEGFSNQSSHLQVHRVHTGEKPYK

SEQ ID NO: 100139 - protein, 682 aa, Homo sapiens; identical to SEQ ID NO: 100137
  Payload ID: 19951
  Gene Name: zinc finger protein 45
  Uniprot ID: Q02386
  ENSP ID: ENSP00000468579

SEQ ID NO: 100140 - protein, 682 aa, Homo sapiens; identical to SEQ ID NO: 100137
  Payload ID: 19951
  Gene Name: zinc finger protein 45
  Uniprot ID: Q02386
  ENSP ID: ENSP00000481895

SEQ ID NO: 100141 - protein, 1013 aa, Homo sapiens
  Payload ID: 19952
  Gene Name: zinc finger protein 451
  Uniprot ID: Q9Y4E5
  ENSP ID: ENSP00000350083
MGDPGSEIIESVPPAGPEASESTTDENEDDIQFVSEGPLRPVLEYIDLVSSDDEEPSTSYTDENIKRKDHIDYQKDKVALTLARLARHVEVEKQQKEEKNRAFREKIDFQHAHGLQELEFIRGHSDTEAARLCVDQWLKMPGLKTGTINCGTKSSFRRGGHTWVSGKPILCPIMHCNKEFDNGHLLLGHLKRFDHSPCDPTITLHGPFFSSFACVVCYKKFVTQQQYRDHLFDKEATDDGHNNNLLPQIIQCFACPNCFLLFSRKEECSKHMSGKNHFHQSFKLGDNKGIAHPISFPSFAKKLLISLCKDVPFQVKCVACHKTLRSHMELTAHFRVHCRNAGPVAVAEKSITQVAEKFILRGYCPDCNQVFVDETSTQNHKQNSGHKVRVINSVEESVLLYCHSSEGNKDPSSDLHLLLDQSKFSSLKRTMSIKESSSLECIAIPKKKMNLKDKSHEGVACVQKEKSVVKTWFCECNQRFPSEDAVEKHVFSANTMGYKCVVCGKVCDDSGVIRLHMSRIHGGAHLNNFLFWCRTCKKELTRKDTIMAHVTEFHNGHRYFYEMDEVEGETLPSSSTTLDNLTANKPSSAITVIDHSPANSSPRGKWQCRICEDMFDSQEYVKQHCMSLASHKFHRYSCAHCRKPFHKIETLYRHCQDEHDNEIKIKYFCGLCDLIFNVEEAFLSHYEEHHSIDYVFVSEKTETSIKTEDDFPVIETSNQLTCGCRESYICKVNRKEDYSRCLQIMLDKGKLWFRCSLCSATAQNLTDMNTHIHQVHKEKSDEEEQQYVIKCGTCTKAFHDPESAQQHFHRKHCFLQKPSVAHFGSEKSNLYKFTASASHTERKLKQAINYSKSLDMEKGVENDLSYQNIGGNTNWKPPLNCKIYNYLNRIGCFFLHPRCSKRKDAADFAICMHAGRLDEQLPKQIPFTILSGDQGFLELENQFKKTQRPAHILNPHHLEGDMMCALLNSISDTTKECDSDDNMGAKNTSIGEEFISTEDVELEEAIRRSLEEM

SEQ ID NO: 100142 - protein, 73 aa, Homo sapiens
  Payload ID: 19952
  Gene Name: zinc finger protein 451
  ENSP ID: ENSP00000359736
MGDPGSEIIESVPPAGPEASESTTDENEDDIQFVSEGPLRPVLEYIDLVSSDDEEPSTSYTDGSALCLMTLPL

SEQ ID NO: 100143 - protein, 1061 aa, Homo sapiens
  Payload ID: 19952
  Gene Name: zinc finger protein 451
  Uniprot ID: Q9Y4E5
  ENSP ID: ENSP00000359740
MGDPGSEIIESVPPAGPEASESTTDENEDDIQFVSEGPLRPVLEYIDLVSSDDEEPSTSYTDENIKRKDHIDYQKDKVALTLARLARHVEVEKQQKEEKNRAFREKIDFQHAHGLQELEFIRGHSDTEAARLCVDQWLKMPGLKTGTINCGTKSSFRRGGHTWVSGKPILCPIMHCNKEFDNGHLLLGHLKRFDHSPCDPTITLHGPFFSSFACVVCYKKFVTQQQYRDHLFDKEATDDGHNNNLLPQIIQCFACPNCFLLFSRKEECSKHMSGKNHFHQSFKLGDNKGIAHPISFPSFAKKLLISLCKDVPFQVKCVACHKTLRSHMELTAHFRVHCRNAGPVAVAEKSITQVAEKFILRGYCPDCNQVFVDETSTQNHKQNSGHKVRVINSVEESVLLYCHSSEGNKDPSSDLHLLLDQSKFSSLKRTMSIKESSSLECIAIPKKKMNLKDKSHEGVACVQKEKSVVKTWFCECNQRFPSEDAVEKHVFSANTMGYKCVVCGKVCDDSGVIRLHMSRIHGGAHLNNFLFWCRTCKKELTRKDTIMAHVTEFHNGHRYFYEMDEVEGETLPSSSTTLDNLTANKPSSAITVIDHSPANSSPRGKWQCRICEDMFDSQEYVKQHCMSLASHKFHRYSCAHCRKPFHKIETLYRHCQDEHDNEIKIKYFCGLCDLIFNVEEAFLSHYEEHHSIDYVFVSEKTETSIKTEDDFPVIETSNQLTCGCRESYICKVNRKEDYSRCLQIMLDKGKLWFRCSLCSATAQNLTDMNTHIHQVHKEKSDEEEQQYVIKCGTCTKAFHDPESAQQHFHRKHCFLQKPSVAHFGSEKSNLYKFTASASHTERKLKQAINYSKSLDMEKGVENDLSYQNIEEEIVELPDLDYLRTMTHIVFVDFDNWSNFFGHLPGHLNQGTFIWGFQGGNTNWKPPLNCKIYNYLNRIGCFFLHPRCSKRKDAADFAICMHAGRLDEQLPKQIPFTILSGDQGFLELENQFKKTQRPAHILNPHHLEGDMMCALLNSISDTTKECDSDDNMGAKNTSIGEEFISTEDVELEEAIRRSLEEM

SEQ ID NO: 100144 - protein, 559 aa, Homo sapiens
  Payload ID: 19952
  Gene Name: zinc finger protein 451
  Uniprot ID: Q9Y4E5
  ENSP ID: ENSP00000359742
MGDPGSEIIESVPPAGPEASESTTDENEDDIQFVSEGPLRPVLEYIDLVSSDDEEPSTSYTDRMPESKVPSSENHRPEMCSSCNVPLPIGDSSSFSGSCSSSPERIVSQTSSVENPLENQKNDQNNSDTKISETETLKSSQNFQTLPSSPLLVPQESLASSEVKENLRIDSSSASQHGRDAILYLQTQVAEMSRVIRDLQSRSCFRFHHSRPSENSSVPWDISTSKEENLSTVEEETDYKSPSADDKGQPSDPSQSSFTGLLKRMEQRGVIKRVTLQSEAESCEGKPDCVTSKKRLVPPLHPLLRIATTEVFKDPADCHPSSFMGHRVYPVAKDTSPFQPNPPAEGPIVEALEHSKRGNTTSPLDSTSKEMEVMGCRFYHAASIAARAASYMAYMTQYQRKLWEDMEDLVHDPEFDRGKARCIISDGMDAGLWQLCTTRDIMDSVVRVMAMAIDYRRQAWLRLTSLTKKTQEKISHLPFDGTSLFGQDVKAVVAEDNNIKENDYKDHKYYNQHRYFYSHDQKAHYHNRGYSKGDWYKPRNHPYRYRKKGDSPERHGYKN

SEQ ID NO: 100145 - protein, 75 aa, Homo sapiens
  Payload ID: 19952
  Gene Name: zinc finger protein 451
  ENSP ID: ENSP00000359744
MGDPGSEIIESVPPAGPEASESTTDENEDDIQFVSEGPLRPVLEYIDLVSSDDEEPSTSYTDVPYTTGFFCSRTT

SEQ ID NO: 100146 - protein, 1041 aa, Homo sapiens
  Payload ID: 19952
  Gene Name: zinc finger protein 451
  ENSP ID: ENSP00000421645
MGDPGSEIIESVPPAGPEASESTTDENEDDIQFVSEGPLRPVLEYIDLVSSDDEEPSTSYTDENIKRKDHIDYQKDKVALTLARLARHVEVEKQQKEEKNRAFREKIDFQHAHGLQELEFIRGHSDTEAARLCVDQWLKMPGLKTGTINCGTKSSFRRGGHTWVSGKPILCPIMHCNKEFDNGHLLLGHLKRFDHSPCDPTITLHGPFFSSFACVVCYKKFVTQQQYRDHLFDKEATDDGHNNNLLPQIIQCFACPNCFLLFSRKEECSKHMSGKNHFHQSFKLGDNKGIAHPISFPSFAKKLLISLCKDVPFQVKCVACHKTLRSHMELTAHFRVHCRNAGPVAVAEKSITQVAEKFILRGYCPDCNQVFVDETSTQNHKQNSGHKVRVINSVEESVLLYCHSSEGNKDPSSDLHLLLDQSKFSSLKRTMSIKESSSLECIAIPKKKMNLKDKSHEGVACVQKEKSVVKTWFCECNQRFPSEDAVEKHVFSANTMGYKCVVCGKVCDDSGVIRLHMSRIHGGAHLNNFLFWCRTCKKELTRKDTIMAHVTEFHNGHRYFYEMDEVEGETLPSSSTTLDNLTANKPSSAITVIDHSPANSSPRGKWQCRICEDMFDSQEYVKQHCMSLASHKFHRYSCAHCRKPFHKIETLYRHCQDEHDNEIKIKYFCGLCDLIFNVEEAFLSHYEEHHSIDYVFVSEKTETSIKTEDDFPVIETSNQLTCGCRESYICKVNRKEDYSRCLQIMLDKGKLWFRCSLCSATAQNLTDMNTHIHQVHKEKSDEEEQQYVIKCGTCTKAFHDPESAQQHFHRKHCFLQKPSVAHFGSEKSNLYKFTASASHTERKLKQAINYSKSLDMEKGVENDLSYQNIEEEIVELPDLDYLRTMTHIVFVDFDNWSNFFGHLPGHLNQGTFIWGFQGGNTNWKPPLNCKIYNYLNRIGCFFLHPRCSKRKDAADFAICMHAGRLDEQLPKQIPFTILSGDQGFLELENQFKKTQRPAHILNPHHLEGDMMCALLNSISDTTKGTQLQSQCKPPKRRRLHC

SEQ ID NO: 100147 - protein, 151 aa, Homo sapiens
  Payload ID: 19952
  Gene Name: zinc finger protein 451
  ENSP ID: ENSP00000421786
MGDPGSEEGPLRPVLEYIDLVSSDDEEPSTSYTDRMPESKVPSSENHRPEMCSSCNVPLPIGDSSSFSGSCSSSPERIVSQTSSVENPLENQKNDQNNSDTKISETETLKSSQNFQTLPSSPLLVPQESLASSEVKENLRIDSSSASQHGR

SEQ ID NO: 100148 - protein, 72 aa, Homo sapiens
  Payload ID: 19952
  Gene Name: zinc finger protein 451
  ENSP ID: ENSP00000424329
MGDPGSELALRHLSQQRMKMKTTFSLSVKDHYDLFLNTLIWSAVMMKSLAPLILMRILNVKTILIIRRIKLL

SEQ ID NO: 100149 - protein, 40 aa, Homo sapiens
  Payload ID: 19952
  Gene Name: zinc finger protein 451
  ENSP ID: ENSP00000424723
MPGLKTGTINCGTKSSFRRGGHTWVSGKPILCPIMHCNKE

SEQ ID NO: 100150 - protein, 53 aa, Homo sapiens
  Payload ID: 19952
  Gene Name: zinc finger protein 451
  ENSP ID: ENSP00000425047
MGDPGSEIIESVPPAGPEASESTTDENEDDIQFVSITKELHIQYLSHLLQRNF

SEQ ID NO: 100151 - protein, 158 aa, Homo sapiens
  Payload ID: 19952
  Gene Name: zinc finger protein 451
  ENSP ID: ENSP00000427558
MGDPGSEEGPLRPVLEYIDLVSSDDEEPSTSYTDENIKRKDHIDYQKDKVALTLARLARHVEVEKQQKEEKNRAFREKIDFQHAHGLQELEFIRGHSDTEAARLCVDQWLKMPGLKTGTINCGTKSSFRRGGHTWVSGKPILCPIMHCNKEFDNGHLL

SEQ ID NO: 100152 - protein, 75 aa, Homo sapiens; identical to SEQ ID NO: 100145
  Payload ID: 19952
  Gene Name: zinc finger protein 451
  ENSP ID: ENSP00000476915

SEQ ID NO: 100153 - protein, 522 aa, Homo sapiens
  Payload ID: 19953
  Gene Name: zinc finger protein 454
  Uniprot ID: Q8N9F8
  ENSP ID: ENSP00000326249
MAVSHLPTMVQESVTFKDVAILFTQEEWGQLSPAQRALYRDVMLENYSNLVSLGLLGPKPDTFSQLEKREVWMPEDTPGGFCLDWMTMPASKKSTVKAEIPEEELDQWTIKERFSSSSHWKCASLLEWQCGGQEISLQRVVLTHPNTPSQECDESGSTMSSSLHSDQSQGFQPSKNAFECSECGKVFSKSSTLNKHQKIHNEKNANQKIHIKEKRYECRECGKAFHQSTHLIHHQRIHTGEKPYECKECGKAFSVSSSLTYHQKIHTGEKPFECNLCGKAFIRNIHLAHHHRIHTGEKPFKCNICEKAFVCRAHLTKHQNIHSGEKPYKCNECGKAFNQSTSFLQHQRIHTGEKPFECNECGKAFRVNSSLTEHQRIHTGEKPYKCNECGKAFRDNSSFARHRKIHTGEKPYRCGLCEKAFRDQSALAQHQRIHTGEKPYTCNICEKAFSDHSALTQHKRIHTREKPYKCKICEKAFIRSTHLTQHQRIHTGEKPYKCNKCGKAFNQTANLIQHQRHHIGEK

SEQ ID NO: 100154 - protein, 522 aa, Homo sapiens; identical to SEQ ID NO: 100153
  Payload ID: 19953
  Gene Name: zinc finger protein 454
  Uniprot ID: Q8N9F8
  ENSP ID: ENSP00000430354

SEQ ID NO: 100155 - protein, 562 aa, Homo sapiens
  Payload ID: 19954
  Gene Name: zinc finger protein 460
  Uniprot ID: Q14592
  ENSP ID: ENSP00000353491
MAAAWMAPAQESVTFEDVAVTFTQEEWGQLDVTQRALYVEVMLETCGLLVALGDSTKPETVEPIPSHLALPEEVSLQEQLAQGVPRYSYLGQAMDQDGPSEMQEYFLRPGTDPQSEKLHGKMSLEHEGLATADGICSMMIQNQVSPEDALYGFDSYGPVTDSLIHEGENSYKFEEMFNENCFLVQHEQILPRVKPYDCPECGKAFGKSKHLLQHHIIHTGEKPYKCLECGKDFNRRSHLTRHQRTHNGDKPFVCSECGRTFNRGSHLTRHQRVHSGEKPFVCNECGKAFTYRSNFVLHNKSHNEKKPFACSECGKGFYESTALIQHFIIHTGERPFKCLECGKAFNCRSHLKQHERIHTGEKPFVCSQCGKAFTHYSTYVLHERAHTGEKPFECKECGKAFSIRKDLIRHFNIHTGEKPYECLQCGKAFTRMSGLTRHQWIHTGEKPYVCIQCGKAFCRTTNLIRHFSIHTGEKPYECVECGKAFNRRSPLTRHQRIHTAEKSHEPIQSGNVSCESTDLIQHSIIHTESSPVSAVNMETPSIAAHSSSLDINGFIVEETLPL

SEQ ID NO: 100156 - protein, 521 aa, Homo sapiens
  Payload ID: 19954
  Gene Name: zinc finger protein 460
  Uniprot ID: Q14592
  ENSP ID: ENSP00000446167
MLETCGLLVALGDSTKPETVEPIPSHLALPEEVSLQEQLAQGVPRYSYLGQAMDQDGPSEMQEYFLRPGTDPQSEKLHGKMSLEHEGLATADGICSMMIQNQVSPEDALYGFDSYGPVTDSLIHEGENSYKFEEMFNENCFLVQHEQILPRVKPYDCPECGKAFGKSKHLLQHHIIHTGEKPYKCLECGKDFNRRSHLTRHQRTHNGDKPFVCSECGRTFNRGSHLTRHQRVHSGEKPFVCNECGKAFTYRSNFVLHNKSHNEKKPFACSECGKGFYESTALIQHFIIHTGERPFKCLECGKAFNCRSHLKQHERIHTGEKPFVCSQCGKAFTHYSTYVLHERAHTGEKPFECKECGKAFSIRKDLIRHFNIHTGEKPYECLQCGKAFTRMSGLTRHQWIHTGEKPYVCIQCGKAFCRTTNLIRHFSIHTGEKPYECVECGKAFNRRSPLTRHQRIHTAEKSHEPIQSGNVSCESTDLIQHSIIHTESSPVSAVNMETPSIAAHSSSLDINGFIVEETLPL

SEQ ID NO: 100157 - protein, 127 aa, Homo sapiens
  Payload ID: 19954
  Gene Name: zinc finger protein 460
  ENSP ID: ENSP00000471285
MLETCGLLVALGDSTKPETVEPIPSHLALPEEVSLQEQLAQGVPRYSYLGQAMDQDGPSEMQEYFLRPGTDPQSEKLHGKMSLEHEGLATADGICSMMIQNQVSPEDALYGFDSYGPVTDSLIHEGE

SEQ ID NO: 100158 - protein, 540 aa, Homo sapiens
  Payload ID: 19955
  Gene Name: zinc finger protein 461
  ENSP ID: ENSP00000353515
MAHELVMFRDVAIDVSQEEWECLNPAQRNLYKEVMLENYSNLVSLGLSVSKPAVISSLEQGKEPWMVVREETGRWCPDLASRDEPQKLSPKRDIYETELSQWVNMEEFKSHSPERSIFSAIWEGNCHFEQHQGQEEGYFRQLMINHENMPIFSQHTLLTQEFYDREKISECKKCRKIFSYHLFFSHHKRTHSKELSECKECTEIVNTPCLFKQQTIQNGDKCNECKECWKAFVHCSQLKHLRIHNGEKRYECNECGKAFNYGSELTLHQRIHTGEKPYECKECGKAFRQRSQLTQHQRLHTGEKPYECKQCGKAFIRGFQLTEHLRLHTGEKPYECKECGKTFRHRSHLTIHQRIHTGEKPYECRECGKAFSYHSSFSHHQKIHSGKKPYECHECGKAFCDGLQLTLHQRIHTGEKPYECKECGKTFRQCSHLKRHQRIHTGEKPHECMICGKAFRLHSHLIQHQRIHTGEKPYECKECGKAFSYHSSFSHHQRIHSGKKPYQCGKAFNHRLQLNLHQTLHTGEKPVRFPLLPPHPSLAS

SEQ ID NO: 100159 - protein, 41 aa, Homo sapiens
  Payload ID: 19955
  Gene Name: zinc finger protein 461
  ENSP ID: ENSP00000380102
MAHELVMFRDVAIDVSQEEWECLNPAQRNLYKEDFLFLSQP

SEQ ID NO: 100160 - protein, 71 aa, Homo sapiens
  Payload ID: 19955
  Gene Name: zinc finger protein 461
  ENSP ID: ENSP00000464914
MFRDVAIDVSQEEWECLNPAQRNLYKEVMLENYSNLVSLGLSVSKPAVISSLEQGKEPWMVVREETGRWCP

SEQ ID NO: 100161 - protein, 46 aa, Homo sapiens
  Payload ID: 19955
  Gene Name: zinc finger protein 461
  ENSP ID: ENSP00000465235
MAHELVMFRDVAIDVSQEEWECLNPAQRNLYKEVMLENYSNLVSLG

SEQ ID NO: 100162 - protein, 70 aa, Homo sapiens
  Payload ID: 19955
  Gene Name: zinc finger protein 461
  ENSP ID: ENSP00000465668
MAHELVMFRDVAIDVSQEEWECLNPAQRNLYKEARVQWRDLGSPQPLPPSFKQFSCLSLPSSCDYRTFCF

SEQ ID NO: 100163 - protein, 563 aa, Homo sapiens
  Payload ID: 19955
  Gene Name: zinc finger protein 461
  Uniprot ID: Q8TAF7
  ENSP ID: ENSP00000467931
MAHELVMFRDVAIDVSQEEWECLNPAQRNLYKEVMLENYSNLVSLGLSVSKPAVISSLEQGKEPWMVVREETGRWCPGTWKTWGFHNNFLDNNEATDINADLASRDEPQKLSPKRDIYETELSQWVNMEEFKSHSPERSIFSAIWEGNCHFEQHQGQEEGYFRQLMINHENMPIFSQHTLLTQEFYDREKISECKKCRKIFSYHLFFSHHKRTHSKELSECKECTEIVNTPCLFKQQTIQNGDKCNECKECWKAFVHCSQLKHLRIHNGEKRYECNECGKAFNYGSELTLHQRIHTGEKPYECKECGKAFRQRSQLTQHQRLHTGEKPYECKQCGKAFIRGFQLTEHLRLHTGEKPYECKECGKTFRHRSHLTIHQRIHTGEKPYECRECGKAFSYHSSFSHHQKIHSGKKPYECHECGKAFCDGLQLTLHQRIHTGEKPYECKECGKTFRQCSHLKRHQRIHTGEKPHECMICGKAFRLHSHLIQHQRIHTGEKPYECKECGKAFSYHSSFSHHQRIHSGKKPYQCGKAFNHRLQLNLHQTLHTGEKPVRFPLLPPHPSLAS

SEQ ID NO: 100164 - protein, 142 aa, Homo sapiens
  Payload ID: 19955
  Gene Name: zinc finger protein 461
  ENSP ID: ENSP00000468822
MVVREETGRWCPDLASRDEPQKLSPKRDIYETELSQWVNMEEFKSHSPERSIFSAIWEGNCHFEQHQGQEEGYFRQLMINHENMPIFSQHTLLTQEFYDREKISECKKCRKIFSYHLFFSHHKRTHSKELSECKECTEIVNT

SEQ ID NO: 100165 - protein, 258 aa, Homo sapiens
  Payload ID: 19955
  Gene Name: zinc finger protein 461
  ENSP ID: ENSP00000479057
EKRYECNECGKAFNYGSELTLHQRIHTGEKPYECKECGKAFRQRSQLTQHQRLHTGEKPYECKQCGKAFIRGFQLTEHLRLHTGEKPYECKECGKTFRHRSHLTIHQRIHTGEKPYECRECGKAFSYHSSFSHHQKIHSGKKPYECHECGKAFCDGLQLTLHQRIHTGEKPYECKECGKTFRQCSHLKRHQRIHTGEKPHECMICGKAFRLHSHLIQHQRIHTGEKPYECKECGKAFSYHSSFSHHQRIHSDATTAIS

SEQ ID NO: 100166 - protein, 563 aa, Homo sapiens
  Payload ID: 19955
  Gene Name: zinc finger protein 461
  ENSP ID: ENSP00000479585
LTHELVMFRDVAIDVSQEEWECLNPAQRNLYKEVMLENYSNLVSLGLSVSKPAVISSLEQGKEPWMVVREETGRWCPGTWKTWGFHNNFLDNNEATDINADLASRDEPQKLSPKRDIYETELSQWVNMEEFKSHSPERSIFSAIWEGNCHFEQHQGQEEGYFRQLMINHENMPIFSQHTLLTQEFYDREKISECKKCRKIFSYHLFFSHHKRTHSKELSECKECTEIVNTPCLFKQQTIQNGDKCNECKECWKAFVHCSQLKHLRIHNGEKRYECNECGKAFNYGSELTLHQRIHTGEKPYECKECGKAFRQRSQLTQHQRLHTGEKPYECKQCGKAFIRGFQLTEHLRLHTGEKPYECKECGKTFRHRSHLTIHQRIHTGEKPYECRECGKAFSYHSSFSHHQKIHSGKKPYECHECGKAFCDGLQLTLHQRIHTGEKPYECKECGKTFRQCSHLKRHQRIHTGEKPHECMICGKAFRLHSHLIQHQRIHTGEKPYECKECGKAFSYHSSFSHHQRIHSGKKPYQCGKAFNHRLQLNLHQTLHTGEKPVRFPLLPPHPSLAS

SEQ ID NO: 100167 - protein, 2506 aa, Homo sapiens
  Payload ID: 19956
  Gene Name: zinc finger protein 462
  Uniprot ID: Q96JM2
  ENSP ID: ENSP00000277225
MEVLQCDGCDFRAPSYEDLKAHIQDVHTAFLQPTDVAEDNVNELRCGSVNASNQTEVEFSSIKDEFAIAEDLSGQNATSLGTGGYYGHSPGYYGQHIAANPKPTNKFFQCKFCVRYFRSKNLLIEHTRKVHGAQAEGSSSGPPVPGSLNYNIMMHEGFGKVFSCQFCTYKSPRRARIIKHQKMYHKNNLKETTAPPPAPAPMPDPVVPPVSLQDPCKELPAEVVERSILESMVKPLTKSRGNFCCEWCSYQTPRRERWCDHMMKKHRSMVKILSSLRQQQEGTNLPDVPNKSAPSPTSNSTYLTMNAASREIPNTTVSNFRGSMGNSIMRPNSSASKFSPMSYPQMKPKSPHNSGLVNLTERSRYGMTDMTNSSADLETNSMLNDSSSDEELNEIDSENGLSAMDHQTSGLSAEQLMGSDGNKLLETKGIPFRRFMNRFQCPFCPFLTMHRRSISRHIENIHLSGKTAVYKCDECPFTCKSSLKLGAHKQCHTGTTSDWDAVNSQSESISSSLNEGVVSYESSSINGRKSGVMLDPLQQQQPPQPPPPPPPPPPSQPQPLQQPQPPQLQPPHQVPPQPQTQPPPTQQPQPPTQAAPLHPYKCTMCNYSTTTLKGLRVHQQHKHSFCDNLPKFEGQPSSLPLENETDSHPSSSNTVKKSQTSILGLSSKNNFVAKASRKLANDFPLDLSPVKKRTRIDEIASNLQSKINQTKQQEDAVINVEDDEEEEEDNEVEIEVELDREEEPTEPIIEVPTSFSAQQIWVRDTSEPQKEPNFRNITHDYNATNGAEIELTLSEDEEDYYGSSTNLKDHQVSNTALLNTQTPIYGTEHNSENTDFGDSGRLYYCKHCDFNNKSARSVSTHYQRMHPYIKFSFRYILDPNDHSAVYRCLECYIDYTNFEDLQQHYGEHHPEAMNVLNFDHSDLIYRCRFCSYTSPNVRSLMPHYQRMHPTVKINNAMIFSSYVVEQQEGLNTESQTLREILNSAPKNMATSTPVARGGGLPATFNKNTPKTFTPECENQKDPLVNTVVVYDCDVCSFASPNMHSVLVHYQKKHPEEKASYFRIQKTMRMVSVDRGSALSQLSFEVGAPMSPKMSNMGSPPPPQPPPPDLSTELYYCKHCSYSNRSVVGVLVHYQKRHPEIKVTAKYIRQAPPTAAMMRGVEGPQGSPRPPAPIQQLNRSSSERDGPPVENEMFFCQHCDYGNRTVKGVLIHYQKKHRDFKANADVIRQHTATIRSLCDRNQKKPASCVLVSPSNLERDKTKLRALKCRQCSYTSPYFYALRKHIKKDHPALKATVTSIMRWAFLDGLIEAGYHCEWCIYSHTEPNGLLLHYQRRHPEHYVDYTYMATKLWAGPDPSPPSLTMPAEAKTYRCRDCVFEAVSIWDITNHYQAFHPWAMNGDESVLLDIIKEKDAVEKPILSSEELAGPVNCENSIPTPFPEQEAECPEDARLSPEKSLQLASANPAISSTPYQCTVCQSEYNNLHGLLTHYGKKHPGMKVKAADFAQDIDINPGAVYKCRHCPYINTRIHGVLTHYQKRHPSIKVTAEDFVHDVEQSADISQNDVEETSRIFKQGYGAYRCKLCPYTHGTLEKLKIHYEKYHNQPEFDVFSQSPPKLPVPLEPEMTTEVSPSQVSITEEEVGEEPVSTSHFSTSHLVSHTVFRCQLCKYFCSTRKGIARHYRIKHNNVRAQPEGKNNLFKCALCAYTNPIRKGLAAHYQKRHDIDAYYTHCLAASRTISDKPNKVIIPSPPKDDSPQLSEELRRAVEKKKCSLCSFQSFSKKGIVSHYMKRHPGVFPKKQHASKLGGYFTAVYADEHEKPTLMEEEERGNFEKAEVEGEAQEIEWLPFRCIKCFKLSFSTAELLCMHYTDHHSRDLKRDFIILGNGPRLQNSTYQCKHCDSKLQSTAELTSHLNIHNEEFQKRAKRQERRKQLLSKQKYADGAFADFKQERPFGHLEEVPKIKERKVVGYKCKFCVEVHPTLRAICNHLRKHVQYGNVPAVSAAVKGLRSHERSHLALAMFTREDKYSCQYCSFVSAFRHNLDRHMQTHHGHHKPFRCKLCSFKSSYNSRLKTHILKAHAGEHAYKCSWCSFSTMTISQLKEHSLKVHGKALTLPRPRIVSLLSSHSHHSSQKATPAEEVEDSNDSSYSEPPDVQQQLNHYQSAALARNNSRVSPVPLSGAAAGTEQKTEAVLHCEFCEFSSGYIQSIRRHYRDKHGGKKLFKCKDCSFYTGFKSAFTMHVEAGHSAVPEEGPKDLRCPLCLYHTKYKRNMIDHIVLHREERVVPIEVCRSKLSKYLQGVVFRCDKCTFTCSSDESLQQHIEKHNELKPYKCQLCYYETKHTEELDSHLRDEHKVSRNFELVGRVNLDQLEQMKEKMESSSSDDEDKEEEMNSKAEDRELMRFSDHGAALNTEKRFPCEFCGRAFSQGSEWERHVLRHGMALNDTKQVSREEIHPKEIMENSVKMPSIEEKEDDEAIGIDFSLKNETVAICVVTADKSLLENAEAKKE

SEQ ID NO: 100168 - protein, 1449 aa, Homo sapiens
  Payload ID: 19956
  Gene Name: zinc finger protein 462
  ENSP ID: ENSP00000363818
HCSYSNRSVVGVLVHYQKRHPEIKVTAKYIRQAPPTAAMMRGVEGPQGSPRPPAPIQQLNRSSSERDGPPVENEMFFCQHCDYGNRTVKGVLIHYQKKHRDFKANADVIRQHTATIRSLCDRNQKKPASCVLVSPSNLERDKTKLRALKCRQCSYTSPYFYALRKHIKKDHPALKATVTSIMRWAFLDGLIEAGYHCEWCIYSHTEPNGLLLHYQRRHPEHYVDYTYMATKLWAGPDPSPPSLTMPAEAKTYRCRDCVFEAVSIWDITNHYQAFHPWAMNGDESVLLDIIKEKDAVEKPILSSEELAGPVNCENSIPTPFPEQEAECPEDARLSPEKSLQLASANPAISSTPYQCTVCQSEYNNLHGLLTHYGKKHPGMKVKAADFAQDIDINPGAVYKCRHCPYINTRIHGVLTHYQKRHPSIKVTAEDFVHDVEQSADISQNDVEETSRIFKQGYGAYRCKLCPYTHGTLEKLKIHYEKYHNQPEFDVFSQSPPKLPVPLEPEMTTEVSPSQVSITEEEVGEEPVSTSHFSTSHLVSHTVFRCQLCKYFCSTRKGIARHYRIKHNNVRAQPEGKNNLFKCALCAYTNPIRKGLAAHYQKRHDIDAYYTHCLAASRTISDKPNKVIIPSPPKDDSPQLSEELRRAVEKKKCSLCSFQSFSKKGIVSHYMKRHPGVFPKKQHASKLGGYFTAVYADEHEKPTLMEEEERGNFEKAEVEGEAQEIEWLPFRCIKCFKLSFSTAELLCMHYTDHHSRDLKRDFIILGNGPRLQNSTYQCKHCDSKLQSTAELTSHLNIHNEEFQKRAKRQERRKQLLSKQKYADGAFADFKQERPFGHLEEVPKIKERKVVGYKCKFCVEVHPTLRAICNHLRKHVQYGNVPAVSAAVKEADDPAHLFLDGLEAAKDASGALVGRVDGEHCLLDGMLEDETRPGGYHCSQCDRVLMSMQGLRSHERSHLALAMFTREDKYSCQYCSFVSAFRHNLDRHMQTHHGHHKPFRCKLCSFKSSYNSRLKTHILKAHAGEHAYKCSWCSFSTMTISQLKEHSLKVHGKALTLPRPRIVSLLSSHSHHSSQKATPAEEVEDSNDSSYSEPPDVQQQLNHYQSAALARNNSRVSPVPLSGAAAGTEQKTEAVLHCEFCEFSSGYIQSIRRHYRDKHGGKKLFKCKDCSFYTGFKSAFTMHVEAGHSAVPEEGPKDLRCPLCLYHTKYKRNMIDHIVLHREERVVPIEVCRSKLSKYLQGVVFRCDKCTFTCSSDESLQQHIEKHNELKPYKCQLCYYETKHTEELDSHLRDEHKVSRNFELVGRVNLDQLEQMKEKMESSSSDDEDKEEEMNSKAEDRELMRFSDHGAALNTEKRFPCEFCGRAFSQGSEWERHVLRHGMALNDTKQVSREEIHPKEIMENSVKMPSIEEKEDDEAIGIDFSLKNETVAICVVTADKSLLENAEAKKE

SEQ ID NO: 100169 - protein, 1412 aa, Homo sapiens
  Payload ID: 19956
  Gene Name: zinc finger protein 462
  Uniprot ID: Q96JM2
  ENSP ID: ENSP00000397306
MMRGVEGPQGSPRPPAPIQQLNRSSSERDGPPVENEMFFCQHCDYGNRTVKGVLIHYQKKHRDFKANADVIRQHTATIRSLCDRNQKKPASCVLVSPSNLERDKTKLRALKCRQCSYTSPYFYALRKHIKKDHPALKATVTSIMRWAFLDGLIEAGYHCEWCIYSHTEPNGLLLHYQRRHPEHYVDYTYMATKLWAGPDPSPPSLTMPAEAKTYRCRDCVFEAVSIWDITNHYQAFHPWAMNGDESVLLDIIKEKDAVEKPILSSEELAGPVNCENSIPTPFPEQEAECPEDARLSPEKSLQLASANPAISSTPYQCTVCQSEYNNLHGLLTHYGKKHPGMKVKAADFAQDIDINPGAVYKCRHCPYINTRIHGVLTHYQKRHPSIKVTAEDFVHDVEQSADISQNDVEETSRIFKQGYGAYRCKLCPYTHGTLEKLKIHYEKYHNQPEFDVFSQSPPKLPVPLEPEMTTEVSPSQVSITEEEVGEEPVSTSHFSTSHLVSHTVFRCQLCKYFCSTRKGIARHYRIKHNNVRAQPEGKNNLFKCALCAYTNPIRKGLAAHYQKRHDIDAYYTHCLAASRTISDKPNKVIIPSPPKDDSPQLSEELRRAVEKKKCSLCSFQSFSKKGIVSHYMKRHPGVFPKKQHASKLGGYFTAVYADEHEKPTLMEEEERGNFEKAEVEGEAQEIEWLPFRCIKCFKLSFSTAELLCMHYTDHHSRDLKRDFIILGNGPRLQNSTYQCKHCDSKLQSTAELTSHLNIHNEEFQKRAKRQERRKQLLSKQKYADGAFADFKQERPFGHLEEVPKIKERKVVGYKCKFCVEVHPTLRAICNHLRKHVQYGNVPAVSAAVKQEADDPAHLFLDGLEAAKDASGALVGRVDGEHCLLDGMLEDETRPGGYHCSQCDRVLMSMQGLRSHERSHLALAMFTREDKYSCQYCSFVSAFRHNLDRHMQTHHGHHKPFRCKLCSFKSSYNSRLKTHILKAHAGEHAYKCSWCSFSTMTISQLKEHSLKVHGKALTLPRPRIVSLLSSHSHHSSQKATPAEEVEDSNDSSYSEPPDVQQQLNHYQSAALARNNSRVSPVPLSGAAAGTEQKTEAVLHCEFCEFSSGYIQSIRRHYRDKHGGKKLFKCKDCSFYTGFKSAFTMHVEAGHSAVPEEGPKDLRCPLCLYHTKYKRNMIDHIVLHREERVVPIEVCRSKLSKYLQGVVFRCDKCTFTCSSDESLQQHIEKHNELKPYKCQLCYYETKHTEELDSHLRDEHKVSRNFELVGRVNLDQLEQMKEKMESSSSDDEDKEEEMNSKAEDRELMRFSDHGAALNTEKRFPCEFCGRAFSQGSEWERHVLRHGMALNDTKQVSREEIHPKEIMENSVKMPSIEEKEDDEAIGIDFSLKNETVAICVVTADKSLLENAEAKKE

SEQ ID NO: 100170 - protein, 208 aa, Homo sapiens
  Payload ID: 19956
  Gene Name: zinc finger protein 462
  ENSP ID: ENSP00000405837
  MOD_RES (1)..(1): Any amino acid
XEHSLKVHGKALTLPRPRIVSLLSSHSHHSSQKATPAEEVEDSNDSSYSEPPDVQQQLNHYQSAALARNNSRVSPVPLSGAAAGTEQKTEAVLHCEFCEFSSGYIQSIRRHYRDKHGGKKLFKCKDCSFYTGFKSAFTMHVEAGHSAVPEEGPKDLRCPLCLYHTKYKRNMIDHIVLHRGNLSNLVFLDAAGGRQQRWPSRDALSEWQ

SEQ ID NO: 100171 - protein, 110 aa, Homo sapiens
  Payload ID: 19956
  Gene Name: zinc finger protein 462
  ENSP ID: ENSP00000476222
MEVLQCDGCDFRAPSYEDLKAHIQDVHTAFLQPTDVAEDNVNELRCGSVNASNQTEVEFSSIKDEFAIAEDLSGQNATSLGTGGYYGHSPGYYAFWSLRRGAKDQGEESG

SEQ ID NO: 100172 - protein, 595 aa, Homo sapiens
  Payload ID: 19957
  Gene Name: zinc finger protein 467
  Uniprot ID: Q7Z7K2
  ENSP ID: ENSP00000304769
MRETLEALSSLGFSVGQPEMAPQSEPREGSHNAQEQMSSSREERALGVCSGHEAPTPEEGAHTEQAEAPCRGQACSAQKAQPVGTCPGEEWMIRKVKVEDEDQEAEEEVEWPQHLSLLPSPFPAPDLGHLAAAYKLEPGAPGALSGLALSGWGPMPEKPYGCGECERRFRDQLTLRLHQRLHRGEGPCACPDCGRSFTQRAHMLLHQRSHRGERPFPCSECDKRFSKKAHLTRHLRTHTGERPYPCAECGKRFSQKIHLGSHQKTHTGERPFPCTECEKRFRKKTHLIRHQRIHTGERPYQCAQCARSFTHKQHLVRHQRVHQTAGPARPSPDSSASPHSTAPSPTPSFPGPKPFACSDCGLSFGWKKNLATHQCLHRSEGRPFGCDECALGATVDAPAAKPLASAPGGPGCGPGSDPVVPQRAPSGERSFFCPDCGRGFSHGQHLARHPRVHTGERPFACTQCDRRFGSRPNLVAHSRAHSGARPFACAQCGRRFSRKSHLGRHQAVHTGSRPHACAVCARSFSSKTNLVRHQAIHTGSRPFSCPQCGKSFSRKTHLVRHQLIHGEAAHAAPDAALAAPAWSAPPEVAPPPLFF

SEQ ID NO: 100173 - protein, 146 aa, Homo sapiens
  Payload ID: 19957
  Gene Name: zinc finger protein 467
  ENSP ID: ENSP00000418011
MRETLEALSSLGFSVGQPEMAPQSEPREGSHNAQEQMSSSREERALGVCSGHEAPTPEEGAHTEQAEAPCRGQACSAQKAQPVGTCPVSRGPCHETAWGEQGDLGCCPKVWPPRDTCFLPAVSASAQHTQLGPPRTETQRTLAGNR

SEQ ID NO: 100174 - protein, 127 aa, Homo sapiens
  Payload ID: 19958
  Gene Name: zinc finger protein 468
  ENSP ID: ENSP00000243639
MALPQGLLTFRDVAIEFSQEEWKCLDPAQRTLYRDVMLENYRNLVSLEFWSVIPAKVQWCHLRSLQPPLPRFKQFSCLSLPSTWDYRYLFQMHVEDVVVNRARQYRSDPHRDIAQTSKSSHWRILFP

SEQ ID NO: 100175 - protein, 127 aa, Homo sapiens [sequence omitted]

SEQ ID NO: 100176 - protein, 45 aa, Homo sapiens
  Payload ID: 19958
  Gene Name: zinc finger protein 468
  ENSP ID: ENSP00000469733
MDGHGVRVLWCQCSWAAGIVQGPHLDALSAHCGPGLEQLPMGVTY

SEQ ID NO: 100177 - protein, 137 aa, Homo sapiens
  Payload ID: 19958
  Gene Name: zinc finger protein 468
  ENSP ID: ENSP00000469779
MALPQGLLTFRDVAIEFSQEEWKCLDPAQRTLYRDVMLENYRNLVSLVRRSEVCCTDIWAEVIVADISSKCMLKTLSSTGQGNTEVIHTGTLHRQASHHIGEFCFHEIEKDIHGFEFQWKEDETNGHAAPMTEIKEL

SEQ ID NO: 100178 - protein, 522 aa, Homo sapiens
  Payload ID: 19958
  Gene Name: zinc finger protein 468
  Uniprot ID: Q5VIY5
  ENSP ID: ENSP00000470381
MALPQGLLTFRDVAIEFSQEEWKCLDPAQRTLYRDVMLENYRNLVSLDISSKCMLKTLSSTGQGNTEVIHTGTLHRQASHHIGEFCFHEIEKDIHGFEFQWKEDETNGHAAPMTEIKELAGSTGQHDQRHAGNKRIKDQLGSSFHLHLPEPHIFQSEGKIGNQVEKSINNASSVSTSQRICCRPKTHISNKYGNNSLHSSLLTQKWEVHMREKSFECIQSFKSFNCSSLLKKHQIIHLEEKQCKCDVCGKVFNQKRYLACHRRCHTGEKPYKCNECGKTFGHNSSLFIHKALHTGEKPYECEECDKVFSRKSHLERHKRIHTGEKPYKCKVCDEAFAYNSYLAKHTILHTGEKPYTCNECGKVFNRLSTLARHHRLHTGEKPYKCEECDKVFSRKSHLERHRRIHSGEKPYKCEECCKVFSRKSNLERHRRIHTGEKPYKCKVCDKAFQRDSHLAQHQRVHTGEKPYKCNECGKTFGQTSSLIIHRRLHTGEKPYKCNECGKTFSQMSSLVYHHRLHSGEKP

SEQ ID NO: 100179 - protein, 45 aa, Homo sapiens
  Payload ID: 19958
  Gene Name: zinc finger protein 468
  ENSP ID: ENSP00000470717
MLENYRNLVSLEFWSVIPAKVQWCHLRSLQPPLPRFKQFSCLSLP

SEQ ID NO: 100180 - protein, 77 aa, Homo sapiens
  Payload ID: 19958
  Gene Name: zinc finger protein 468
  ENSP ID: ENSP00000471675
MALPQVPSLVTQCHELGKRLHWAGPGKGSHPDMDGHGVRVLWCQCSWAAGIVQGPHLDALSAHCGPGLEQLPMGVTY

SEQ ID NO: 100181 - protein, 3925 aa, Homo sapiens
  Payload ID: 19959
  Gene Name: zinc finger protein 469
  Uniprot ID: Q96JG9
  ENSP ID: ENSP00000402343
MPGERPRGAPPPTMTGDLQPRQVASSPGHPSQPPLEDNTPATRTTKGAREAGGQAQAMELPEAQPRQARDGELKPPSLRGQAPSSTPGKRGSPQTPPGRSPLQAPSRLAGRAEGSPPQRYILGIASSRTKPTLDETPENPQLEAAQLPEVDTPQGPGTGAPLRPGLPRTEAQPAAEELGFHRCFQEPPSSFTSTNYTSPSATPRPPAPGPPQSRGTSPLQPGSYPEYQASGADSWPPAAENSFPGANFGVPPAEPEPIPKGSRPGGSPRGVSFQFPFPALHGASTKPFPADVAGHAFTNGPLVFAFHQPQGAWPEEAVGTGPAYPLPTQPAPSPLPCYQGQPGGLNRHSDLSGALSSPGAAHSAPRPFSDSLHKSLTKILPERPPSAQDGLGSTRGPPSSLPQRHFPGQAYRASGVDTSPGPPDTELAAPGPPPARLPQLWDPTAAPYPTPPGGPLAATRSMFFNGQPSPGQRLCLPQSAPLPWPQVLPTARPSPHGMEMLSRLPFPAGGPEWQGGSQGALGTAGKTPGPREKLPAVRSSQGGSPALFTYNGMTDPGAQPLFFGVAQPQVSPHGTPSLPPPRVVGASPSESPLPSPATNTAGSTCSSLSPMSSSPANPSSEESQLPGPLGPSAFFHPPTHPQETGSPFPSPEPPHSLPTHYQPEPAKAFPFPADGLGAEGAFQCLEETPFPHEGPEVGRGGLQGFPRAPPPYPTHHFSLSSASLDQLDVLLTCRQCDRNYSSLAAFLAHRQFCGLLLARAKDGHQRSPGPPGLPSPPAAPRVPADAHAGLLSHAKTFLLAGDAQAEGKDDPLRTGFLPSLAATPFPLPASDLDMEDDAKLDSLITEALNGMEYQSDNPEIDSSFIDVFADEEPSGPRGPSSGHPLKSKAGVTPESKAPPPLPAATPDPQTPRPGDRGCPARGRPKTRSLGLAPTEADAPSQGRQQRRGKQLKLFRKDLDSGGAAEGSGSGGGGRASGLRPRRNDGLGERPPPRPRRPRTQAPGSRADPAPRVPRAAALPEETRSSRRRRLPPRKDPRKRKARGGAWGKELILKIVQQKNRLREYDFASESEEDEQPPPRGPGFRGRRGRGEKRKEVELTQGPREDEPQKPRKAARQEAGGDGAPANPEEPGGSRPGPGRSPQARGPSRSLETGAAAREGGPKCADRPSVAPKDPLQVPTNTETSEETRPSLDFPQEAKEPETAEESAPDSTEFTEALRSPPAACAGEMGASPGLLIPEQPPPSRHDTGTPKPSGSLANTAPHGSSPTPGVGSLLGGPGGTQAPVSHNSKDPPARQPGEFLAPVANPSSTACPKPSVLSSKISSFGCDPAGFNRDPLGVPVAKKGPQPYSSPHSELFLGPKDLAGCFLEELHPKPSARDAPPASSSCLCQDGEDAGSLEPQLPRSPPGTAETEPGRAASPPTLESSSLFPDLPVDRFDPPLYGSLSANRDSGLPFACADPPQKTVPSDPPYPSFLLLEEVSPMLPSHFPDLSGGKVLSKTCPPERTVVPGAAPSLPGKGSGCSVALMSHLSEDELEIQKLVTELESQLQRSKDTRGAPRELAEAESVGRVELGTGTEPPSQRRTCQATVPHEDTFSAADLTRVGESTAHREGAESAVATVEAVQGRPGGTWPCPASFHPGHAALLPCAQEDLVSGAPFSPRGANFHFQPVQKAGASKTGLCQAEGDSRPPQDVCLPEPSKQPGPQLDAGSLAKCSPDQELSFPKNKEAASSQESEDSLRLLPCEQRGGFLPEPGTADQPHRGAPAPEAFGSPAVHLAPDLAFQGDGAPPLDATWPFGASPSHAAQGHSAGRAGGHLHPTAGRPGFEGNEFAPAGASSLTAPRGREAWLVPVPSPACVSNTHPSRRSQDPALSPPIRQLQLPGPGVAKSKDGILGLQELTPAAQSPPRVNPSGLEGGTVEGGKVACGPAQGSPGGVQVTTLPAVAGHQLGLEADGHWGLLGQAEKTQGQGTANQLQPENGVSPGGTDNHASVNASPKTALTGPTEGAVLLEKCKGSRAAMSLQEEAEPTPSPPSPNRESLALALTAAHSRSGSEGRTPERASSPGLNKPLLATGDSPAPSVGDLAACAPSPTSAAHMPCSLGPLPREDPLTSPSRAQGGLGGQLPASPSCRDPPGPQQLLACSPAWAPLEEADGVQATTDTGAEDSPVAPPSLTTSPCDPKEALAGCLLQGEGSPLEDPSSWPPGSVSAVTCTHSGDTPKDSTLRIPEDSRKEKLWESPGRATSPPLAGAVSPSVAVRATGLSSTPTGDEAQAGRGLPGPDPQSRGAPPHTNPDRMPRGHSSYSPSNTARLGHREGQAVTAVPTEPPTLQGAGPDSPACLEGEMGTSSKEPEDPGTPETGRSGATKMPRVTCPSTGLGLGRTTAPSSTASDFQSDSPQSHRNASHQTPQGDPLGPQDLKQRSRGYKKKPASTENGQWKGQAPHGPVTCEVCAASFRSGPGLSRHKARKHRPHPGAPAEPSPAALPAQQPLEPLAQKCQPPRKKSHRVSGKERPNHSRGDPSHVTQPPPAQGSKEVLRAPGSPHSQQLHPPSPTEHEVDVKTPASKPRPDQAREDELHPKQAEKREGRRWRREPTVDSPSHSEGKSNKKRGKLRGRRLREESILPVSADVISDGRGSRPSPAMASYAASPSHCLSVEGGPEADGEQPPRLATLGPGVMEGAAETDQEALCAGETGAQKPPGDRMLCPGRMDGAALGEQPTGQKGASARGFWGPRETKALGVCKESGSEPAEDSSRAHSRSEEGVWEENTPPLGPLGFPETSSSPADSTTSSCLQGLPDNPDTQGGVQGPEGPTPDASGSSAKDPPSLFDDEVSFSQLFPPGGRLTRKRNPHVYGKRCEKPVLPLPTQPSFEEGGDPTLGPARLPTDLSDSSSLCLCHEDPWEDEDPAGLPESFLLDGFLNSRVPGIDPWAPGLSLWALEPSREAGAEKLPSHCPEDDRPEAIPELHMVPAAWRGLEMPAPADDSSSSLGDVSPEPPSLERERCDGGLPGNTHLLPLRATDFEVLSTKFEMQDLCFLGPFEDPVGLPGPSFLDFEGTASSQGPQSRRTEEAAGAGRAQGRGRPAKGRRASYKCKVCFQRFRSLGELDLHKLAHTPAPPPTCYMCVERRFGSRELLRGHLQERHAQSKAGPWACGMCLKEVADVWMYNEHLREHAVRFARRGQARRSLGDLPGGLEGSSAVAHLLNSITEPAPKHHRGKRSAGKAAGSPGDPWGQEGEAKKDSPGERAKPRARSTPSNPDGAATPDSASATALADAGSPGPPRTTPSPSPDPWAGGEPLLQATPVHEACKDPSRDCHHCGKRFPKPFKLQRHLAVHSPQRVYLCPRCPRVYPEHGELLAHLGGAHGLLERPELQHTPLYACELCATVMRIIKKSFACSSCNYTFAKKEQFDRHMNKHLRGGRQPFAFRGVRRPGAPGQKARALEGTLPSKRRRVAMPGSAPGPGEDRPPPRGSSPILSEGSLPALLHLCSEVAPSTTKGWPETLERPVDPVTHPIRGCELPSNHQECPPPSLSPFPAALADGRGDCALDGALERPENEASPGSPGPLLQQALPLGASLPRPGARGQDAEGKRAPLVFSGKRRAPGARGRCAPDHFQEDHLLQKEKEVSSSHMVSEGGPRGAFHKGSATKPAGCQSSSKDRSAASTPSKALKFPVHPRKAVGSLAPGELARGTENGMKPATPKAKPGPSSQGSGSPRPGTKTGGGSQPQPASGQLQSETATTPAKPSFPSRSPAPERLPARAQAKSCTKGPREAGEQGPHGSLGPKEKGESSTKRKKGQVPGPARSESVGSFGRAPSAPDKPPRTPRKQATPSRVLPTKPKPNSQNKPRPPPSEQRKAEPGHTQRKDRLGKAFPQGRPLLRPPKRGTAVHGAEPAEPHTHRTAEAQSDLLSQLFGQRLTGFKIPLKKDASE

SEQ ID NO: 100182 - protein, 3953 aa, Homo sapiens
  Payload ID: 19959
  Gene Name: zinc finger protein 469
  ENSP ID: ENSP00000456500
MPGERPRGAPPPTMTGDLQPRQVASSPGHPSQPPLEDNTPATRTTKGAREAGGQAQAMELPEAQPRQARDGELKPPSLRGQAPSSTPGKRGSPQTPPGRSPLQAPSRLAGRAEGSPPQRYILGIASSRTKPTLDETPENPQLEAAQLPEVDTPQGPGTGAPLRPGLPRTEAQPAAEELGFHRCFQEPPSSFTSTNYTSPSATPRPPAPGPPQSRGTSPLQPGSYPEYQASGADSWPPAAENSFPGANFGVPPAEPEPIPKGSRPGGSPRGVSFQFPFPALHGASTKPFPADVAGHAFTNGPLVFAFHQPQGAWPEEAVGTGPAYPLPTQPAPSPLPCYQGQPGGLNRHSDLSGALSSPGAAHSAPRPFSDSLHKSLTKILPERPPSAQDGLGSTRGPPSSLPQRHFPGQAYRASGVDTSPGPPDTELAAPGPPPARLPQLWDPTAAPYPTPPGGPLAATRSMFFNGQPSPGQRLCLPQSAPLPWPQVLPTARPSPHGMEMLSRLPFPAGGPEWQGGSQGALGTAGKTPGPREKLPAVRSSQGGSPALFTYNGMTDPGAQPLFFGVAQPQVSPHGTPSLPPPRVVGASPSESPLPSPATNTAGSTCSSLSPMSSSPANPSSEESQLPGPLGPSAFFHPPTHPQETGSPFPSPEPPHSLPTHYQPEPAKAFPFPADGLGAEGAFQCLEETPFPHEGPEVGRGGLQGFPRAPPPYPTHHFSLSSASLDQLDVLLTCRQCDRNYSSLAAFLAHRQFCGLLLARAKDGHQRSPGPPGLPSPPAAPRVPADAHAGLLSHAKTFLLAGDAQAEGKDDPLRTGFLPSLAATPFPLPASDLDMEDDAKLDSLITEALNGMEYQSDNPEIDSSFIDVFADEEPSGPRGPSSGHPLKSKAGVTPESKAPPPLPAATPDPQTPRPGDRGCPARGRPKTRSLGLAPTEADAPSQGRQQRRGKQLKLFRKDLDSGGAAEGSGSGGGGRASGLRPRRNDGLGERPPPRPRRPRTQAPGSRADPAPRVPRAAALPEETRSSRRRRLPPRKDPRKRKARGGAWGKELILKIVQQKNRRHRRLGRRAGRCGSLAAGRPRPGAEDRRLREYDFASESEEDEQPPPRGPGFRGRRGRGEKRKEVELTQGPREDEPQKPRKAARQEAGGDGAPANPEEPGGSRPGPGRSPQARGPSRSLETGAAAREGGPKCADRPSVAPKDPLQVPTNTETSEETRPSLDFPQEAKEPETAEESAPDSTEFTEALRSPPAACAGEMGASPGLLIPEQPPPSRHDTGTPKPSGSLANTAPHGSSPTPGVGSLLGGPGGTQAPVSHNSKDPPARQPGEFLAPVANPSSTACPKPSVLSSKISSFGCDPAGFNRDPLGVPVAKKGPQPYSSPHSELFLGPKDLAGCFLEELHPKPSARDAPPASSSCLCQDGEDAGSLEPQLPRSPPGTAETEPGRAASPPTLESSSLFPDLPVDRFDPPLYGSLSANRDSGLPFACADPPQKTVPSDPPYPSFLLLEEVSPMLPSHFPDLSGGKVLSKTCPPERTVVPGAAPSLPGKGSGCSVALMSHLSEDELEIQKLVTELESQLQRSKDTRGAPRELAEAESVGRVELGTGTEPPSQRRTCQATVPHEDTFSAADLTRVGESTAHREGAESAVATVEAVQGRPGGTWPCPASFHPGHAALLPCAQEDLVSGAPFSPRGANFHFQPVQKAGASKTGLCQAEGDSRPPQDVCLPEPSKQPGPQLDAGSLAKCSPDQELSFPKNKEAASSQESEDSLRLLPCEQRGGFLPEPGTADQPHRGAPAPEAFGSPAVHLAPDLAFQGDGAPPLDATWPFGASPSHAAQGHSAGRAGGHLHPTAGRPGFEGNEFAPAGASSLTAPRGREAWLVPVPSPACVSNTHPSRRSQDPALSPPIRQLQLPGPGVAKSKDGILGLQELTPAAQSPPRVNPSGLEGGTVEGGKVACGPAQGSPGGVQVTTLPAVAGHQLGLEADGHWGLLGQAEKTQGQGTANQLQPENGVSPGGTDNHASVNASPKTALTGPTEGAVLLEKCKGSRAAMSLQEEAEPTPSPPSPNRESLALALTAAHSRSGSEGRTPERASSPGLNKPLLATGDSPAPSVGDLAACAPSPTSAAHMPCSLGPLPREDPLTSPSRAQGGLGGQLPASPSCRDPPGPQQLLACSPAWAPLEEADGVQATTDTGAEDSPVAPPSLTTSPCDPKEALAGCLLQGEGSPLEDPSSWPPGSVSAVTCTHSGDTPKDSTLRIPEDSRKEKLWESPGRATSPPLAGAVSPSVAVRATGLSSTPTGDEAQAGRGLPGPDPQSRGAPPHTNPDRMPRGHSSYSPSNTARLGHREGQAVTAVPTEPPTLQGAGPDSPACLEGEMGTSSKEPEDPGTPETGRSGATKMPRVTCPSTGLGLGRTTAPSSTASDFQSDSPQSHRNASHQTPQGDPLGPQDLKQRSRGYKKKPASTENGQWKGQAPHGPVTCEVCAASFRSGPGLSRHKARKHRPHPGAPAEPSPAALPAQQPLEPLAQKCQPPRKKSHRVSGKERPNHSRGDPSHVTQPPPAQGSKEVLRAPGSPHSQQLHPPSPTEHEVDVKTPASKPRPDQAREDELHPKQAEKREGRRWRREPTVDSPSHSEGKSNKKRGKLRGRRLREESILPVSADVISDGRGSRPSPAMASYAASPSHCLSVEGGPEADGEQPPRLATLGPGVMEGAAETDQEALCAGETGAQKPPGDRMLCPGRMDGAALGEQPTGQKGASARGFWGPRETKALGVCKESGSEPAEDSSRAHSRSEEGVWEENTPPLGPLGFPETSSSPADSTTSSCLQGLPDNPDTQGGVQGPEGPTPDASGSSAKDPPSLFDDEVSFSQLFPPGGRLTRKRNPHVYGKRCEKPVLPLPTQPSFEEGGDPTLGPARLPTDLSDSSSLCLCHEDPWEDEDPAGLPESFLLDGFLNSRVPGIDPWAPGLSLWALEPSREAGAEKLPSHCPEDDRPEAIPELHMVPAAWRGLEMPAPADDSSSSLGDVSPEPPSLERERCDGGLPGNTHLLPLRATDFEVLSTKFEMQDLCFLGPFEDPVGLPGPSFLDFEGTASSQGPQSRRTEEAAGAGRAQGRGRPAKGRRASYKCKVCFQRFRSLGELDLHKLAHTPAPPPTCYMCVERRFGSRELLRGHLQERHAQSKAGPWACGMCLKEVADVWMYNEHLREHAVRFARRGQARRSLGDLPGGLEGSSAVAHLLNSITEPAPKHHRGKRSAGKAAGSPGDPWGQEGEAKKDSPGERAKPRARSTPSNPDGAATPDSASATALADAGSPGPPRTTPSPSPDPWAGGEPLLQATPVHEACKDPSRDCHHCGKRFPKPFKLQRHLAVHSPQRVYLCPRCPRVYPEHGELLAHLGGAHGLLERPELQHTPLYACELCATVMRIIKKSFACSSCNYTFAKKEQFDRHMNKHLRGGRQPFAFRGVRRPGAPGQKARALEGTLPSKRRRVAMPGSAPGPGEDRPPPRGSSPILSEGSLPALLHLCSEVAPSTTKGWPETLERPVDPVTHPIRGCELPSNHQECPPPSLSPFPAALADGRGDCALDGALERPENEASPGSPGPLLQQALPLGASLPRPGARGQDAEGKRAPLVFSGKRRAPGARGRCAPDHFQEDHLLQKEKEVSSSHMVSEGGPRGAFHKGSATKPAGCQSSSKDRSAASTPSKALKFPVHPRKAVGSLAPGELARGTENGMKPATPKAKPGPSSQGSGSPRPGTKTGGGSQPQPASGQLQSETATTPAKPSFPSRSPAPERLPARAQAKSCTKGPREAGEQGPHGSLGPKEKGESSTKRKKGQVPGPARSESVGSFGRAPSAPDKPPRTPRKQATPSRVLPTKPKPNSQNKPRPPPSEQRKAEPGHTQRKDRLGKAFPQGRPLLRPPKRGTAVHGAEPAEPHTHRTAEAQSDLLSQLFGQRLTGFKIPLKKDASE

SEQ ID NO: 100183 - protein, 717 aa, Homo sapiens
  Payload ID: 19960
  Gene Name: zinc finger protein 470
  Uniprot ID: Q6ECI4
  ENSP ID: ENSP00000333223
MKSQEEVEVAGIKLCKAMSLGSVTFTDVAIDFSQDEWEWLNLAQRSLYKKVMLENYRNLVSVGLCISKPDVISLLEQEKDPWVIKGGMNRGLCPDLECVWVTKSLSLNQDIYEEKLPPAIIMERLKSYDLECSTLGKNWKCEDLFERELVNQKTHFRQETITHIDTLIEKRDHSNKSGTVFHLNTLSYIKQIFPMEERIFNFHTDKKSLKTHSVVKKHKQDRGEKKLLKCNDCEKIFSKISTLTLHQRIHTGEKPYECIECGKAFSQSAHLAQHQRIHTGEKPFECTECGKAFSQNAHLVQHQRVHTGEKPYQCKQCNKAFSQLAHLAQHQRVHTGEKPYECIECGKAFSDCSSLAHHRRIHTGKRPYECIDCGKAFRQNASLIRHRRYYHTGEKPFDCIDCGKAFTDHIGLIQHKRTHTGERPYKCNVCGKAFSHGSSLTVHQRIHTGEKPYECNICEKAFSHRGSLTLHQRVHTGEKPYECKECGKAFRQSTHLAHHQRIHTGEKPYECKECSKTFSQNAHLAQHQKIHTGEKPYECKECGKAFSQIAHLVQHQRVHTGEKPYECIECGKAFSDGSYLVQHQRLHSGKRPYECLECGKAFRQRASLICHQRCHTGEKPYECNVCGKAFSHRKSLTLHQRIHTGEKPYECKECSKAFSQVAHLTLHKRIHTGERPYECKECGKAFRQSVHLAHHQRIHTGESSVILSSALPYHQVL

SEQ ID NO: 100184 - protein, 717 aa, Homo sapiens; identical to SEQ ID NO: 100183
  Payload ID: 19960
  Gene Name: zinc finger protein 470
  Uniprot ID: Q6ECI4
  ENSP ID: ENSP00000375590

SEQ ID NO: 100185 - protein, 102 aa, Homo sapiens
  Payload ID: 19960
  Gene Name: zinc finger protein 470
  ENSP ID: ENSP00000471379
MKSQEEVEVAGIKLCKAMSLGSVTFTDVAIDFSQDEWEWLNLAQRSLYKKVMLENYRNLVSVGLCISKPDVISLLEQEKDPWVIKGGMNRGLCPDILKMPHQ

SEQ ID NO: 100186 - protein, 46 aa, Homo sapiens
  Payload ID: 19960
  Gene Name: zinc finger protein 470
  ENSP ID: ENSP00000472891
  MOD_RES (1)..(1): Any amino acid
XSKPDVISLLEQEKDPWVIKGGMNRGLCPAPPNAGLYHHQIYLLKS

SEQ ID NO: 100187 - protein, 626 aa, Homo sapiens
  Payload ID: 19961
  Gene Name: zinc finger protein 471
  Uniprot ID: Q9BX82
  ENSP ID: ENSP00000309161
MNVEVVKVMPQDLVTFKDVAIDFSQEEWQWMNPAQKRLYRSMMLENYQSLVSLGLCISKPYVISLLEQGREPWEMTSEMTRSPFSDWESIYVTQELPLKQFMYDDACMEGITSYGLECSTFEENWKWEDLFEKQMGSHEMFSKKEIITHKETITKETEFKYTKFGKCIHLENIEESIYNHTSDKKSFSKNSMVIKHKKVYVGKKLFKCNECDKTFTHSSSLTVHFRIHTGEKPYACEECGKAFKQRQHLAQHHRTHTGEKLFECKECRKAFKQSEHLIQHQRIHTGEKPYKCKECRKAFRQPAHLAQHQRIHTGEKPYECKECGKAFSDGSSFARHQRCHTGKRPYECIECGKAFRYNTSFIRHWRSYHTGEKPFNCIDCGKAFSVHIGLILHRRIHTGEKPYKCGVCGKTFSSGSSRTVHQRIHTGEKPYECDICGKDFSHHASLTQHQRVHSGEKPYECKECGKAFRQNVHLVSHLRIHTGEKPYECKECGKAFRISSQLATHQRIHTGEKPYECIECGNAFKQRSHLAQHQKTHTGEKPYECNECGKAFSQTSNLTQHQRIHTGEKPYKCTECGKAFSDSSSCAQHQRLHTGQRPYQCFECGKAFRRKLSLICHQRSHTGEEP

SEQ ID NO: 100188 - protein, 247 aa, Homo sapiens
  Payload ID: 19961
  Gene Name: zinc finger protein 471
  Uniprot ID: Q9BX82
  ENSP ID: ENSP00000466224
MNVEVVKVMPQDLVTFKDVAIDFSQEEWQWMNPAQKRLYRSMMLENYQSLVSLGLCISKPYVISLLEQGREPWEMTSEMTRSPFSEFILVKNHMHVRNVEKPSSKGNTLLNITEHILERNSLNVKNVGKPSNKVNTLFSIKEFILEKNHINVRNAEKPSDSLHTLLSIREFILERNPMNVKNVAKPSVMARLLLDIRDVTLAKDPMNVLSVGRLLGITHLLFVTGGVIILERSLLIALIVGKPSVFT

SEQ ID NO: 100189 - protein, 76 aa, Homo sapiens
  Payload ID: 19961
  Gene Name: zinc finger protein 471
  ENSP ID: ENSP00000467570
MNVEVVKVMPQDLVTFKDVAIDFSQEEWQWMNPAQKRLYRSMMLENYQSLVSLGLCISKPYVISLLEQGREPWEMT

SEQ ID NO: 100190 - protein, 871 aa, Homo sapiens
  Payload ID: 19962
  Gene Name: zinc finger protein 473
  Uniprot ID: Q8WTR7
  ENSP ID: ENSP00000270617
MAEEFVTLKDVGMDFTLGDWEQLGLEQGDTFWDTALDNCQDLFLLDPPRPNLTSHPDGSEDLEPLAGGSPEATSPDVTETKNSPLMEDFFEEGFSQEIIEMLSKDGFWNSNFGEACIEDTWLDSLLGDPESLLRSDIATNGESPTECKSHELKRGLSPVSTVSTGEDSMVHNVSEKTLTPAKSKEYRGEFFSYSDHSQQDSVQEGEKPYQCSECGKSFSGSYRLTQHWITHTREKPTVHQECEQGFDRNASLSVYPKTHTGYKFYVCNEYGTTFSQSTYLWHQKTHTGEKPCKSQDSDHPPSHDTQPGEHQKTHTDSKSYNCNECGKAFTRIFHLTRHQKIHTRKRYECSKCQATFNLRKHLIQHQKTHAAKTTSECQECGKIFRHSSLLIEHQALHAGEEPYKCNERGKSFRHNSTLKIHQRVHSGEKPYKCSECGKAFHRHTHLNEHRRIHTGYRPHKCQECVRSFSRPSHLMRHQAIHTAEKPYSCAECKETFSDNNRLVQHQKMHTVKTPYECQECGERFICGSTLKCHESVHAREKQGFFVSGKILDQNPEQKEKCFKCNKCEKTFSCSKYLTQHERIHTRGVKPFECDQCGKAFGQSTRLIHHQRIHSRVRLYKWGEQGKAISSASLIKLQSFHTKEHPFKCNECGKTFSHSAHLSKHQLIHAGENPFKCSKCDRVFTQRNYLVQHERTHARKKPLVCNECGKTFRQSSCLSKHQRIHSGEKPYVCDYCGKAFGLSAELVRHQRIHTGEKPYVCQECGKAFTQSSCLSIHRRVHTGEKPYRCGECGKAFAQKANLTQHQRIHTGEKPYSCNVCGKAFVLSAHLNQHLRVHTQETLYQCQRCQKAFRCHSSLSRHQRVHNKQQYCL

SEQ ID NO: 100191 - protein, 871 aa, Homo sapiens; identical to SEQ ID NO: 100190
  Payload ID: 19962
  Gene Name: zinc finger protein 473
  Uniprot ID: Q8WTR7
  ENSP ID: ENSP00000375697

SEQ ID NO: 100192 - protein, 859 aa, Homo sapiens
  Payload ID: 19962
  Gene Name: zinc finger protein 473
  ENSP ID: ENSP00000388961
MDFTLGDWEQLGLEQGDTFWDTALDNCQDLFLLDPPRPNLTSHPDGSEDLEPLAGGSPEATSPDVTETKNSPLMEDFFEEGFSQEIIEMLSKDGFWNSNFGEACIEDTWLDSLLGDPESLLRSDIATNGESPTECKSHELKRGLSPVSTVSTGEDSMVHNVSEKTLTPAKSKEYRGEFFSYSDHSQQDSVQEGEKPYQCSECGKSFSGSYRLTQHWITHTREKPTVHQECEQGFDRNASLSVYPKTHTGYKFYVCNEYGTTFSQSTYLWHQKTHTGEKPCKSQDSDHPPSHDTQPGEHQKTHTDSKSYNCNECGKAFTRIFHLTRHQKIHTRKRYECSKCQATFNLRKHLIQHQKTHAAKTTSECQECGKIFRHSSLLIEHQALHAGEEPYKCNERGKSFRHNSTLKIHQRVHSGEKPYKCSECGKAFHRHTHLNEHRRIHTGYRPHKCQECVRSFSRPSHLMRHQAIHTAEKPYSCAECKETFSDNNRLVQHQKMHTVKTPYECQECGERFICGSTLKCHESVHAREKQGFFVSGKILDQNPEQKEKCFKCNKCEKTFSCSKYLTQHERIHTRGVKPFECDQCGKAFGQSTRLIHHQRIHSRVRLYKWGEQGKAISSASLIKLQSFHTKEHPFKCNECGKTFSHSAHLSKHQLIHAGENPFKCSKCDRVFTQRNYLVQHERTHARKKPLVCNECGKTFRQSSCLSKHQRIHSGEKPYVCDYCGKAFGLSAELVRHQRIHTGEKPYVCQECGKAFTQSSCLSIHRRVHTGEKPYRCGECGKAFAQKANLTQHQRIHTGEKPYSCNVCGKAFVLSAHLNQHLRVHTQETLYQCQRCQKAFRCHSSLSRHQRVHNKQQYCL

SEQ ID NO: 100193 - protein, 102 aa, Homo sapiens
  Payload ID: 19962
  Gene Name: zinc finger protein 473
  ENSP ID: ENSP00000470862
MAEEFVTLKDVGMDFTLGDWEQLGLEQGDTFWDTALDNCQDLFLLDPPRPNLTSHPDGSEDLEPLAGGSPEATSPDVTETKNSPLMEDFFEEGFSQEIIEML

SEQ ID NO: 100194 - protein, 74 aa, Homo sapiens
  Payload ID: 19962
  Gene Name: zinc finger protein 473
  ENSP ID: ENSP00000470956
MAEEFVTLKDVGMDFTLGDWEQLGLEQGDTFWDTALDNCQDLFLLDPPRPNLTSHPDGSEDLEPLAGGSPEATS

SEQ ID NO: 100195 - protein, 77 aa, Homo sapiens
  Payload ID: 19962
  Gene Name: zinc finger protein 473
  ENSP ID: ENSP00000471595
MAEEFVTLKDVGMDFTLGDWEQLGLEQGDTFWDTALDNCQDLFLLDPPRPNLTSHPDGSEDLEPLAGGSPEATSPGF

SEQ ID NO: 100196 - protein, 64 aa, Homo sapiens
  Payload ID: 19962
  Gene Name: zinc finger protein 473
  ENSP ID: ENSP00000472687
MDFTLGDWEQLGLEQGDTFWDTALDNCQDLFLLGFSQESSQPAVSPSSAHQCHTVRQQQGPDSS

SEQ ID NO: 100197 - protein, 871 aa, Homo sapiens; identical to SEQ ID NO: 100190
  Payload ID: 19962
  Gene Name: zinc finger protein 473
  Uniprot ID: Q8WTR7
  ENSP ID: ENSP00000472808

SEQ ID NO: 100198 - protein, 364 aa, Homo sapiens
  Payload ID: 19963
  Gene Name: zinc finger protein 474
  Uniprot ID: Q6S9Z5
  ENSP ID: ENSP00000296600
MERGKKKRISNKLQQTFHHSKEPTFLINQAGLLSSDSYSSLSPETESVNPGENIKTDTQKKRPGTVILSKLSSRRIISESQLSPPVIPARRPGFRVCYICGREFGSQSIAIHEPQCLQKWHIENSKLPKHLRRPEPSKPQSLSSSGSYSLQATNEAAFQSAQAQLLPCESCGRTFLPDHLLVHHRSCKPKGEGPRAPHSNSSDHLTGLKKACSGTPARPRTVICYICGKEFGTLSLPIHEPKCLEKWKMENDRLPVELHQPLPQKPQPLPNAQSSQAGPNQAQLVFCPHCSRIFTSDRLLVHQRSCKTHPYGPKYQNLNLGSKGGLKEYTNSKQQRNRAAPSVTDKVIHATQDALGEPGGALCL

SEQ ID NO: 100199 - protein, 63 aa, Homo sapiens
  Payload ID: 19963
  Gene Name: zinc finger protein 474
  ENSP ID: ENSP00000422285
MERGKKKRISNKLQQTFHHSKEPTFLINQAGLLSSDSYSSLSPETESVNPGENIKTDTQKKRP

SEQ ID NO: 100200 - protein, 36 aa, Homo sapiens
  Payload ID: 19963
  Gene Name: zinc finger protein 474
  ENSP ID: ENSP00000424794
MERGKKKRISNKLQQTFHHSKEPTFLINQAGLLSSD

SEQ ID NO: 100201 - protein, 524 aa, Homo sapiens
  Payload ID: 19964
  Gene Name: zinc finger protein 479
  Uniprot ID: Q96JC4
  ENSP ID: ENSP00000324518
MAKRPGPPGSREMGLLTFRDIAIEFSLEEWQCLDCAQRNLYRDVMLENYRNLVSLGIAVSKPDLITCLEQNKESQNIKRNEMVAKHPVTRSHFTQDLQPEQGIKDSLQKVIPRTYGKCGHEKLQFKKCCKSVGEYEVHKGGYSEVNQCLSTTQNKIFQTHKYVKVFGKFSNSNRDKTRYTGNKHFKCNKYGKSFCMLSHLNQHQVIHTREKSYKCKECGKSFNCSSNHTTHKIIHTGEKPYRCEECGKAFSWSANLTRHKRTHTGEKPYTCEECGQAFRRSSALTNHKRIHTGERPYKCEECGKAFSVSSTLTDHKRIHTGEKPCRCEECGKAFSWSSNLTRHKRIHTREKPYACEECGQAFSLSSNLMRHRRIHTGEKPYTCEECGQDFRRSSALTIHKRIHTGERPYKCEECGKVFSLSSTLTDHKRIHTGERPYKCEECGKAFSLSSTLTDHKRIHTGERPYTCEECGKAFNCSSTLMQHKRIHTGEKPYKCEECEQAFKWHSSLAKHKIIHTGEKPYKCE

SEQ ID NO: 100202 - protein, 524 aa, Homo sapiens; identical to SEQ ID NO: 100201
  Payload ID: 19964
  Gene Name: zinc finger protein 479
  Uniprot ID: Q96JC4
  ENSP ID: ENSP00000333776

SEQ ID NO: 100203 - protein, 412 aa, Homo sapiens [sequence omitted]

SEQ ID NO: 100204 - protein, 618 aa, Homo sapiens
  Payload ID: 19965
  Gene Name: zinc finger protein 48
  Uniprot ID: Q96MX3
  ENSP ID: ENSP00000324056
MERAVEPWGPDLHRPEEREPQRGARTGLGSENVISQPNEFEHTPQEDDLGFKEEDLAPDHEVGNASLKPEGIQNWDDLWVQREGLGKPQPRDRGPRLLGEPRWGQASSDRAAVCGECGKSFRQMSDLVKHQRTHTGEKPYKCGVCGKGFGDSSARIKHQRTHSGEKPYRARPPAQGPPKIPRSRIPAGERPTICGECGKSFRQSSDLVKHQRTHTGEKPYKCGICGKGFGDSSARIKHQRTHRGEQPPRPVVPRRQPSRAATAATQGPKAQDKPYICTDCGKRFVLSCSLLSHQRSHLGPKPFGCDVCGKEFARGSDLVKHLRVHTGEKPYLCPECGKGFADSSARVKHLRTHSGERPHACPECDRTFSLSSTLLRHRLTHMEPQDFSFPGYPLPALIPSPPPPPLGTSPPLTPRSPSHSGEPFGLPGLEPEPGGPQAGEPPPPLAGDKPHKCPECGKGFRRSSDLVKHHRVHTGEKPYLCPECGKGFADSSARVKHLRTHRGERARPPPPSTLLRPHNPPGPVPMAPRPRVRAQPSGPSQPHVCGFCGKEFPRSSDLVKHRRTHTGEKPYKCAECGKGFGDSSARIKHQRGHLVLTPFGIGDGRARPLKQEAATGLE

SEQ ID NO: 100205 - protein, 110 aa, Homo sapiens
  Payload ID: 19965
  Gene Name: zinc finger protein 48
  ENSP ID: ENSP00000417204
MRSEWLALSAGRGGRRGWLETHSHNYEEPRASPPSCSPGGTRLIPPSSGRRPRLRVAPGPHAAARRPQSYRRRGRPPQARSSSKVLERLRAAPRFRFPSPPPVAAPGTPG

SEQ ID NO: 100206 - protein, 143 aa, Homo sapiens
  Payload ID: 19965
  Gene Name: zinc finger protein 48
  ENSP ID: ENSP00000432548
MERAVEPWGPDLHRPEEREPQRGARTGLGSENVISQPNEFEHTPQEDDLGFKEEDLAPDHEVGNASLKPEGIQNWDDLWVQREGLGKPQPRDRGPRLLGEPRWGQASSDRAAVCGECGKSFRQMSDLVKHQRTHTGEKPYKCG

SEQ ID NO: 100207 - protein, 147 aa, Homo sapiens
  Payload ID: 19965
  Gene Name: zinc finger protein 48
  ENSP ID: ENSP00000435674
MERAVEPWGPDLHRPEEREPQRGARTGLGSENVISQPNEFEHTPQEDDLGFKEEDLAPDHEVGNASLKPEGIQNWDDLWVQREGLGKPQPRDRGPRLLGEPRWGQASSDRAAVCGECGKSFRQMSDLVKHQRTHTGEKPYKCGVCGK

SEQ ID NO: 100208 - protein, 495 aa, Homo sapiens
  Payload ID: 19965
  Gene Name: zinc finger protein 48
  ENSP ID: ENSP00000479658
MSDLVKHQRTHTGEKPYKCGVCGKGFGDSSARIKHQRTHSGEKPYRARPPAQGPPKIPRSRIPAGERPTICGECGKSFRQSSDLVKHQRTHTGEKPYKCGICGKGFGDSSARIKHQRTHRGEQPPRPVVPRRQPSRAATAATQGPKAQDKPYICTDCGKRFVLSCSLLSHQRSHLGPKPFGCDVCGKEFARGSDLVKHLRVHTGEKPYLCPECGKGFADSSARVKHLRTHSGERPHACPECDRTFSLSSTLLRHRLTHMEPQDFSFPGYPLPALIPSPPPPPLGTSPPLTPRSPSHSGEPFGLPGLEPEPGGPQAGEPPPPLAGDKPHKCPECGKGFRRSSDLVKHHRVHTGEKPYLCPECGKGFADSSARVKHLRTHRGERARPPPPSTLLRPHNPPGPVPMAPRPRVRAQPSGPSQPHVCGFCGKEFPRSSDLVKHRRTHTGEKPYKCAECGKGFGDSSARIKHQRGHLVLTPFGIGDGRARPLKQEAATGLE

SEQ ID NO: 100209 - protein, 618 aa, Homo sapiens; identical to SEQ ID NO: 100204
  Payload ID: 19965
  Gene Name: zinc finger protein 48
  Uniprot ID: Q96MX3
  ENSP ID: ENSP00000480262

SEQ ID NO: 100210 - protein, 618 aa, Homo sapiens; identical to SEQ ID NO: 100204
  Payload ID: 19965
  Gene Name: zinc finger protein 48
  Uniprot ID: Q96MX3
  ENSP ID: ENSP00000483937

SEQ ID NO: 100211 - protein, 492 aa, Homo sapiens
  Payload ID: 19966
  Gene Name: zinc finger protein 480
  ENSP ID: ENSP00000334164
MLCDEKAQKRRKRKAKESGMALPQGHLTFRDVAIEFSQAEWKCLDPAQRALYKDVMLENYRNLVSLGSSYALGSNAEDKPIKKQLGVSFHLHLSELELFPDERVINGCNQVENFINHSSSVSCLQEMSSSVKTPIFNRNDFDDSSFLPQEQKVHLREKPYECNEHSKVFRVSSSLTKHQVIHTVEKPYKCNSCGKVFSRNSHLAEHCRIHTGEKPYKCNVCGKVFSYNSNFARHQRIHTREKPYECNECGKVFSNNSYLARHQRIHAEEKPYKCNECGKGFSHKSSLANHWRIYTGEKPYKCDECGKAFYRIALLVRHQKIHTGEKPYKCNECGKVFIQNSHLAQHWRIHTGEKPYKCNECGKVFNQLSNLARHRRIHTGEKPYKCNECGKAFSEYSGLSAHLVIHTGEKPYKCSECGKAFRHKLSLTNHQRIHTGERPYKCNECGKVFNRIAHLARHRKIHTGEKPYKCNECGKAFSRISYLAQHWTIHMG

SEQ ID NO: 100212 - protein, 458 aa, Homo sapiens
  Payload ID: 19966
  Gene Name: zinc finger protein 480
  Uniprot ID: Q8WV37
  ENSP ID: ENSP00000335670
MLEQRREPWSGESEVKIAKNSDGRECIKGVNTGSSYALGSNAEDKPIKKQLGVSFHLHLSELELFPDERVINGCNQVENFINHSSSVSCLQEMSSSVKTPIFNRNDFDDSSFLPQEQKVHLREKPYECNEHSKVFRVSSSLTKHQVIHTVEKPYKCNSCGKVFSRNSHLAEHCRIHTGEKPYKCNVCGKVFSYNSNFARHQRIHTREKPYECNECGKVFSNNSYLARHQRIHAEEKPYKCNECGKGFSHKSSLANHWRIYTGEKPYKCDECGKAFYRIALLVRHQKIHTGEKPYKCNECGKVFIQNSHLAQHWRIHTGEKPYKCNECGKVFNQLSNLARHRRIHTGEKPYKCNECGKAFSEYSGLSAHLVIHTGEKPYKCSECGKAFRHKLSLTNHQRIHTGERPYKCNECGKVFNRIAHLARHRKIHTGEKPYKCNECGKAFSRISYLAQHWTIHMG

SEQ ID NO: 100213 - protein, 535 aa, Homo sapiens
  Payload ID: 19966
  Gene Name: zinc finger protein 480
  Uniprot ID: Q8WV37
  ENSP ID: ENSP00000417424
MLCDEKAQKRRKRKAKESGMALPQGHLTFRDVAIEFSQAEWKCLDPAQRALYKDVMLENYRNLVSLGISLPDLNINSMLEQRREPWSGESEVKIAKNSDGRECIKGVNTGSSYALGSNAEDKPIKKQLGVSFHLHLSELELFPDERVINGCNQVENFINHSSSVSCLQEMSSSVKTPIFNRNDFDDSSFLPQEQKVHLREKPYECNEHSKVFRVSSSLTKHQVIHTVEKPYKCNSCGKVFSRNSHLAEHCRIHTGEKPYKCNVCGKVFSYNSNFARHQRIHTREKPYECNECGKVFSNNSYLARHQRIHAEEKPYKCNECGKGFSHKSSLANHWRIYTGEKPYKCDECGKAFYRIALLVRHQKIHTGEKPYKCNECGKVFIQNSHLAQHWRIHTGEKPYKCNECGKVFNQLSNLARHRRIHTGEKPYKCNECGKAFSEYSGLSAHLVIHTGEKPYKCSECGKAFRHKLSLTNHQRIHTGERPYKCNECGKVFNRIAHLARHRKIHTGEKPYKCNECGKAFSRISYLAQHWTIHMG

SEQ ID NO: 100214 - protein, 61 aa, Homo sapiens
  Payload ID: 19966
  Gene Name: zinc finger protein 480
  ENSP ID: ENSP00000418618
MLCDEKAQKRRKRKAKESGMALPQGAAMHWEAMQKTNQLKNNLEYPFTYICLNWSYFQMKG

SEQ ID NO: 100215 - protein, 535 aa, Homo sapiens; identical to SEQ ID NO: 100213
  Payload ID: 19966
  Gene Name: zinc finger protein 480
  Uniprot ID: Q8WV37
  ENSP ID: ENSP00000471754

SEQ ID NO: 100216 - protein, 165 aa, Homo sapiens
  Payload ID: 19966
  Gene Name: zinc finger protein 480
  ENSP ID: ENSP00000473023
MLCDEKAQKRRKRKAKESGMALPQGHLTFRDVAIEFSQAEWKCLDPAQRALYKDVMLENYRNLVSLGISLPDLNINSMLEQRREPWSGESEVKIAKNSDGRECIKGVNTGWSAMVQSRLTATSTSWVQAVLLPQPPEQLGLQGAAMHWEAMQKTNQLKNNLEYPF

SEQ ID NO: 100217 - protein, 744 aa, Homo sapiens
  Payload ID: 19967
  Gene Name: zinc finger protein 483
  Uniprot ID: Q8TF39
  ENSP ID: ENSP00000311679
MQAVVPLNKMTAISPEPQTLASTEQNEVPRVVTSGEQEAILRGNAADAESFRQRFRWFCYSEVAGPRKALSQLWELCNQWLRPDIHTKEQILELLVFEQFLTILPGEIRIWVKSQHPESSEEVVTLIEDLTQMLEEKDPVSQDSTVSQEENSKEDKMVTVCPNTESCESITLKDVAVNFSRGEWKKLEPFQKELYKEVLLENLRNLEFLDFPVSKLELISQLKWVELPWLLEEVSKSSRLDESALDKIIERCLRDDDHGLMEESQQYCGSSEEDHGNQGNSKGRVAQNKTLGSGSRGKKFDPDKSPFGHNFKETSDLIKHLRVYLRKKSRRYNESKKPFSFHSDLVLNRKEKTAGEKSRKSNDGGKVLSHSSALTEHQKRQKIHLGDRSQKCSKCGIIFIRRSTLSRRKTPMCEKCRKDSCQEAALNKDEGNESGEKTHKCSKCGKAFGYSASLTKHRRIHTGEKPYMCNECGKAFSDSSSLTPHHRTHSGEKPFKCDDCGKGFTLSAHLIKHQRIHTGEKPYKCKDCGRPFSDSSSLIQHQRIHTGEKPYTCSNCGKSFSHSSSLSKHQRIHTGEKPYKCGECGKAFRQNSCLTRHQRIHTGEKPYLCNDCGMTFSHFTSVIYHQRLHSGEKPYKCNQCEKAFPTHSLLSRHQRIHTGVKPYKCKECGKSFSQSSSLNEHHRIHTGEKPYECNYCGATFSRSSILVEHLKIHTGRREYECNECEKTFKSNSGLIRHRGFHSAE

SEQ ID NO: 100218 - protein, 256 aa, Homo sapiens
  Payload ID: 19967
  Gene Name: zinc finger protein 483
  Uniprot ID: Q8TF39
  ENSP ID: ENSP00000350871
MQAVVPLNKMTAISPEPQTLASTEQNEVPRVVTSGEQEAILRGNAADAESFRQRFRWFCYSEVAGPRKALSQLWELCNQWLRPDIHTKEQILELLVFEQFLTILPGEIRIWVKSQHPESSEEVVTLIEDLTQMLEEKDPVSQDSTVSQEENSKEDKMVTVCPNTESCESITLKDVAVNFSRGEWKKLEPFQKELYKEVLLENLRNLEFLDFPVSKLELISQLKWVELPWLLEEVSKSSRLDIHGAVKKMQMFSEAE

SEQ ID NO: 100219 - protein, 178 aa, Homo sapiens
  Payload ID: 19967
  Gene Name: zinc finger protein 483
  ENSP ID: ENSP00000363494
MQAVVPLNKMTAISPEPQTLASTEQNEVPRVVTSGEQEAILRGNAADAESFRQRFRWFCYSEVAGPRKALSQLWELCNQWLRPDIHTKEQILELLVFEQFLTILPGEIRIWVKSQHPESSEEVVTLIEDLTQMLEEKGEIYRWREEAGDIASKSESKFLKRRQFTAKEESEVRSWDWV

SEQ ID NO: 100220 - protein, 244 aa, Homo sapiens
  Payload ID: 19967
  Gene Name: zinc finger protein 483
  ENSP ID: ENSP00000438048
MQAVVPLNKMTAISPEPQTLASTEQNEVPRVVTSGEQEAILRGNAADAESFRQRFRWFCYSEVAGPRKALSQLWELCNQWLRPDIHTKEQILELLVFEQFLTILPGEIRIWVKSQHPESSEEVVTLIEDLTQMLEEKDPVSQDSTVSQEENSKEDKMVTVCPNTESCESITLKDVAVNFSRGEWKKLEPFQKELYKEVLLENLRNLEFLDFPVSKLELISQLKWVELPWLLEEVSKSSRLGSVI

SEQ ID NO: 100221 - protein, 852 aa, Homo sapiens
  Payload ID: 19968
  Gene Name: zinc finger protein 484
  Uniprot ID: Q5JVG2
  ENSP ID: ENSP00000364645
MTKSLESVSFKDVTVDFSRDEWQQLDLAQKSLYREVMLENYFNLISVGCQVPKPEVIFSLEQEEPCMLDGEIPSQSRPDGDIGFGPLQQRMSEEVSFQSEININLFTRDDPYSILEELWKDDEHTRKCGENQNKPLSRVVFINKKTLANDSIFEYKDIGEIVHVNTHLVSSRKRPHNCNSCGKNLEPIITLYNRNNATENSDKTIGDGDIFTHLNSHTEVTACECNQCGKPLHHKQALIQQQKIHTRESLYLFSDYVNVFSPKSHAFAHESICAEEKQHECHECEAVFTQKSQLDGSQRVYAGICTEYEKDFSLKSNRQKTPYEGNYYKCSDYGRAFIQKSDLFRCQRIHSGEKPYEYSECEKNLPQNSNLNIHKKIHTGGKHFECTECGKAFTRKSTLSMHQKIHTGEKPYVCTECGKAFIRKSHFITHERIHTGEKPYECSDCGKSFIKKSQLHVHQRIHTGENPFICSECGKVFTHKTNLIIHQKIHTGERPYICTVCGKAFTDRSNLIKHQKIHTGEKPYKCSDCGKSFTWKSRLRIHQKCHTGERHYECSECGKAFIQKSTLSMHQRIHRGEKPYVCTECGKAFFHKSHFITHERIHTGEKPYECSICGKSFTKKSQLHVHQQIHTGEKPYRCAECGKAFTDRSNLFTHQKIHTGEKPYKCSDCGKAFTRKSGLHIHQQSHTGERHYECSECGKAFARKSTLIMHQRIHTGEKPYICNECGKSFIQKSHLNRHRRIHTGEKPYECSDCGKSFIKKSQLHEHHRIHTGEKPYICAECGKAFTIRSNLIKHQKIHTKQKPYKCSDLGKALNWKPQLSMPQKSDNGEVECSMPQLWCGDSEGDQGQLSSI

SEQ ID NO: 100222 - protein, 816 aa, Homo sapiens
  Payload ID: 19968
  Gene Name: zinc finger protein 484
  Uniprot ID: Q5JVG2
  ENSP ID: ENSP00000364646
MLENYFNLISVGCQVPKPEVIFSLEQEEPCMLDGEIPSQSRPDGDIGFGPLQQRMSEEVSFQSEININLFTRDDPYSILEELWKDDEHTRKCGENQNKPLSRVVFINKKTLANDSIFEYKDIGEIVHVNTHLVSSRKRPHNCNSCGKNLEPIITLYNRNNATENSDKTIGDGDIFTHLNSHTEVTACECNQCGKPLHHKQALIQQQKIHTRESLYLFSDYVNVFSPKSHAFAHESICAEEKQHECHECEAVFTQKSQLDGSQRVYAGICTEYEKDFSLKSNRQKTPYEGNYYKCSDYGRAFIQKSDLFRCQRIHSGEKPYEYSECEKNLPQNSNLNIHKKIHTGGKHFECTECGKAFTRKSTLSMHQKIHTGEKPYVCTECGKAFIRKSHFITHERIHTGEKPYECSDCGKSFIKKSQLHVHQRIHTGENPFICSECGKVFTHKTNLIIHQKIHTGERPYICTVCGKAFTDRSNLIKHQKIHTGEKPYKCSDCGKSFTWKSRLRIHQKCHTGERHYECSECGKAFIQKSTLSMHQRIHRGEKPYVCTECGKAFFHKSHFITHERIHTGEKPYECSICGKSFTKKSQLHVHQQIHTGEKPYRCAECGKAFTDRSNLFTHQKIHTGEKPYKCSDCGKAFTRKSGLHIHQQSHTGERHYECSECGKAFARKSTLIMHQRIHTGEKPYICNECGKSFIQKSHLNRHRRIHTGEKPYECSDCGKSFIKKSQLHEHHRIHTGEKPYICAECGKAFTIRSNLIKHQKIHTKQKPYKCSDLGKALNWKPQLSMPQKSDNGEVECSMPQLWCGDSEGDQGQLSSI

SEQ ID NO: 100223 - protein, 854 aa, Homo sapiens
  Payload ID: 19968
  Gene Name: zinc finger protein 484
  Uniprot ID: Q5JVG2
  ENSP ID: ENSP00000378881
MSVLSLPESVSFKDVTVDFSRDEWQQLDLAQKSLYREVMLENYFNLISVGCQVPKPEVIFSLEQEEPCMLDGEIPSQSRPDGDIGFGPLQQRMSEEVSFQSEININLFTRDDPYSILEELWKDDEHTRKCGENQNKPLSRVVFINKKTLANDSIFEYKDIGEIVHVNTHLVSSRKRPHNCNSCGKNLEPIITLYNRNNATENSDKTIGDGDIFTHLNSHTEVTACECNQCGKPLHHKQALIQQQKIHTRESLYLFSDYVNVFSPKSHAFAHESICAEEKQHECHECEAVFTQKSQLDGSQRVYAGICTEYEKDFSLKSNRQKTPYEGNYYKCSDYGRAFIQKSDLFRCQRIHSGEKPYEYSECEKNLPQNSNLNIHKKIHTGGKHFECTECGKAFTRKSTLSMHQKIHTGEKPYVCTECGKAFIRKSHFITHERIHTGEKPYECSDCGKSFIKKSQLHVHQRIHTGENPFICSECGKVFTHKTNLIIHQKIHTGERPYICTVCGKAFTDRSNLIKHQKIHTGEKPYKCSDCGKSFTWKSRLRIHQKCHTGERHYECSECGKAFIQKSTLSMHQRIHRGEKPYVCTECGKAFFHKSHFITHERIHTGEKPYECSICGKSFTKKSQLHVHQQIHTGEKPYRCAECGKAFTDRSNLFTHQKIHTGEKPYKCSDCGKAFTRKSGLHIHQQSHTGERHYECSECGKAFARKSTLIMHQRIHTGEKPYICNECGKSFIQKSHLNRHRRIHTGEKPYECSDCGKSFIKKSQLHEHHRIHTGEKPYICAECGKAFTIRSNLIKHQKIHTKQKPYKCSDLGKALNWKPQLSMPQKSDNGEVECSMPQLWCGDSEGDQGQLSSI

SEQ ID NO: 100224 - protein, 816 aa, Homo sapiens; identical to SEQ ID NO: 100222
  Payload ID: 19968
  Gene Name: zinc finger protein 484
  Uniprot ID: Q5JVG2
  ENSP ID: ENSP00000378882

SEQ ID NO: 100225 - protein, 441 aa, Homo sapiens
  Payload ID: 19969
  Gene Name: zinc finger protein 485
  Uniprot ID: Q8NCK3
  ENSP ID: ENSP00000354694
MAPRAQIQGPLTFGDVAVAFTRIEWRHLDAAQRALYRDVMLENYGNLVSVGLLSSKPKLITQLEQGAEPWTEVREAPSGTHAVEDYWFETKMSALKQSTSEASVLGERTKSVMMEKGLDWEGRSSTEKNYKCKECGKVFKYNSSFISHQRNHTSEKPHKCKECGIAFMNSSSLLNHHKVHAGKQPYRCIECGKFLKKHSTFINHQRIHSREKPHKCIECGKTFRKNSILLSHQRIHTGQKPYKCNDCGKAFAQNAALTRHERIHSGEKPFKCNKCGRAFRDNSTVLEHQKIHTGEKPYQCNECGKAFRKSSTLISHQRMHTGEKPYHCSKCGKSFRYSSSFAGHQKTHSGNKPYQCRDCGKAFTKSSTLTGHQRIHTGEKPYHCKKCGKAFRHSSGLVEHQRLHTGEKPYKCNECGKAFPRSSALKQHKKIHNKERAMKCS

SEQ ID NO: 100226 - protein, 441 aa, Homo sapiens; identical to SEQ ID NO: 100225
  Payload ID: 19969
  Gene Name: zinc finger protein 485
  Uniprot ID: Q8NCK3
  ENSP ID: ENSP00000363558

SEQ ID NO: 100227 - protein, 117 aa, Homo sapiens
  Payload ID: 19969
  Gene Name: zinc finger protein 485
  ENSP ID: ENSP00000393570
MAPRAQIQGPLTFGDVAVAFTRIEWRHLDAAQRALYRDVMLENYGNLVSVGLLSSKPKLITQLEQGAEPWTEVREAPSGTHAVEDYWFETKMSALKQSTSEASVLGERTKSVMMEKG

SEQ ID NO: 100228 - protein, 463 aa, Homo sapiens
  Payload ID: 19970
  Gene Name: zinc finger protein 486
  Uniprot ID: Q96H40
  ENSP ID: ENSP00000335042
MPGPLRSLEMESLQFRDVAVEFSLEEWHCLDTAQQNLYRDVMLENYRHLVFLGIIVSKPDLITCLEQGIKPLTMKRHEMIAKPPVVCSHFAQDLWPEQSIKDSYQKVILRKFEKCGHGNLHFKKGCESVDECKLHKRGYNGLNQCLTTTQSKIFQCGKYVKVFHQFSNSKRHKRRHTEKKPLKYIEGDKAFNQSSTHTTHKKIDTGEKPYKCEECGKAFNRSSHLTTHKITHTREKPYKCEECGKVFKYFSSFTTHKKIHSGEKPYICEECGKAFMYPYTLTTHKIIHTGEQPYKCKECDKAFNHPATLSSHKKIHTGEKPYTCDKCGKAFISSSILSKHEKIHTGEKPYKCEECGKAFTRSSHLTMHKIIHTGEKPYKCEECGKAFTWSAGLHKHRRTHTGEKPYKCEECGKAYTTSSNLTEHKTTHTGEKPYKCKECGKAFNWSSDLNKHKRIHIGQKPRT

SEQ ID NO: 100229 - protein, 128 aa, Homo sapiens
  Payload ID: 19970
  Gene Name: zinc finger protein 486
  ENSP ID: ENSP00000469306
MPGPLRSLEMESLQFRDVAVEFSLEEWHCLDTAQQNLYRDVMLENYRHLVFLGIIVSKPDLITCLEQGIKPLTMKRHEMIAKPPGPGMVVAPICNPRILGGQHRRIPGAQKFETSLGKIWRPLFIKII

SEQ ID NO: 100230 - protein, 189 aa, Homo sapiens
  Payload ID: 19971
  Gene Name: zinc finger protein 487
  ENSP ID: ENSP00000314093
  MOD_RES (1)..(1): Any amino acid
XRPRPRTPSRGPSDLRFRGEAGLRRVFLKKAGGSVSFSDVAVGFTQEEWQHLDSAQRTPYRDMMLENYSLLLSVGYCITKPEVVCKLEHGQVLWILEEESPSQSHLDCCIDDDLMEKRQENQDQHLQKVDFVNNKTLTMDRNGVLGKTFSLDTNPILSRKIRGNCDSSGMNLNNISELIISNRSSFVRN

SEQ ID NO: 100231 - protein, 208 aa, Homo sapiens
  Payload ID: 19971
  Gene Name: zinc finger protein 487
  Uniprot ID: B1APH4
  ENSP ID: ENSP00000392335
MMLENYSLLLSVGYCITKPEVVCKLEHGQVLWILEEESPSQSHLDCCIDDDLMEKRQENQDQHLQKVDFVNNKTLTMDRNGVLGKTFSLDTNPILSRKIRGNCDSSGMNLNNISELIISNRSSFVRNPAECNVRGKFLLCMKRENPYARGKPLEYDGNGKAVSQNEDLFRHQYIQTLKQCFEYNQCGKAFHEEAACSTHKRVCSWETL

SEQ ID NO: 100232 - protein, 6 aa, Homo sapiens
  Payload ID: 19971
  Gene Name: zinc finger protein 487
  ENSP ID: ENSP00000395135
MMLENY

SEQ ID NO: 100233 - protein, 113 aa, Homo sapiens
  Payload ID: 19971
  Gene Name: zinc finger protein 487
  ENSP ID: ENSP00000395343
MMLENYSLLLSVDCCIDDDLMEKRQENQDQHLQKVDFVNNKTLTMDRNGVLGKTFSLDTNPILSRKIRGNCDSSGMNLNNISELIISNRSSFVRNPAECNVRGKFLLCMKREN

SEQ ID NO: 100234 - protein, 340 aa, Homo sapiens
  Payload ID: 19972
  Gene Name: zinc finger protein 488
  Uniprot ID: Q96MN9
  ENSP ID: ENSP00000462269
MPEWPPCLSVAPALVITMAAGKGAPLSPSAENRWRLSEPELGRGCKPVLLEKTNRLGPEAAVGRAGRDVGSAELALLVAPGKPRPGKPLPPKTRGEQRQSAFTELPRMKDRQVDAQAQEREHDDPTGQPGAPQLTQNIPRGPAGSKVFSVWPSGARSEQRSAFSKPTKRPAERPELTSVFPAGESADALGELSGLLNTTDLACWGRLSTPKLLVGDLWNLQALPQNAPLCSTFLGAPTLWLEHTQAQVPPPSSSSTTSWALLPPTLTSLGLSTQNWCAKCNLSFRLTSDLVFHMRSHHKKEHAGPDPHSQKRREEALACPVCQEHFRERHHLSRHMTSHS

SEQ ID NO: 100235 - protein, 233 aa, Homo sapiens
  Payload ID: 19972
  Gene Name: zinc finger protein 488
  Uniprot ID: Q96MN9
  ENSP ID: ENSP00000468133
MKDRQVDAQAQEREHDDPTGQPGAPQLTQNIPRGPAGSKVFSVWPSGARSEQRSAFSKPTKRPAERPELTSVFPAGESADALGELSGLLNTTDLACWGRLSTPKLLVGDLWNLQALPQNAPLCSTFLGAPTLWLEHTQAQVPPPSSSSTTSWALLPPTLTSLGLSTQNWCAKCNLSFRLTSDLVFHMRSHHKKEHAGPDPHSQKRREEALACPVCQEHFRERHHLSRHMTSHS

SEQ ID NO: 100236 - protein, 529 aa, Homo sapiens
  Payload ID: 19973
  Gene Name: zinc finger protein 490
  Uniprot ID: Q9ULM2
  ENSP ID: ENSP00000311521
MRRNSSLSFQMERPLEEQVQSKWSSSQGRTGTGGSDVLQMQNSEHHGQSIKTQTDSISLEDVAVNFTLEEWALLDPGQRNIYRDVMRATFKNLACIGEKWKDQDIEDEHKNQGRNLRSPMVEALCENKEDCPCGKSTSQIPDLNTNLETPTGLKPCDCSVCGEVFMHQVSLNRHMRSHTEQKPNECHEYGEKPHKCKECGKTFTRSSSIRTHERIHTGEKPYECKECGKAFAFLFSFRNHIRIHTGETPYECKECGKAFRYLTALRRHEKNHTGEKPYKCKQCGKAFIYYQPFLTHERTHTGEKPYECKQCGKAFSCPTYLRSHEKTHTGEKPFVCRECGRAFFSHSSLRKHVKTHTGVQPYTCKKCGEAFKSSSSCEVHERTHFGEKPYECKQCGKAFNSSSYLQLHERVHTGEKTYECKECGKAFLYSTHFRIHERTHTREKPYECKQCGRVFIYFSHLRRHERSHTGVKPCECKQCGKAFTCLNSLKVHKRIHTGERPFQCRQCGKAFSYSKSLHVHERTHSRQKP

SEQ ID NO: 100237 - protein, 60 aa, Homo sapiens
  Payload ID: 19973
  Gene Name: zinc finger protein 490
  ENSP ID: ENSP00000402719
MRRNSSLSFQMERPLEEQVQSKWSSSQGRTGTGGSDVLQIYGYKCTCVTWIYFIVAKSGF

SEQ ID NO: 100238 - protein, 131 aa, Homo sapiens
  Payload ID: 19973
  Gene Name: zinc finger protein 490
  ENSP ID: ENSP00000404112
MDSISLEDVAVNFTLEEWALLDPGQRNIYRDVMRATFKNLACIGEKWKDQDIEDEHKNQGRNLRSPMVEALCENKEDCPCGKSTSQIPDLNTNLETPTGLKPCDCSVCGEVFMHQVSLNRHMRSHTEQKPN

SEQ ID NO: 100239 - protein, 437 aa, Homo sapiens
  Payload ID: 19974
  Gene Name: zinc finger protein 491
  Uniprot ID: Q8N8L2
  ENSP ID: ENSP00000313443
MGERLFESAEGSQCGETFTQVPEDMLNKKTLPGVKSCESGTCGEIFMGYSSFNRNIRTDTGHQPHKCQKFLEKPYKHKQRRKALSHSHCFRTHERPHTREKPFDCKECEKSFISPASIRRYMVTHSGDGPYKCKFCGKALDCLSLYLTHERTHTGEKRYECKQCGKAFSWHSSVRIHERTHTGEKPYECKECGKSFNFSSSFRRHERTHTGEKPYKCKECGKAFNCPSSFHRHERTHTGEKPYECKLYGKALSRLISFRRHMRMHTGERPHKCKICGKAFYSPSSFQRHERSHTGEKPYKCKQCGKAFTCSTSFQYHERTHTGEKPDGCKQCGKAFRSAKYIRIHGRTHTGEKPYECKQCGKAFHCVSSFHRHERTHAGEKPYECKHCGKAFTCSIYIRIHERIHTGEKPYQCKECGKAFIRSSYCRKHERTHTINI

SEQ ID NO: 100240 - protein, 139 aa, Homo sapiens
  Payload ID: 19974
  Gene Name: zinc finger protein 491
  ENSP ID: ENSP00000392176
MGERLFESAEGSQCGETFTQVPEDMLNKKTLPGVKSCESGTCGEIFMGYSSFNRNIRTDTGHQPHKCQKFLEKPYKHKQRRKALSHSHCFRTHERPHTREKPFDCKECEKSFISPASIRRYMVTHSGDGPYKCKFCGKA

SEQ ID NO: 100241 - protein, 531 aa, Homo sapiens
  Payload ID: 19975
  Gene Name: zinc finger protein 492
  Uniprot ID: Q9P255
  ENSP ID: ENSP00000413660
MLENYRNLVFVGIAASKPDLITCLEQGKEPWNVKRHEMVAEPPVVCSYFARDLWPKQGKKNYFQKVILRRYKKCGCENLQLRKYCKSMDECKVHKECYNGLNQCLTTTQNKIFQCDKYVKVFHKFSNSNRHTIRHTGKKSFKCKECEKSFCMLSHLAQHKRIHSGEKPYKCKECGKAYNETSNLSTHKRIHTGKKPYKCEECGKAFNRLSHLTTHKIIHTGKKPYKCEECGKAFNQSANLTTHKRIHTGEKPYKCEECGRAFSQSSTLTAHKIIHAGEKPYKCEECGKAFSQSSTLTTHKIIHTGEKFYKCEECGKAFSQLSHLTTHKRIHSGEKPYKCEECGKAFKQSSTLTTHKRIHAGEKFYKCEVCSKAFSRFSHLTTHKRIHTGEKPYKCEECGKAFNLSSQLTTHKIIHTGEKPYKCEECGKAFNQSSTLSKHKVIHTGEKPYKYEECGKAFNQSSHLTTHKMIHTGEKPYKCEECGKAFNNSSILNRHKMIHTGEKLYKPESCNNACDNIAKISKYKRNCAGEK

SEQ ID NO: 100242 - protein, 103 aa, Homo sapiens
  Payload ID: 19976
  Gene Name: zinc finger protein 493
  Uniprot ID: Q6ZR52
  ENSP ID: ENSP00000340651
MPGPPESLDMGPLTFRDVAIEFSLEEWQCLDTAQQDLYRKVMLENYRNLVFLAGIAVSKPDLVTCLEQGKDPWNMKGHSTVVKPPVETGFHRFSQDGLYLLTS

SEQ ID NO: 100243 - protein, 646 aa, Homo sapiens
  Payload ID: 19976
  Gene Name: zinc finger protein 493
  Uniprot ID: Q6ZR52
  ENSP ID: ENSP00000347691
MNECNVHKEGYNELNQYLTTTQSKIFQCDKYVKVFHKLLNSNRHNTKHTGKKPFKCKKCGKSFCMLLHLCQHKRIHIRENSYRCEECGKAFIWFSTLTRHRRVHTGEKSYKYECGKSFNQDSNLTTHKRIHTGQKPYKCEECGTSFYQFSYLTRHKLIHTREKPYKCEQYGKTFNQSSTLTGHKIIHNGEKPYKCEECGKAFSIFSTPTKHKIIHTEEKSHRCEEYCKAYKESSHLTTHKRIHTGEKPYKCEECGKAFSIFSTLTKHKIIHTEEKSHRCEECGKAYKESSHLTTHKRIHTGEKPYKCEECGKTFSVFSILTKHKIIHTEEKPYKCEECGKAFKRSSTLTKHRIIHTEEKPYKCEECGKAFNQSSTLSIHKIIHTGEKPYKCEECGKAFKRSSTLTIHKMIHTGEKPYKCEECGKAFNRSSHLTTHKRIHTGHKPYKCKECGKSFSVFSTLTKHKIIHTDKKPYKCEECGKAFNRSSILSIHKKIHTGEKPYKCEECGKAFKRSSHLAGHKQIHSVQKPYKCEECGKAFSIFSTLTKHKIIHTEEKPYKCEKCGKTFYRFSNLNTHKIIHTGEKPCKCEECGKAFNHSSNLIKHKLIHTGDKPYKCEACGKAFRRSSHLSRHKIIHIGIHTEETVQK

SEQ ID NO: 100244 - protein, 774 aa, Homo sapiens
  Payload ID: 19976
  Gene Name: zinc finger protein 493
  Uniprot ID: Q6ZR52
  ENSP ID: ENSP00000376110
MPGPPESLDMGPLTFRDVAIEFSLEEWQCLDTAQQDLYRKVMLENYRNLVFLGIAVSKPDLVTCLEQGKDPWNMKGHSTVVKPPVICSHFAEDFCPGPGIKDSFQKVILREYVKCGHKDLQLRKGCKSMNECNVHKEGYNELNQYLTTTQSKIFQCDKYVKVFHKLLNSNRHNTKHTGKKPFKCKKCGKSFCMLLHLCQHKRIHIRENSYRCEECGKAFIWFSTLTRHRRVHTGEKSYKYECGKSFNQDSNLTTHKRIHTGQKPYKCEECGTSFYQFSYLTRHKLIHTREKPYKCEQYGKTFNQSSTLTGHKIIHNGEKPYKCEECGKAFSIFSTPTKHKIIHTEEKSHRCEEYCKAYKESSHLTTHKRIHTGEKPYKCEECGKAFSIFSTLTKHKIIHTEEKSHRCEECGKAYKESSHLTTHKRIHTGEKPYKCEECGKTFSVFSILTKHKIIHTEEKPYKCEECGKAFKRSSTLTKHRIIHTEEKPYKCEECGKAFNQSSTLSIHKIIHTGEKPYKCEECGKAFKRSSTLTIHKMIHTGEKPYKCEECGKAFNRSSHLTTHKRIHTGHKPYKCKECGKSFSVFSTLTKHKIIHTDKKPYKCEECGKAFNRSSILSIHKKIHTGEKPYKCEECGKAFKRSSHLAGHKQIHSVQKPYKCEECGKAFSIFSTLTKHKIIHTEEKPYKCEKCGKTFYRFSNLNTHKIIHTGEKPCKCEECGKAFNHSSNLIKHKLIHTGDKPYKCEACGKAFRRSSHLSRHKIIHIGIHTEETVQK

SEQ ID NO: 100245 - protein, 48 aa, Homo sapiens
  Payload ID: 19976
  Gene Name: zinc finger protein 493
  ENSP ID: ENSP00000469170
MPGPPESLDMVRVLGPTSRERGRSCSEPVGSGCGGTQASPQSAPQSAP

SEQ ID NO: 100246 - protein, 95 aa, Homo sapiens
  Payload ID: 19976
  Gene Name: zinc finger protein 493
  ENSP ID: ENSP00000469368
MPGPPESLDMGPLTFRDVAIEFSLEEWQCLDTAQQDLYRKVMLENYRNLVFLAGIAVSKPDLVTCLEQGKDPWNMKGHSTVVKPPGFLPPSVTAS

SEQ ID NO: 100247 - protein, 94 aa, Homo sapiens
  Payload ID: 19976
  Gene Name: zinc finger protein 493
  ENSP ID: ENSP00000469680
MPGPPESLDMGPLTFRDVAIEFSLEEWQCLDTAQQDLYRKVMLENYRNLVFLGIAVSKPDLVTCLEQGKDPWNMKGHSTVVKPPGFLPPSVTAS

SEQ ID NO: 100248 - protein, 48 aa, Homo sapiens; identical to SEQ ID NO: 100245
  Payload ID: 19976
  Gene Name: zinc finger protein 493
  ENSP ID: ENSP00000472110

SEQ ID NO: 100249 - protein, 587 aa, Homo sapiens
  Payload ID: 19977
  Gene Name: zinc finger protein 496
  Uniprot ID: Q96IT1
  ENSP ID: ENSP00000294753
MPTALCPRVLAPKESEEPRKMRSPPGENPSPQGELPSPESSRRLFRRFRYQEAAGPREALQRLWDLCGGWLRPERHTKEQILELLVLEQFLAILPREIQSWVRAQEPESGEQAVAAVEALEREPGRPWQWLKHCEDPVVIDDGDSPLDQEQEQLPVEPHSDLAKNQDAQPITLAQCLGLPSRPPSQLSGDPVLQDAFLLQEENVRDTQQVTTLQLPPSRVSPFKDMILCFSEEDWSLLDPAQTGFYGEFIIGEDYGVSMPPNDLAAQPDLSQGEENEPRVPELQDLQGKEVPQVSYLDSPSLQPFQVEERRKREELQVPEFQACPQTVVPQNTYPAGGNPRSLENSLDEEVTIEIVLSSSGDEDSQHGPYCTEELGSPTEKQRSLPASHRSSTEAGGEVQTSKKSYVCPNCGKIFRWRVNFIRHLRSRREQEKPHECSVCGELFSDSEDLDGHLESHEAQKPYRCGACGKSFRLNSHLLSHRRIHLQPDRLQPVEKREQAASEDADKGPKEPLENGKAKLSFQCCECGKAFQRHDHLARHRSHFHLKDKARPFQCRYCVKSFTQNYDLLRHERLHMKRRSKQALNSY

SEQ ID NO: 100250 - protein, 512 aa, Homo sapiens
  Payload ID: 19977
  Gene Name: zinc finger protein 496
  ENSP ID: ENSP00000473324
QAVAAVEALEREPGRPWQWLKHCEDPVVIDDGDSPLDQEQEQLPVEPHSDLAKNQDAQPITLAQCLGLPSRPPSQLSGDPVLQDAFLLQEENVRDTQQVTTLQLPPRIFQFNNHRSNGYILEMLGSGGKKAQIISVLSQIYVSRVSPFKDMILCFSEEDWSLLDPAQTGFYGEFIIGEDYGVSMPPNDLAAQPDLSQGEENEPRVPELQDLQGKEVPQVSYLDSPSLQPFQVEERRKREELQVPEFQACPQTVVPQNTYPAGGNPRSLENSLDEEVTIEIVLSSSGDEDSQHGPYCTEELGSPTEKQRSLPASHRSSTEAGGEVQTSKKSYVCPNCGKIFRWRVNFIRHLRSRREQEKPHECSVCGELFSDSEDLDGHLESHEAQKPYRCGACGKSFRLNSHLLSHRRIHLQPDRLQPVEKREQAASEDADKGPKEPLENGKAKLSFQCCECGKAFQRHDHLARHRSHFHLKDKARPFQCRYCVKSFTQNYDLLRHERLHMKRRSKQALNSY

SEQ ID NO: 100251 - protein, 498 aa, Homo sapiens
  Payload ID: 19978
  Gene Name: zinc finger protein 497
  Uniprot ID: Q6ZNH5
  ENSP ID: ENSP00000311183
MESPRGWTLQVAPEEGQVLCNVKTATRGLSEGAVSGGWGAWENSTEVPREAGDGQRQQATLGAADEQGGPGRELGPADGGRDGAGPRSEPADRALRPSPLPEEPGCRCGECGKAFSQGSYLLQHRRVHTGEKPYTCPECGKAFAWSSNLSQHQRIHSGEKPYACRECGKAFRAHSQLIHHQETHSGLKPFRCPDCGKSFGRSTTLVQHRRTHTGEKPYECPECGKAFSWNSNFLEHRRVHTGARPHACRDCGKAFSQSSNLAEHLKIHAGARPHACPDCGKAFVRVAGLRQHRRTHSSEKPFPCAECGKAFRESSQLLQHQRTHTGERPFECAECGQAFVMGSYLAEHRRVHTGEKPHACAQCGKAFSQRSNLLSHRRTHSGAKPFACADCGKAFRGSSGLAHHRLSHTGERPFACAECGKAFRGSSELRQHQRLHSGERPFVCAHCSKAFVRKSELLSHRRTHTGERPYACGECGKPFSHRCNLNEHQKRHGGRAAP

SEQ ID NO: 100252 - protein, 498 aa, Homo sapiens; identical to SEQ ID NO: 100251
  Payload ID: 19978
  Gene Name: zinc finger protein 497
  Uniprot ID: Q6ZNH5
  ENSP ID: ENSP00000402815

SEQ ID NO: 100253 - protein, 108 aa, Homo sapiens
  Payload ID: 19978
  Gene Name: zinc finger protein 497
  ENSP ID: ENSP00000471650
METGPSCSSQTGVSTFLTLGAPPCEARRGEWCHSRASAGHRREMESPRGWTLQVAPEEGQVLCNVKTATRGLSEGAVSGGWGAWENSTEVPREAGDGQRQQATLGAAD

SEQ ID NO: 100254 - protein, 480 aa, Homo sapiens
  Payload ID: 19979
  Gene Name: zinc finger protein 500
  Uniprot ID: O60304
  ENSP ID: ENSP00000219478
MATVPGLQPLPTLEQDLEQEEILIVKVEEDFCLEEEPSVETEDPSPETFRQLFRLFCYQEVAGPREALSRLWELCCRWLRPELRTKEQILELLVLEQFLTVLPGEIQARVREQQPESGEEAVVLVEGLQRKPRKHRQRGSELLSDDEVPLGIGGQFLKHQAEAQPEDLSLEEEARFSSQQPPAQLSHRPQRGPLLWPERGPPAPRHQEMASASPFLSAWSQVPVNLEDVAVYLSGEEPRCMDPAQRDAPLENEGPGIQLEDGGDGREDAPLRMEWYRVLSARCQGPGHPLPGQRPAPVRGLVRPDQPRGGPPPGRRASHGADKPYTCPECGKGFSKTSHLTKHQRTHTGERPYKCLVCGKGFSDRSNFSTHQRVHTGEKPYPCPECGKRFSQSSSLVIHRRTHSGERPYACTQCGKRFNNSSHFSAHRRTHTGEKPYTCPACGRGFRRGTDLHKHQRTHMGAGSLPTLQPVAPGGPGAKA

SEQ ID NO: 100255 - protein, 441 aa, Homo sapiens
  Payload ID: 19979
  Gene Name: zinc finger protein 500
  Uniprot ID: O60304
  ENSP ID: ENSP00000445714
MATVPGLQPLPTLEQDLEQEEILIVKVEEDFCLEEEPSVETEDPSPETFRQLFRLFCYQEVAGPREALSRLWELCCRWLRPELRTKEQILELLVLEQFLTVLPGEIQARVREQQPESGEEAVVLVEGLQRKPRKHRQRGSELLSDDEVPLGIGGQFLKHQAEAQPEDLSLEEEARFSSQQPPAQLSHRPQRGPLLWPERGPPAPRHQEMASASPFLSAWSQVPVNLEDVAVYLSGEEPRCMDPAQRDAPLENEGPGIQLEDGGDGREDAPLRMEWYRVLSARCQGPGHPLPGQRPAPVRGLVRPDQPRGGPPPGRRASHGADKPYTCPECGKGFSKTSHLTKHQRTHTGERPYKCLVCGKGFSDRSNFSTHQRVHTGEKPYPCPECGKRFSQSSSLVIHRRTHSGERPYACTQCGKRFNNSSHFSAHRRTHTGHILRSGCT

SEQ ID NO: 100256 - protein, 92 aa, Homo sapiens
  Payload ID: 19979
  Gene Name: zinc finger protein 500
  ENSP ID: ENSP00000464747
MEWYRVLSARCQGPGHPLPGQRPAPVRGLVRPDQPRGGPPPGRRASHGADKPYTCPECGKGFSKTSHLTKHQRTHTGERPYKCLVCGKGFSD

SEQ ID NO: 100257 - protein, 73 aa, Homo sapiens
  Payload ID: 19979
  Gene Name: zinc finger protein 500
  ENSP ID: ENSP00000465073
  MOD_RES (1)..(1): Any amino acid
XSSTAGHTAGSGPMPAPSAGSASTTARTSAPTAGRTQVKKRKRKQILVTPLSKSSLKARLAAHSAIIPALWKA

SEQ ID NO: 100258 - protein, 142 aa, Homo sapiens
  Payload ID: 19979
  Gene Name: zinc finger protein 500
  ENSP ID: ENSP00000466375
MATVPGLQPLPTLEQDLEQEEILIVKVEEDFCLEEEPSVETEDPSPETFRQLFRLFCYQEVAGPREALSRLWELCCRWLRPELRTKEQILELLVLEQFLTVLPGEIQARVREQQPESGEEAVVLVEGLQRKPRKHRQRGDSS

SEQ ID NO: 100259 - protein, 121 aa, Homo sapiens
  Payload ID: 19979
  Gene Name: zinc finger protein 500
  ENSP ID: ENSP00000467598
MATVPGLQPLPTLEQDLEQEEILIVKVEEDFCLEEEPSVETEDPSPETFRQLFRLFCYQEVAGPREALSRLWELCCRWLRPELRTKEQILELLVLEQFLTVLPGEIQARVREQQPESGEEA

SEQ ID NO: 100260 - protein, 25 aa, Homo sapiens
  Payload ID: 19979
  Gene Name: zinc finger protein 500
  ENSP ID: ENSP00000468393
MATVPGLQPLPTLEQDLEQEEILIV

SEQ ID NO: 100261 - protein, 271 aa, Homo sapiens
  Payload ID: 19980
  Gene Name: zinc finger protein 501
  Uniprot ID: Q96CX3
  ENSP ID: ENSP00000379363
MNSSQISLRMKHGRVNMQKKPSKCSECGKFFTQRSSLTQHQRIHRGEKPYVCSECGSCFRKQSNLTQHLRIHTGEKPYKCNECEKAFQTKAILVQHLRIHTGEKPYKCNECGKAFCQSPSLIKHQRIHTGEKPYKCTECGKAFSQSICLTRHQRSHSGDKPFKCNECGKAFNQSACLMQHQRIHSGEKPYTCTECGKAFTQNSSLVEHERTHTGEKLYKCSECEKTFRKQAHLSEHYRIHTGEKPYECVGCGKSFRHSSALLRHQRLHAGE

SEQ ID NO: 100262 - protein, 271 aa, Homo sapiens; identical to SEQ ID NO: 100261
  Payload ID: 19980
  Gene Name: zinc finger protein 501
  Uniprot ID: Q96CX3
  ENSP ID: ENSP00000482632

SEQ ID NO: 100263 - protein, 271 aa, Homo sapiens; identical to SEQ ID NO: 100261
  Payload ID: 19980
  Gene Name: Zinc finger protein 501
  ENSP ID: ENSP00000485862

SEQ ID NO: 100264 - protein, 271 aa, Homo sapiens; identical to SEQ ID NO: 100261
  Payload ID: 19980
  Gene Name: Zinc finger protein 501
  ENSP ID: ENSP00000487032

SEQ ID NO: 100265 - protein, 544 aa, Homo sapiens
  Payload ID: 19981
  Gene Name: zinc finger protein 502
  Uniprot ID: Q8TBZ5
  ENSP ID: ENSP00000296091
MLNMQGAEERDIRRETCPGWVNKNKPALEQDVCKIDSSGIVVKRFQEDEYQDSTFEEKYACEGMKENSPREIAESCLFQEGGFGRITFIHKEAPPEIISQGYNFEKSLLLTSSLVTRLRVSTEESLHQWETSNIQTNDISDQSKCPTLCTQKKSWKCNECGKTFTQSSSLTQHQRTHTGERPYTCEECGKAFSRSSFLVQHQRIHTGVKPYGCEQCGKTFRCRSFLTQHQRIHTGEKPYKCNECGNSFRNHSHLTEHQRIHTGEKPYKCNRCGKAFNQNTHLIHHQRIHTGEKPYICSECGSSFRKHSNLTQHQRIHTGEKPHKCDECGKTFQTKANLSQHQRIHSGEKPYKCKECGKAFCQSPSLIKHQRIHTGEKPYKCKECGKAFTQSTPLTKHQRIHTGERPYKCSECGKAFIQSICLIRHQRSHTGEKPYKCNECGKGFNQNTCLTQHMRIHTGEKPYKCKECGKAFAHSSSLTEHHRTHTGEKLYKCSECEKTFRKYAHLSEHYRIHTGEKPYECIECGKFFRHSSVLFRHQKLHSGD

SEQ ID NO: 100266 - protein, 544 aa, Homo sapiens; identical to SEQ ID NO: 100265
  Payload ID: 19981
  Gene Name: zinc finger protein 502
  Uniprot ID: Q8TBZ5
  ENSP ID: ENSP00000397390

SEQ ID NO: 100267 - protein, 155 aa, Homo sapiens
  Payload ID: 19981
  Gene Name: zinc finger protein 502
  ENSP ID: ENSP00000401717
MLNMQGAEERDIRRETCPGWVNKNKPALEQDVCKIDSSGIVVKRFQEDEYQDSTFEEKYACEGMKENSPREIAESCLFQEGGFGRITFIHKEAPPEIISQGYNFEKSLLLTSSLVTRLRVSTEESLHQWETSNIQTNDISDQSKCPTLCTQKKSW

SEQ ID NO: 100268 - protein, 544 aa, Homo sapiens; identical to SEQ ID NO: 100265
  Payload ID: 19981
  Gene Name: zinc finger protein 502
  Uniprot ID: Q8TBZ5
  ENSP ID: ENSP00000406469

SEQ ID NO: 100269 - protein, 544 aa, Homo sapiens; identical to SEQ ID NO: 100265
  Payload ID: 19981
  Gene Name: Zinc finger protein 502
  ENSP ID: ENSP00000485847

SEQ ID NO: 100270 - protein, 544 aa, Homo sapiens; identical to SEQ ID NO: 100265
  Payload ID: 19981
  Gene Name: Zinc finger protein 502
  ENSP ID: ENSP00000486576

SEQ ID NO: 100271 - protein, 544 aa, Homo sapiens; identical to SEQ ID NO: 100265
  Payload ID: 19981
  Gene Name: Zinc finger protein 502
  ENSP ID: ENSP00000487139

SEQ ID NO: 100272 - protein, 155 aa, Homo sapiens; identical to SEQ ID NO: 100267
  Payload ID: 19981
  Gene Name: Zinc finger protein 502
  ENSP ID: ENSP00000487297

SEQ ID NO: 100273 - protein, 646 aa, Homo sapiens
  Payload ID: 19982
  Gene Name: zinc finger protein 503
  Uniprot ID: Q96F45
  ENSP ID: ENSP00000361602
MSTAPSLSALRSSKHSGGGGGGGGGGGADPAWTSALSGNSSGPGPGSSPAGSTKPFVHAVPPSDPLRQANRLPIKVLKMLTARTGHILHPEYLQPLPSTPVSPIELDAKKSPLALLAQTCSQIGKPDPSPSSKLSSVASNGGGAGGAGGGAAGDKDTKSGPLKLSDIGVEDKSSFKPYSKPGSDKKEPGGGGGGGGGGGGGGGGVSSEKSGFRVPSATCQPFTPRTGSPSSSASACSPGGMLSSAGGAPEGKDDKKDTDVGGGGKGTGGASAEGGPTGLAHGRISCGGGINVDVNQHPDGGPGGKALGSDCGGSSGSSSGSGPSAPTSSSVLGSGLVAPVSPYKPGQTVFPLPPAGMTYPGSLAGAYAGYPPQFLPHGVALDPTKPGSLVGAQLAAAAAGSLGCSKPAGSSPLAGASPPSVMTASLCRDPYCLSYHCASHLAGAAAASASCAHDPAAAAAALKSGYPLVYPTHPLHGVHSSLTAAAAAGATPPSLAGHPLYPYGFMLPNDPLPHICNWVSANGPCDKRFATSEELLSHLRTHTAFPGTDKLLSGYPSSSSLASAAAAAMACHMHIPTSGAPGSPGTLALRSPHHALGLSSRYHPYSKSPLPTPGAPVPVPAATGPYYSPYALYGQRLTTASALGYQ

SEQ ID NO: 100274 - protein, 283 aa, Homo sapiens
  Payload ID: 19982
  Gene Name: zinc finger protein 503
  ENSP ID: ENSP00000438988
MSTAPSLSALRSSKHSGGGGGGGGGGGADPAWTSALSGNSSGPGPGSSPAGSTKPFVHAVPPSDPLRQANRLPIKVLKMLTARTGHILHPEYLQPLPSTPVSPIELDAKKSPLALLAQTCSQIGKPDPSPALAGHPLYPYGFMLPNDPLPHICNWVSANGPCDKRFATSEELLSHLRTHTAFPGTDKLLSGYPSSSSLASAAAAAMACHMHIPTSGAPGSPGTLALRSPHHALGLSSRYHPYSKSPLPTPGAPVPVPAATGPYYSPYALYGQRLTTASALGYQ

SEQ ID NO: 100275 - protein, 444 aa, Homo sapiens
  Payload ID: 19983
  Gene Name: zinc finger protein 506
  Uniprot ID: Q5JVG8
  ENSP ID: ENSP00000393835
MGPLQFRDVAIEFSLEEWHCLDAAQRNLYRDVMLENYRNLIFLGIVVSKPNLITCLEQGKKPLTMKRHEMIAKPPVMYSHFAQDLWSEQSIKDSFQKVILRRYEKCRHDNLQLKKGCESVDECPVHKRGYNGLKQCLATTQRKIFQCDEYVKFLHKFSNSNKHKIRDTGKKSFKCIEYGKTFNQSSTRTTYKKIDAGEKRYKCEECGKAYKQSSHLTTHKKIHTGEKPYKCEECGKAYKQSCNLTTHKIIHTGEKPYRCRECGKAFNHPATLFSHKKIHTGEKPYKCDKCGKAFISSSTLTKHEIIHTGEKPYKCEECGKAFNRSSNLTKHKRIHTGDVPYKCDECGKTFTWYSSLSKHKRAHTGEKPYKCEECGKAFTAFSTLTEHKIIHTGEKPYKCEECGKAFNWSSALNKHKKIHIRQKPCIVKNVENLLNVPQPLISIR

SEQ ID NO: 100276 - protein, 412 aa, Homo sapiens
  Payload ID: 19983
  Gene Name: zinc finger protein 506
  Uniprot ID: Q5JVG8
  ENSP ID: ENSP00000408892
MGPLQFRDVAIEFSLEEWHCLDAAQRNLYRDVMLENYRNLIFLVMYSHFAQDLWSEQSIKDSFQKVILRRYEKCRHDNLQLKKGCESVDECPVHKRGYNGLKQCLATTQRKIFQCDEYVKFLHKFSNSNKHKIRDTGKKSFKCIEYGKTFNQSSTRTTYKKIDAGEKRYKCEECGKAYKQSSHLTTHKKIHTGEKPYKCEECGKAYKQSCNLTTHKIIHTGEKPYRCRECGKAFNHPATLFSHKKIHTGEKPYKCDKCGKAFISSSTLTKHEIIHTGEKPYKCEECGKAFNRSSNLTKHKRIHTGDVPYKCDECGKTFTWYSSLSKHKRAHTGEKPYKCEECGKAFTAFSTLTEHKIIHTGEKPYKCEECGKAFNWSSALNKHKKIHIRQKPCIVKNVENLLNVPQPLISIR

SEQ ID NO: 100277 - protein, 444 aa, Homo sapiens; identical to SEQ ID NO: 100275
  Payload ID: 19983
  Gene Name: zinc finger protein 506
  Uniprot ID: Q5JVG8
  ENSP ID: ENSP00000440625

SEQ ID NO: 100278 - protein, 78 aa, Homo sapiens
  Payload ID: 19983
  Gene Name: zinc finger protein 506
  ENSP ID: ENSP00000445149
MGPLQFRDVAIEFSLEEWHCLDAAQRNLYRDVMLENYRNLIFLGIVVSKPNLITCLEQGKKPLTMKRHEMIAKPPGGL

SEQ ID NO: 100279 - protein, 137 aa, Homo sapiens
  Payload ID: 19983
  Gene Name: zinc finger protein 506
  ENSP ID: ENSP00000464733
MGPLQFRDVAIEFSLEEWHCLDAAQRNLYRDVMLENYRNLIFLGIVVSKPNLITCLEQGKKPLTMKRHEMIAKPPDGVSVFHPGWSAVARSRLTATSTSQVDCLRSGVQDHPGQHSETPSEEALLSRGHSLWMNKVH

SEQ ID NO: 100280 - protein, 92 aa, Homo sapiens
  Payload ID: 19983
  Gene Name: zinc finger protein 506
  ENSP ID: ENSP00000464837
MGPLQFRDVAIEFSLEEWHCLDAAQRNLYRDVMLENYRNLIFLGIVVSKPNLITCLEQGKKPLTMKRHEMIAKPPETGFHRVSQDGLHLLTL

SEQ ID NO: 100281 - protein, 107 aa, Homo sapiens
  Payload ID: 19983
  Gene Name: zinc finger protein 506
  ENSP ID: ENSP00000467047
MGPLQFRDVAIEFSLEEWHCLDAAQRNLYRDVMLENYRNLIFLGIVVSKPNLITCLEQGKKPLTMKRHEMIAKPPDGVSVFHPGCSELRSRHCIPVWATEQDSISKK

SEQ ID NO: 100282 - protein, 444 aa, Homo sapiens; identical to SEQ ID NO: 100275
  Payload ID: 19983
  Gene Name: zinc finger protein 506
  Uniprot ID: Q5JVG8
  ENSP ID: ENSP00000468150

SEQ ID NO: 100283 - protein, 148 aa, Homo sapiens
  Payload ID: 19983
  Gene Name: zinc finger protein 506
  ENSP ID: ENSP00000468206
MYSHFAQDLWSEQSIKDSFQKVILRRYEKCRHDNLQLKKGCESVDECPVHKRGYNGLKQCLATTQRKIFQCDEYVKFLHKFSNSNKHKIRDTGKKSFKCIEYGKTFNQSSTRTTYKKIDAGEKRYKCEECGKAYKQSSHLTTHKKIHT

SEQ ID NO: 100284 - protein, 108 aa, Homo sapiens
  Payload ID: 19983
  Gene Name: zinc finger protein 506
  ENSP ID: ENSP00000468217
MGPLQFRDVAIEFSLEEWHCLDAAQRNLYRDVMLENYRNLIFLGIVVSKPNLITCLEQGKKPLTMKRHEMIAKPPGQARWLMPIIPALWRAKAGGSSEVRSSRKSGGP

SEQ ID NO: 100285 - protein, 953 aa, Homo sapiens
  Payload ID: 19984
  Gene Name: zinc finger protein 507
  Uniprot ID: Q8TCN5
  ENSP ID: ENSP00000312277
MEESSSVAMLVPDIGEQEAILTAESIISPSLEIDEQRKTKPDPLIHVIQKLSKIVENEKSQKCLLIGKKRPRSSAATHSLETQELCEIPAKVIQSPAADTRRAEMSQTNFTPDTLAQNEGKAMSYQCSLCKFLSSSFSVLKDHIKQHGQQNEVILMCSECHITSRSQEELEAHVVNDHDNDANIHTQSKAQQCVSPSSSLCRKTTERNETIPDIPVSVDNLQTHTVQTASVAEMGRRKWYAYEQYGMYRCLFCSYTCGQQRMLKTHAWKHAGEVDCSYPIFENENEPLGLLDSSAAAAPGGVDAVVIAIGESELSIHNGPSVQVQICSSEQLSSSSPLEQSAERGVHLSQSVTLDPNEEEMLEVISDAEENLIPDSLLTSAQKIISSSPNKKGHVNVIVERLPSAEETLSQKRFLMNTEMEEGKDLSLTEAQIGREGMDDVYRADKCTVDIGGLIIGWSSSEKKDELMNKGLATDENAPPGRRRTNSESLRLHSLAAEALVTMPIRAAELTRANLGHYGDINLLDPDTSQRQVDSTLAAYSKMMSPLKNSSDGLTSLNQSNSTLVALPEGRQELSDGQVKTGISMSLLTVIEKLRERTDQNASDDDILKELQDNAQCQPNSDTSLSGNNVVEYIPNAERPYRCRLCHYTSGNKGYIKQHLRVHRQRQPYQCPICEHIADNSKDLESHMIHHCKTRIYQCKQCEESFHYKSQLRNHEREQHSLPDTLSIATSNEPRISSDTADGKCVQEGNKSSVQKQYRCDVCDYTSTTYVGVRNHRRIHNSDKPYRCSLCGYVCSHPPSLKSHMWKHASDQNYNYEQVNKAINDAISQSGRVLGKSPGKTQLKSSEESADPVTGSSENAVSSSELMSQTPSEVLGTNENEKLSPTSNTSYSLEKISSLAPPSMEYCVLLFCCCICGFESTSKENLLDHMKEHEGEIVNIILNKDHNTALNTN

SEQ ID NO: 100286 - protein, 953 aa, Homo sapiens; identical to SEQ ID NO: 100285
  Payload ID: 19984
  Gene Name: zinc finger protein 507
  Uniprot ID: Q8TCN5
  ENSP ID: ENSP00000348162

SEQ ID NO: 100287 - protein, 957 aa, Homo sapiens
  Payload ID: 19984
  Gene Name: zinc finger protein 507
  ENSP ID: ENSP00000441549
MEESSSVAMLVPDIGEQEAILTAESIISPSLEIDEQRKTKPDPLIHVIQKLSKIVENEKSQKCLLIGKKRPRSSAATHSLETQELCEIPAKVIQSPAADTRRAEMSQTNFTPDTLAQNEGKAMSYQCSLCKFLSSSFSVLKDHIKQHGQQNEVILMCSECHITSRSQEELEAHVVNDHDNDANIHTQSKAQQCVSPSSSLCRKTTERNETIPDIPVSVDNLQTHTVQTASVAEMGRRKWYAYEQYGMYRCLFCSYTCGQQRMLKTHAWKHAGEVDCSYPIFENENEPLGLLDSSAAAAPGGVDAVVIAIGESELSIHNGPSVQVQICSSEQLSSSSPLEQSAERGVHLSQSVTLDPNEEEMLEVISDAEENLIPDSLLTSAQKIISSSPNKKGHVNVIVERLPSAEETLSQKRFLMNTEMEEGKDLSLTEAQIGREGMDDVYRADKCTVDIGGLIIGWSSSEKKDELMNKGLATDENAPPGRRRTNSESLRLHSLAAEALVTMPIRAAELTRANLGHYGDINLLDPDTSQRQVDSTLAAYSKMMSPLKNSSDGLTSLNQSNSTLVALPEGRQELSDGQVKTGISMSLLTVIEKLRERTDQNASDDDILKELQDNAQCQPNSDTSLSGNNVVEYIPNAERPYRCRLCHYTSGNKGYIKQHLRVHRQRQPYQCPICEHIADNSKDLESHMIHHCKTRIYQCKQCEESFHYKSQLRNHEREQHSLPDTLSIATSNEPRISSDTADGKCVQEGNKSSVQKQYRCDVCDYTSTTYVGVRNHRRIHNSDKPYRKEFRCSLCGYVCSHPPSLKSHMWKHASDQNYNYEQVNKAINDAISQSGRVLGKSPGKTQLKSSEESADPVTGSSENAVSSSELMSQTPSEVLGTNENEKLSPTSNTSYSLEKISSLAPPSMEYCVLLFCCCICGFESTSKENLLDHMKEHEGEIVNIILNKDHNTALNTN

SEQ ID NO: 100288 - protein, 683 aa, Homo sapiens
  Payload ID: 19985
  Gene Name: zinc finger protein 510
  Uniprot ID: Q9Y2H8
  ENSP ID: ENSP00000223428
MSPHPEAITDCVTLNTVGQLAEGGYPLRFSTLFQEQQKMNISQASVSFKDVTIEFTQEEWQQMAPVQKNLYRDVMLENYSNLVSVGYCCFKPEVIFKLEQGEEPWFSEEEFSNQSHPKDYRGDDLIKQNKKIKDKHLEQAICINNKTLTTEEEKVLGKPFTLHVAAVASTKMSCKCNSWEVNLQSISEFIINNRNYSTKKIGCGNVCENSPFKINFEKTQTGEKFYEHNKNMKALNYNENLPKHPKFQTLEQAFECNKIGKAFNDKANCVKHNSSHTGETSSKDDEFRKNCDKKTLFDHRRTGTGKKHLHLNQCGKSFEKSTVEEYNKLNMGIKHYELNPSGNNFNRKAHLTDPQTAVIEENPLVSNDRTQTWVKSSEYHENKKSYQTSVHRVRRRSHSMMKPYKCNECGKSFCQKGHLIQHQRTHTGEKPFECSECGKTFSQKSHLSTHQRIHTAEKPYKCNECGKTFVQKSTLRGHQRIHTGEKPYECSECGKTFVQKSTLRDHHRIHTGEKSFQCNQCGKTFGQKSNLRIHQRTHTGEKTYQCNECEKSFWRKDHLIQHQKTHTGEKPFKCNECGKTFARTSTLRVHQRIHTGEKPFKCNECGKKFVRKAILSDHQRIHTGEKPFQCNKCGKTFGQKSNLRIHQRTHSGEKSYECNEYGKLCKKSTLSLYQKIQGEGNPY

SEQ ID NO: 100289 - protein, 134 aa, Homo sapiens
  Payload ID: 19985
  Gene Name: zinc finger protein 510
  ENSP ID: ENSP00000363772
MSPHPEAITDCVTLNTVGQLAEGGYPLRFSTLFQEQQKMNISQASVSFKDVTIEFTQEEWQQMAPVQKNLYRDVMLENYSNLVSVGYCCFKPEVIFKLEQGEEPWFSEEEFSNQSHPSELLSSSRHNSAGVVRL

SEQ ID NO: 100290 - protein, 683 aa, Homo sapiens; identical to SEQ ID NO: 100288
  Payload ID: 19985
  Gene Name: zinc finger protein 510
  Uniprot ID: Q9Y2H8
  ENSP ID: ENSP00000364379

SEQ ID NO: 100291 - protein, 262 aa, Homo sapiens
  Payload ID: 19986
  Gene Name: zinc finger protein 511
  Uniprot ID: Q8NB15
  ENSP ID: ENSP00000351929
MQLPPALCARLAAGPGAAEPLPVERDPAAGAAPFRFVARPVRFPREHQFFEDGDVQRHLYLQDVIMQVADVPEKPRVPAFACQVAGCCQVFDALDDYEHHYHTLHGNVCSFCKRAFPSGHLLDAHILEWHDSLFQILSERQDMYQCLVEGCTEKFKTSRDRKDHMVRMHLYPADFRFDKPKKSRSPASAEAPGDSGERSEGEAMEICSEPVAASPAPAGERRIYRHRSVSELFLKPVLNMCSVLRILGCTWAAALLILNSER

SEQ ID NO: 100292 - protein, 252 aa, Homo sapiens
  Payload ID: 19986
  Gene Name: zinc finger protein 511
  Uniprot ID: Q8NB15
  ENSP ID: ENSP00000355251
MQLPPALCARLAAGPGAAEPLPVERDPAAGAAPFRFVARPVRFPREHQFFEDGDVQRHLYLQDVIMQVADVPEKPRVPAFACQVAGCCQVFDALDDYEHHYHTLHGNVCSFCKRAFPSGHLLDAHILEWHDSLFQILSERQDMYQCLVEGCTEKFKTSRDRKDHMVRMHLYPADFRFDKPKKSRSPASAEAPGDSGERSEGEAMEICSEPVAASPAPAGERRIYRHRIPSTICFGQGAARGFKSNKKKTKQC

SEQ ID NO: 100293 - protein, 567 aa, Homo sapiens
  Payload ID: 19987
  Gene Name: zinc finger protein 512
  Uniprot ID: Q96ME7
  ENSP ID: ENSP00000347648
MSSRLGAVPATSGPTTFKQQRSTRIVGAKNSRTQCSIKDNSFQYTIPHDDSLSGSSSASSCEPVSDFPASFRKSTYWMKMRRIKPAATSHVEGSGGVSAKGKRKPRQEEDEDYREFPQKKHKLYGRKQRPKTQPNPKSQARRIRKEPPVYAAGSLEEQWYLEIVDKGSVSCPTCQAVGRKTIEGLKKHMENCKQEMFTCHHCGKQLRSLAGMKYHVMANHNSLPILKAGDEIDEPSERERLRTVLKRLGKLRCMRESCSSSFTSIMGYLYHVRKCGKGAAELEKMTLKCHHCGKPYRSKAGLAYHLRSEHGPISFFPESGQPECLKEMNLESKSGGRVQRRSAKIAVYHLQELASAELAKEWPKRKVLQDLVPDDRKLKYTRPGLPTFSQEVLHKWKTDIKKYHRIQCPNQGCEAVYSSVSGLKAHLGSCTLGNFVAGKYKCLLCQKEFVSESGVKYHINSVHAEDWFVVNPTTTKSFEKLMKIKQRQQEEEKRRQQHRSRRSLRRRQQPGIELPETELSLRVGKDQRRNNEELVVSASCKEPEQEPVPAQFQKVKPPKTNHKRGRK

SEQ ID NO: 100294 - protein, 566 aa, Homo sapiens
  Payload ID: 19987
  Gene Name: zinc finger protein 512
  ENSP ID: ENSP00000369040
MSSRLGAVPATSGPTTFKQQRSTRIVGAKNRTQCSIKDNSFQYTIPHDDSLSGSSSASSCEPVSDFPASFRKSTYWMKMRRIKPAATSHVEGSGGVSAKGKRKPRQEEDEDYREFPQKKHKLYGRKQRPKTQPNPKSQARRIRKEPPVYAAGSLEEQWYLEIVDKGSVSCPTCQAVGRKTIEGLKKHMENCKQEMFTCHHCGKQLRSLAGMKYHVMANHNSLPILKAGDEIDEPSERERLRTVLKRLGKLRCMRESCSSSFTSIMGYLYHVRKCGKGAAELEKMTLKCHHCGKPYRSKAGLAYHLRSEHGPISFFPESGQPECLKEMNLESKSGGRVQRRSAKIAVYHLQELASAELAKEWPKRKVLQDLVPDDRKLKYTRPGLPTFSQEVLHKWKTDIKKYHRIQCPNQGCEAVYSSVSGLKAHLGSCTLGNFVAGKYKCLLCQKEFVSESGVKYHINSVHAEDWFVVNPTTTKSFEKLMKIKQRQQEEEKRRQQHRSRRSLRRRQQPGIELPETELSLRVGKDQRRNNEELVVSASCKEPEQEPVPAQFQKVKPPKTNHKRGRK

SEQ ID NO: 100295 - protein, 490 aa, Homo sapiens
  Payload ID: 19987
  Gene Name: zinc finger protein 512
  Uniprot ID: Q96ME7
  ENSP ID: ENSP00000395660
MKMRRIKPAATSHVEGSGGVSAKGKRKPRQEEDEDYREFPQKKHKLYGRKQRPKTQPNPKSQARRIRKEPPVYAAGSLEEQWYLEIVDKGSVSCPTCQAVGRKTIEGLKKHMENCKQEMFTCHHCGKQLRSLAGMKYHVMANHNSLPILKAGDEIDEPSERERLRTVLKRLGKLRCMRESCSSSFTSIMGYLYHVRKCGKGAAELEKMTLKCHHCGKPYRSKAGLAYHLRSEHGPISFFPESGQPECLKEMNLESKSGGRVQRRSAKIAVYHLQELASAELAKEWPKRKVLQDLVPDDRKLKYTRPGLPTFSQEVLHKWKTDIKKYHRIQCPNQGCEAVYSSVSGLKAHLGSCTLGNFVAGKYKCLLCQKEFVSESGVKYHINSVHAEDWFVVNPTTTKSFEKLMKIKQRQQEEEKRRQQHRSRRSLRRRQQPGIELPETELSLRVGKDQRRNNEELVVSASCKEPEQEPVPAQFQKVKPPKTNHKRGRK

SEQ ID NO: 100296 - protein, 538 aa, Homo sapiens
  Payload ID: 19987
  Gene Name: zinc finger protein 512
  Uniprot ID: Q96ME7
  ENSP ID: ENSP00000407038
MSSRLGAVPATSGPTTFKQQRSTRIVGAKNRTQCSIKDNSFQYTIPHDDSLSGSSSASSCEPVSDFPASFRKSTYWMKMRRIKPAATSHVEGSGGVSAKGKRKPRQEEDEDYREFPQKKHKLYGSLEEQWYLEIVDKGSVSCPTCQAVGRKTIEGLKKHMENCKQEMFTCHHCGKQLRSLAGMKYHVMANHNSLPILKAGDEIDEPSERERLRTVLKRLGKLRCMRESCSSSFTSIMGYLYHVRKCGKGAAELEKMTLKCHHCGKPYRSKAGLAYHLRSEHGPISFFPESGQPECLKEMNLESKSGGRVQRRSAKIAVYHLQELASAELAKEWPKRKVLQDLVPDDRKLKYTRPGLPTFSQEVLHKWKTDIKKYHRIQCPNQGCEAVYSSVSGLKAHLGSCTLGNFVAGKYKCLLCQKEFVSESGVKYHINSVHAEDWFVVNPTTTKSFEKLMKIKQRQQEEEKRRQQHRSRRSLRRRQQPGIELPETELSLRVGKDQRRNNEELVVSASCKEPEQEPVPAQFQKVKPPKTNHKRGRK

SEQ ID NO: 100297 - protein, 490 aa, Homo sapiens; identical to SEQ ID NO: 100295
  Payload ID: 19987
  Gene Name: zinc finger protein 512
  Uniprot ID: Q96ME7
  ENSP ID: ENSP00000451572

SEQ ID NO: 100298 - protein, 892 aa, Homo sapiens
  Payload ID: 19988
  Gene Name: zinc finger protein 512B
  Uniprot ID: Q96KM6
  ENSP ID: ENSP00000217130
MTDPFCVGGRRLPGSSKSGPGKDGSRKEVRLPMLHDPPKMGMPVVRGGQTVPGQAPLCFDPGSPASDKTEGKKKGRPKAENQALRDIPLSLMNDWKDEFKAHSRVKCPNSGCWLEFPSIYGLKYHYQRCQGGAISDRLAFPCPFCEAAFTSKTQLEKHRIWNHMDRPLPASKPGPISRPVTISRPVGVSKPIGVSKPVTIGKPVGVSKPIGISKPVSVGRPMPVTKAIPVTRPVPVTKPVTVSRPMPVTKAMPVTKPITVTKSVPVTKPVPVTKPITVTKLVTVTKPVPVTKPVTVSRPIVVSKPVTVSRPIAISRHTPPCKMVLLTRSENKAPRATGRNSGKKRAADSLDTCPIPPKQARPENGEYGPSSMGQSSAFQLSADTSSGSLSPGSRPSGGMEALKAAGPASPPEEDPERTKHRRKQKTPKKFTGEQPSISGTFGLKGLVKAEDKARVHRSKKQEGPGPEDARKKVPAAPITVSKEAPAPVAHPAPGGPEEQWQRAIHERGEAVCPTCNVVTRKTLVGLKKHMEVCQKLQDALKCQHCRKQFKSKAGLNYHTMAEHSAKPSDAEASEGGEQEERERLRKVLKQMGRLRCPQEGCGAAFSSLMGYQYHQRRCGKPPCEVDSPSFPCTHCGKTYRSKAGHDYHVRSEHTAPPPEEPTDKSPEAEDPLGVERTPSGRVRRTSAQVAVFHLQEIAEDELARDWTKRRMKDDLVPETARLNYTRPGLPTLNPQLLEAWKNEVKEKGHVNCPNDCCEAIYSSVSGLKAHLASCSKGAHLAGKYRCLLCPKEFSSESGVKYHILKTHAENWFRTSADPPPKHRSQDSLVPKKEKKKNLAGGKKRGRKPKERTPEEPVAKLPPRRDDWPPGCRDKGARGSTGRKVGVSKAPEK

SEQ ID NO: 100299 - protein, 892 aa, Homo sapiens; identical to SEQ ID NO: 100298
  Payload ID: 19988
  Gene Name: zinc finger protein 512B
  Uniprot ID: Q96KM6
  ENSP ID: ENSP00000358904

SEQ ID NO: 100300 - protein, 892 aa, Homo sapiens; identical to SEQ ID NO: 100298
  Payload ID: 19988
  Gene Name: zinc finger protein 512B
  Uniprot ID: Q96KM6
  ENSP ID: ENSP00000393795

SEQ ID NO: 100301 - protein, 541 aa, Homo sapiens
  Payload ID: 19989
  Gene Name: zinc finger protein 513
  Uniprot ID: Q8N8E2
  ENSP ID: ENSP00000318373
MPRRKQSHPQPVKCEGVKVDTEDSLDEGPGALVLESDLLLGQDLEFEEEEEEEEGDGNSDQLMGFERDSEGDSLGARPGLPYGLSDDESGGGRALSAESEVEEPARGPGEARGERPGPACQLCGGPTGEGPCCGAGGPGGGPLLPPRLLYSCRLCTFVSHYSSHLKRHMQTHSGEKPFRCGRCPYASAQLVNLTRHTRTHTGEKPYRCPHCPFACSSLGNLRRHQRTHAGPPTPPCPTCGFRCCTPRPARPPSPTEQEGAVPRRPEDALLLPDLSLHVPPGGASFLPDCGQLRGEGEGLCGTGSEPLPELLFPWTCRGCGQELEEGEGSRLGAAMCGRCMRGEAGGGASGGPQGPSDKGFACSLCPFATHYPNHLARHMKTHSGEKPFRCARCPYASAHLDNLKRHQRVHTGEKPYKCPLCPYACGNLANLKRHGRIHSGDKPFRCSLCNYSCNQSMNLKRHMLRHTGEKPFRCATCAYTTGHWDNYKRHQKVHGHGGAGGPGLSASEGWAPPHSPPSVLSSRGPPALGTAGSRAVHTDSS

SEQ ID NO: 100302 - protein, 479 aa, Homo sapiens
  Payload ID: 19989
  Gene Name: zinc finger protein 513
  Uniprot ID: Q8N8E2
  ENSP ID: ENSP00000384874
MGFERDSEGDSLGARPGLPYGLSDDESGGGRALSAESEVEEPARGPGEARGERPGPACQLCGGPTGEGPCCGAGGPGGGPLLPPRLLYSCRLCTFVSHYSSHLKRHMQTHSGEKPFRCGRCPYASAQLVNLTRHTRTHTGEKPYRCPHCPFACSSLGNLRRHQRTHAGPPTPPCPTCGFRCCTPRPARPPSPTEQEGAVPRRPEDALLLPDLSLHVPPGGASFLPDCGQLRGEGEGLCGTGSEPLPELLFPWTCRGCGQELEEGEGSRLGAAMCGRCMRGEAGGGASGGPQGPSDKGFACSLCPFATHYPNHLARHMKTHSGEKPFRCARCPYASAHLDNLKRHQRVHTGEKPYKCPLCPYACGNLANLKRHGRIHSGDKPFRCSLCNYSCNQSMNLKRHMLRHTGEKPFRCATCAYTTGHWDNYKRHQKVHGHGGAGGPGLSASEGWAPPHSPPSVLSSRGPPALGTAGSRAVHTDSS

SEQ ID NO: 100303 - protein, 116 aa, Homo sapiens
  Payload ID: 19989
  Gene Name: zinc finger protein 513
  ENSP ID: ENSP00000394226
MGFERDSEGDSLGARPGLPYGLSDDESGGGRALSAESEVEEPARGPGEARGERPGPACQLCGGPTGEGPCCGAGGPGGGPLLPPRLLYSCRLCTFVSHYSSHLKRHMQTHSGEKPF

SEQ ID NO: 100304 - protein, 400 aa, Homo sapiens
  Payload ID: 19990
  Gene Name: zinc finger protein 514
  Uniprot ID: Q96K75
  ENSP ID: ENSP00000295208
MTFEDVAVEFSQWEWGQLNPAQKDLYREVMLENFRNLAILGLLVSKPYVICQLEEGGEPFMVEREISTGAHSDWKRRSKSKESMPSWGISKEELFQVVSVEKHIQDVLQFSKLKAACGCDGQLEMQQIKQERHLKQMSTIHKSATTLSRDYKWNGFGRSLGLRSVLVNQHSILMGEGSYKCDTEFRQTLGGNNSQRTHPEKKSCKCNECGKSFHFQSELRRHQRCHTGEKPYECSDCGRAFGHISSLIKHQRTHTGEKPYECSECGRAFSQSSSLVLHYRFHTGEKPYKCNECGRAFGHTSSLIKHQRTHTGEKPYECRECGRTFSQSSSLIVHYRFHTGEKPYKCNKCGRAFSQSSSLTQHYRFHTGEKPYKCNECGRAFAHTASLIKHQRSHAGKKTL

SEQ ID NO: 100305 - protein, 71 aa, Homo sapiens
  Payload ID: 19990
  Gene Name: zinc finger protein 514
  ENSP ID: ENSP00000399647
MIKSYFRNKATFFQDLMTFEDVAVEFSQWEWGQLNPAQKDLYREVMLENFRNLAILGLLVSKPYVICQLEE

SEQ ID NO: 100306 - protein, 400 aa, Homo sapiens; identical to SEQ ID NO: 100304
  Payload ID: 19990
  Gene Name: zinc finger protein 514
  Uniprot ID: Q96K75
  ENSP ID: ENSP00000405509

SEQ ID NO: 100307 - protein, 1163 aa, Homo sapiens
  Payload ID: 19991
  Gene Name: zinc finger protein 516
  Uniprot ID: Q92618
  ENSP ID: ENSP00000394757
MDRNREAEMELRRGPSPTRAGRGHEVDGDKATCHTCCICGKSFPFQSSLSQHMRKHTGEKPYKCPYCDHRASQKGNLKIHIRSHRTGTLIQGHEPEAGEAPLGEMRASEGLDACASPTKSASACNRLLNGASQADGARVLNGASQADSGRVLLRSSKKGAEGSACAPGEAKAAVQCSFCKSQFERKKDLELHVHQAHKPFKCRLCSYATLREESLLSHIERDHITAQGPGSGEACVENGKPELSPGEFPCEVCGQAFSQTWFLKAHMKKHRGSFDHGCHICGRRFKEPWFLKNHMKAHGPKTGSKNRPKSELDPIATINNVVQEEVIVAGLSLYEVCAKCGNLFTNLDSLNAHNAIHRRVEASRTRAPAEEGAEGPSDTKQFFLQCLNLRPSAAGDSCPGTQAGRRVAELDPVNSYQAWQLATRGKVAEPAEYLKYGAWDEALAGDVAFDKDRREYVLVSQEKRKREQDAPAAQGPPRKRASGPGDPAPAGHLDPRSAARPNRRAAATTGQGKSSECFECGKIFRTYHQMVLHSRVHRRARRERDSDGDRAARARCGSLSEGDSASQPSSPGSACAAADSPGSGLADEAAEDSGEEGAPEPAPGGQPRRCCFSEEVTSTELSSGDQSHKMGDNASERDTGESKAGIAASVSILENSSRETSRRQEQHRFSMDLKMPAFHPKQEVPVPGDGVEFPSSTGAEGQTGHPAEKLSDLHNKEHSGGGKRALAPDLMPLDLSARSTRDDPSNKETASSLQAALVVHPCPYCSHKTYYPEVLWMHKRIWHRVSCNSVAPPWIQPNGYKSIRSNLVFLSRSGRTGPPPALGGKECQPLLLARFTRTQVPGGMPGSKSGSSPLGVVTKAASMPKNKESHSGGPCALWAPGPDGYRQTKPCHGQEPHGAATQGPLAKPRQEASSKPVPAPGGGGFSRSATPTPTVIARAGAQPSANSKPVEKFGVPPAGAGFAPTNKHSAPDSLKAKFSAQPQGPPPAKGEGGAPPLPPREPPSKAAQELRTLATCAAGSRGDAALQAQPGVAGAPPVLHSIKQEPVAEGHEKRLDILNIFKTYIPKDFATLYQGWGVSGPGLEHRGTLRTQARPGEFVCIECGKSFHQPGHLRAHMRAHSVVFESDGPRGSEVHTTSADAPKQGRDHSNTGTVQTVPLRKGT

SEQ ID NO: 100308 - protein, 25 aa, Homo sapiens
  Payload ID: 19991
  Gene Name: zinc finger protein 516
  ENSP ID: ENSP00000445902
  MOD_RES (1)..(1): Any amino acid
XDFATLYQGWGVSGPGLEHRGERPF

SEQ ID NO: 100309 - protein, 75 aa, Homo sapiens
  Payload ID: 19991
  Gene Name: zinc finger protein 516
  ENSP ID: ENSP00000446211
MDRNREAEMELRRGPSPTRAGRGHEVDGDKATCHTCCICGKSFPFQSSLSQHMRKHTGEKPYKCPYCDHRASQKG

SEQ ID NO: 100310 - protein, 517 aa, Homo sapiens
  Payload ID: 19991
  Gene Name: zinc finger protein 516
  ENSP ID: ENSP00000478712
  MOD_RES (1)..(1): Any amino acid
XCFSEEVTSTELSSGDQSHKMGDNASERDTGESKAGIAASVSILENSSRETSRRQEQHRFSMDLKMPAFHPKQEVPVPGDGVEFPSSTGAEGQTGHPAEKLSDLHNKEHSGGGKRALAPDLMPLDLSARSTRDDPSNKETASSLQAALVVHPCPYCSHKTYYPEVLWMHKRIWHRVSCNSVAPPWIQPNGYKSIRSNLVFLSRSGRTGPPPALGGKECQPLLLARFTRTQVPGGMPGSKSGSSPLGVVTKAASMPKNKESHSGGPCALWAPGPDGYRQTKPCHGQEPHGAATQGPLAKPRQEASSKPVPAPGGGGFSRSATPTPTVIARAGAQPSANSKPVEKFGVPPAGAGFAPTNKHSAPDSLKAKFSAQPQGPPPAKGEGGAPPLPPREPPSKAAQELRTLATCAAGSRGDAALQAQPGVAGAPPVLHSIKQEPVAEGHEKRLDILNIFKTYIPKDFATLYQGWGVSGPGLEHRGTLRTQARPGEFVCIECGKSFHQPGHLRAHMRAHSGERPF

SEQ ID NO: 100311 - protein, 492 aa, Homo sapiens
  Payload ID: 19992
  Gene Name: zinc finger protein 517
  Uniprot ID: Q6ZMY9
  ENSP ID: ENSP00000353058
MAMALPMPGPQEAVVFEDVAVYFTRIEWSCLAPDQQALYRDVMLENYGNLASLGFLVAKPALISLLEQGEEPGALILQVAEQSVAKASLCTDSRMEAGIMESPLQRKLSRQAGLPGTVWGCLPWGHPVGGHPAPPHPHGGPEDGSDKPTHPRAREHSASPRVLQEDLGRPVGSSAPRYRCVCGKAFRYNSLLLRHQIIHTGAKPFQCTECGKAFKQSSILLRHQLIHTEEKPFQCGECGKAFRQSTQLAAHHRVHTRERPYACGECGKAFSRSSRLLQHQKFHTGEKPFACTECGKAFCRRFTLNEHGRIHSGERPYRCLRCGQRFIRGSSLLKHHRLHAQEGAQDGGVGQGALLGAAQRPQAGDPPHECPVCGRPFRHNSLLLLHLRLHTGEKPFECAECGKAFGRKSNLTLHQKIHTKEKPFACTECGKAFRRSYTLNEHYRLHSGERPYRCRACGRACSRLSTLIQHQKVHGREPGEDTEGRRAPCWAS

SEQ ID NO: 100312 - protein, 459 aa, Homo sapiens
  Payload ID: 19992
  Gene Name: zinc finger protein 517
  ENSP ID: ENSP00000432025
  MOD_RES (1)..(1): Any amino acid
XCSSTEGPWNGDGTPDAWTSGFLVAKPALISLLEQGEEPGALILQVAEQSVAKASLCTDSRMEAGIMESPLQRKLSRQAGLPGTVWGCLPWGHPVGGHPAPPHPHGGPEDGSDKPTHPRAREHSASPRVLQEDLGRPVGSSAPRYRCVCGKAFRYNSLLLRHQIIHTGAKPFQCTECGKAFKQSSILLRHQLIHTEEKPFQCGECGKAFRQSTQLAAHHRVHTRERPYACGECGKAFSRSSRLLQHQKFHTGEKPFACTECGKAFCRRFTLNEHGRIHSGERPYRCLRCGQRFIRGSSLLKHHRLHAQEGAQDGGVGQGALLGAAQRPQAGDPPHECPVCGRPFRHNSLLLLHLRLHTGEKPFECAECGKAFGRKSNLTLHQKIHTKEKPFACTECGKAFRRSYTLNEHYRLHSGERPYRCRACGRACSRLSTLIQHQKVHGREPGEDTEGRRAPCWAS

SEQ ID NO: 100313 - protein, 142 aa, Homo sapiens
  Payload ID: 19992
  Gene Name: zinc finger protein 517
  ENSP ID: ENSP00000433299
MAMALPMPGPQEAVVFEDVAVYFTRIEWSCLAPDQQALYRDVMLENYGNLASLGFLVAKPALISLLEQGEEPGALILQVAEQSVAKASLCTEDPNTLPSRSQEGSPASSEGGPGEKGVAGRVAGGGAASSWPHGEHPVTPNR

SEQ ID NO: 100314 - protein, 492 aa, Homo sapiens; identical to SEQ ID NO: 100311
  Payload ID: 19992
  Gene Name: zinc finger protein 517
  Uniprot ID: Q6ZMY9
  ENSP ID: ENSP00000435166

SEQ ID NO: 100315 - protein, 130 aa, Homo sapiens
  Payload ID: 19992
  Gene Name: zinc finger protein 517
  ENSP ID: ENSP00000435791
MAMALPMPGPQEAVVFEDVAVYFTRIEWSCLAPDQQALYRDVMLENYGNLASLALISLLEQGEEPGALILQVAEQSVAKASLCTDSRMEAGIMESPLQRKLSRQAGLPGTVWGCLPWGHPVGGHPAPPHP

SEQ ID NO: 100316 - protein, 492 aa, Homo sapiens; identical to SEQ ID NO: 100311
  Payload ID: 19992
  Gene Name: zinc finger protein 517
  Uniprot ID: Q6ZMY9
  ENSP ID: ENSP00000436103

SEQ ID NO: 100317 - protein, 1483 aa, Homo sapiens
  Payload ID: 19993
  Gene Name: zinc finger protein 518A
  Uniprot ID: Q6AHZ1
  ENSP ID: ENSP00000479684
MPSEQKQLFCDEKQTTLKKDYDVKNEIVDRSAPKPKISGSIHYALKNVKIDLPKINIPNEVLLKHEVDKYRKLFQSKQQTARKSISIKTVSCVEECTLLHKSERAEEEGVKMSAKILNFSCLKCRDNTRYSPNDLQKHFQMWHHGELPSYPCEMCNFSANDFQVFKQHRRTHRSTLVKCDICNNESVYTLLNLTKHFTSTHCVNGNFQCEKCKFSTQDVGTFVQHIHRHNEIHYKCGKCHHVCFTKGELQKHLHIHSGTFPFTCQYCSYGATRREHLVRHVITLHKEHLYAKEKLEKDKYEKRMAKTSAGLKLILKRYKIGASRKTFWKRKKINSGSDRSIEKNTQVLKKMNKTQTKSEDQSHVVQEHLSEEKDERLHCENNDKAPESESEKPTPLSTGQGNRAEEGPNASSGFMKTAVLGPTLKNVMMKNNKLAVSPNYNATFMGFKMMDGKQHIVLKLVPIKQNVCSPGSQSGAAKDGTANLQPQTLDTNGFLTGVTTELNDTVYMKAATPFSCSSSILSGKASSEKEMTLISQRNNMLQTMDYEKSVSSLSATSELVTASVNLTTKFETRDNVDFWGNHLTQSHPEVLGTTIKSPDKVNCVAKPNAYNSGDMHNYCINYGNCELPVESSNQGSLPFHNYSKVNNSNKRRRFSGTAVYENPQRESSSSKTVVQQPISESFLSLVRQESSKPDSLLASISLLNDKDGTLKAKSEIEEQYVLEKGQNIDGQNLYSNENQNLECATEKSKWEDFSNVDSPMMPRITSVFSLQSQQASEFLPPEVNQLLQDVLKIKPDVKQDSSNTPNKGLPLHCDQSFQKHEREGKIVESSKDFKVQGIFPVPPGSVGINVPTNDLNLKFGKEKQVSSIPQDVRDSEKMPRISGFGTLLKTQSDAIITQQLVKDKLRATTQNLGSFYMQSPLLNSEQKKTIIVQTSKGFLIPLNITNKPGLPVIPGNALPLVNSQGIPASLFVNKKPGMVLTLNNGKLEGVSAVKTEGAPARGTVTKEPCKTPILKVEPNNNCLTPGLCSSIGSCLSMKSSSENTLPLKGPYILKPTSSVKAVLIPNMLSEQQSTKLNISDSVKQQNEIFPKPPLYTFLPDGKQAVFLKCVMPNKTELLKPKLVQNSTYQNIQPKKPEGTPQRILLKIFNPVLNVTAANNLSVSNSASSLQKDNVPSNQIIGGEQKEPESRDALPFLLDDLMPANEIVITSTATCPESSEEPICVSDCSESRVLRCKTNCRIERNFNRKKTSKKIFSKTKTHGSKDSETAFVSRNRNCKRKCRDSYQEPPRRKATLHRKCKEKAKPEDVRETFGFSRPRLSKDSIRTLRLFPFSSKQLVKCPRRNQPVVVLNHPDADAPEVVSVMKTIAKFNGHVLKVSLSKRTINALLKPVCYNPPKTTYDDFSKRHKTFKPVSSVKERFVLKLTLKKTSKNNYQIVKTTSENILKAKFNCWFCGRVFDNQDTWAGHGQRHLMEATRDWNMLE

SEQ ID NO: 100318 - protein, 338 aa, Homo sapiens
  Payload ID: 19993
  Gene Name: zinc finger protein 518A
  ENSP ID: ENSP00000480280
MPSEQKQLFCDEKQTTLKKDYDVKNEIVDRSAPKPKISGSIHYALKNVKIDLPKINIPNEVLLKHEVDKYRKLFQSKQQTARKSISIKTVSCVEECTLLHKSERAEEEGVKMSAKILNFSCLKCRDNTRYSPNDLQKHFQMWHHGELPSYPCEMCNFSANDFQVFKQHRRTHRSTLVKCDICNNESVYTLLNLTKHFTSTHCVNGNFQCEKCKFSTQDVGTFVQHIHRHNEIHYKCGKCHHVCFTKGELQKHLHIHSGTFPFTCQYCSYGATRREHLVRHVITLHKEHLYAKEKLEKDKYEKRMAKTSAGLKLILKRYKIGASRKTFWKRKKINSGSD

SEQ ID NO: 100319 - protein, 1483 aa, Homo sapiens; identical to SEQ ID NO: 100317
  Payload ID: 19993
  Gene Name: zinc finger protein 518A
  Uniprot ID: Q6AHZ1
  ENSP ID: ENSP00000481657

SEQ ID NO: 100320 - protein, 1483 aa, Homo sapiens; identical to SEQ ID NO: 100317
  Payload ID: 19993
  Gene Name: zinc finger protein 518A
  Uniprot ID: Q6AHZ1
  ENSP ID: ENSP00000485614

SEQ ID NO: 100321 - protein, 1074 aa, Homo sapiens
  Payload ID: 19994
  Gene Name: zinc finger protein 518B
  Uniprot ID: Q9C0D4
  ENSP ID: ENSP00000317614
MKDIGQQLYTTHLNGGHNSLTMSPKQPDANGAPRPNRQEAQTLLYQGSEAEAAMMTIATCAKCKSVHKISLQDLQKGTGKDGMYVCFQCSLGAAPPNFHFVSNNSSATHVGNKTENFSSSVNSKFKVRNFKPGKYYCDKCRFSTKDPLQYKKHTLQHEEIKFICSHCSYISYTKGEFQRHLVKHTGIFPYQCEYCDYGAIRNDYIVKHTKRVHERAGAKRPVKAVAKLEPKRTGTSKQNPELLKASNPRTTFQNKWSDQLSGFSLHANKDKMHNIMLLPEPKEYQKDVVCIPNKMTLSEPNEVNLFENKNVEVEVLSPAKEPVQPGMPLTVVAPAELVVPANCLAQLIDVKVVNGTQQLVLKLFPLEENNCLEAGRDNGGNSERMVKEKGSNEQEKVLSAEKTKSLTVDGNVGKLVGIDSFQPSVQKQLKNVKWVRSYDFIMPNSSVHNNGKSFINSETIEDFQKKNNLYPHRTAFPSVALKGHSLASVFKNSVLRSLGAASNPFPYKAAVCFAESGRNLHSSSQQLLPFAASPATCSFSGEKGLLPVSENDLESTSKVNIPVKVVSSNRKQEDNQTEEHKAVSTVGQISSQHKSEYLHINITGEDRSQQPGDKPLELKNSERTNNTNDGPVISSVFSLSSGSENVPEGIKWNSSTSKIKSIELLRRKIAQLIESCGKPSSLASNSAHRRSVGQASKGTSKATSEGIQEINVSLTGLGHSTGTLQKPPNDGGITGNRQLTHQQIYPHFADGSNRKTKSRVARKAHVATPVLIPKGAVLRVLNSSENAHIIEATCEAPVSIPCSERQLIKPVPFCPVRQADSDLQPLRSERGPIDMSPNIETPLRPKLRKESAVCSTIHRKTGLLYGQQGSSELNKQGRLLSRSLSISRNKTKQVHLSRKKNKIQAEPSRCLKDPSIFQVARQLRLIAAKPDQLIKCPRRNQPVIVLNHPDVDSPEVTNVMKVINKYKGNVLKVVLSERTRCQLGIRRHHVRLTYQNAEEASQIKRQMMLKMKLKKVHKNNYQVVDSLPDDSSQCVFKCWFCGRLYEDQEEWMSHGQRHLIEATRDWDVLSSKGK

SEQ ID NO: 100322 - protein, 75 aa, Homo sapiens
  Payload ID: 19994
  Gene Name: zinc finger protein 518B
  ENSP ID: ENSP00000425298
MKDIGQQLYTTHLNGGHNSLTMSPKQPDANGAPRPNRQEAQTLLYQGSEAEAAMMTIATCAKCKSVHKISLQDLQ

SEQ ID NO: 100323 - protein, 540 aa, Homo sapiens
  Payload ID: 19995
  Gene Name: zinc finger protein 519
  Uniprot ID: Q8TB69
  ENSP ID: ENSP00000464872
MELLTFRDVAIEFSPEEWKCLDPAQQNLYRDVMLENYRNLVSLAVYSYYNQGILPEQGIQDSFKKATLGRYGSCGLENICLWKNWESIGEGEGQKECYNLCSQYLTTSHNKHLTVKGDKEYRIFQKKPQFLSAAPTEPCIPMNKYQHKFLKSVFCNKNQINFNHDSNISKHHSTHFLENYYNCNECEKVFYQSSKLIFPENIHIQKKPYNSNECGETSDPFSKLTQHQRIYIGESSQRCNKKCIIVFSQSHLKGHKIINTGEKSVKYKERGKAFTRGLHLGHQKIHTGEKPYKCKKCDKAFNKSSHLAQHQRIHTGEKPFKCKECGKAFNRGSYLTQHQRIHTGERAFKCEECGKAFNRGSYLTQHQRIHTGEKPFRCKECGKAFNRSSYVTQHQRMHTGEKPFKCKECGKAFNRASHLTQHQRIHTGEKHFKCKECGKAFNRGSHLTRHQRIHTGEKSFKCEECGKAFIWGSHLTQHQRVHTGEKFFKCKECGKAFTRSSHLTQHQRIHTGEKPFKCKECGKAFNRRSTLTQHQIIHTR

SEQ ID NO: 100324 - protein, 80 aa, Homo sapiens
  Payload ID: 19995
  Gene Name: zinc finger protein 519
  ENSP ID: ENSP00000465159
MELLTFRDVAIEFSPEEWKCLDPAQQNLYRDVMLENYRNLVSLELHTEHHQRTDGHFISLGEGQVYHAVMAIPASIGVWV

SEQ ID NO: 100325 - protein, 50 aa, Homo sapiens
  Payload ID: 19995
  Gene Name: zinc finger protein 519
  ENSP ID: ENSP00000468250
MELLTFRDVAIEFSPEEWKCLDPAQQNLYRDVMLENYRNLVSLVEKRDCL

SEQ ID NO: 100326 - protein, 1311 aa, Homo sapiens
  Payload ID: 19996
  Gene Name: zinc finger protein 521
  Uniprot ID: Q96K83
  ENSP ID: ENSP00000354794
MSRRKQAKPRSLKDPNCKLEDKTEDGEALDCKKRPEDGEELEDEAVHSCDSCLQVFESLSDITEHKINQCQLTDGVDVEDDPTCSWPASSPSSKDQTSPSHGEGCDFGEEEGGPGLPYPCQFCDKSFSRLSYLKHHEQSHSDKLPFKCTYCSRLFKHKRSRDRHIKLHTGDKKYHCSECDAAFSRSDHLKIHLKTHTSNKPYKCAICRRGFLSSSSLHGHMQVHERNKDGSQSGSRMEDWKMKDTQKCSQCEEGFDFPEDLQKHIAECHPECSPNEDRAALQCVYCHELFVEETSLMNHMEQVHSGEKKNSCSICSESFHTVEELYSHMDSHQQPESCNHSNSPSLVTVGYTSVSSTTPDSNLSVDSSTMVEAAPPIPKSRGRKRAAQQTPDMTGPSSKQAKVTYSCIYCNKQLFSSLAVLQIHLKTMHLDKPEQAHICQYCLEVLPSLYNLNEHLKQVHEAQDPGLIVSAMPAIVYQCNFCSEVVNDLNTLQEHIRCSHGFANPAAKDSNAFFCPHCYMGFLTDSSLEEHIRQVHCDLSGSRFGSPVLGTPKEPVVEVYSCSYCTNSPIFNSVLKLNKHIKENHKNIPLALNYIHNGKKSRALSPLSPVAIEQTSLKMMQAVGGAPARPTGEYICNQCGAKYTSLDSFQTHLKTHLDTVLPKLTCPQCNKEFPNQESLLKHVTIHFMITSTYYICESCDKQFTSVDDLQKHLLDMHTFVFFRCTLCQEVFDSKVSIQLHLAVKHSNEKKVYRCTSCNWDFRNETDLQLHVKHNHLENQGKVHKCIFCGESFGTEVELQCHITTHSKKYNCKFCSKAFHAIILLEKHLREKHCVFETKTPNCGTNGASEQVQKEEVELQTLLTNSQESHNSHDGSEEDVDTSEPMYGCDICGAAYTMETLLQNHQLRDHNIRPGESAIVKKKAELIKGNYKCNVCSRTFFSENGLREHMQTHLGPVKHYMCPICGERFPSLLTLTEHKVTHSKSLDTGNCRICKMPLQSEEEFLEHCQMHPDLRNSLTGFRCVVCMQTVTSTLELKIHGTFHMQKTGNGSAVQTTGRGQHVQKLYKCASCLKEFRSKQDLVKLDINGLPYGLCAGCVNLSKSASPGINVPPGTNRPGLGQNENLSAIEGKGKVGGLKTRCSSCNVKFESESELQNHIQTIHRELVPDSNSTQLKTPQVSPMPRISPSQSDEKKTYQCIKCQMVFYNEWDIQVHVANHMIDEGLNHECKLCSQTFDSPAKLQCHLIEHSFEGMGGTFKCPVCFTVFVQANKLQQHIFSAHGQEDKIYDCTQCPQKFFFQTELQNHTMTQHSS

SEQ ID NO: 100327 - protein, 1244 aa, Homo sapiens
  Payload ID: 19996
  Gene Name: zinc finger protein 521
  ENSP ID: ENSP00000382352
MSRRKQAKPRSLKDPNCKLEDKTEDGEALDCKKRPEDGEELEDEAVHSCDSCLQVFESLSDITEHKINQCQLTDGVDVEDDPTCSWPASSPSSKDQTSPSHGEGCDFGEEEGGPGLPYPCQFCDKSFSRLSYLKHHEQSHSDKLPFKCTYCSRLFKHKRSRDRHIKLHTGDKKYHCSECDAAFSRSDHLKIHLKTHTSNKPYKCAICRRGFLSSSSLHGHMQVHERNKDGSQSGSRMEDWKMKDTQKCSQCEEGFDFPEDLQKHIAECHPECSPNEDRAALQCVYCHELFVEETSLMNHMEQVHSGEKKNSCSICSESFHTVEELYSHMDSHQQPESCNHSNSPSLVTVGYTSVSSTTPDSNLSVDSSTMVEAAPPIPKSRGRKRAAQQTPDMTGPSSKQAKVTYSCIYCNKQLFSSLAVLQIHLKTMHLDKPEQAHICQYCLEVLPSLYNLNEHLKQVHEAQDPGLIVSAMPAIVYQCNFCSEVVNDLNTLQEHIRCSHGFANPAAKDSNAFFCPHCYMGFLTDSSLEEHIRQVHCDLSGSRFGSPVLGTPKEPVVEVYSCSYCTNSPIFNSVLKLNKHIKENHKNIPLALNYIHNGKKSRALSPLSPVAIEQTSLKMMQAVGGAPARPTGEYICNQCGAKYTSLDSFQTHLKTHLDTVLPKLTCPQCNKEFPNQESLLKHVTIHFMITSTYYICESCDKQFTSVDDLQKHLLDMHTFVFFRCTLCQEVFDSKVSIQLHLAVKHSNEKKVYRCTSCNWDFRNETDLQLHVKHNHLENQGKVHKCIFCGESFGTEVELQCHITTHSKKYNCKFCSKAFHAIILLEKHLREKHCVFETKTPNCGTNGASEQVQKEEVELQTLLTNSQESHNSHDGSEEDVDTSEPMYGCDICGAAYTMETLLQNHQLRDHNIRPGESAIVKKKAELIKGNYKCNVCSRTFFSENGLREHMQTHLGPVKHYMCPICGERFPSLLTLTEHKVTHSKSLDTGNCRICKMPLQSEEEFLEHCQMHPDLRNSLTGFRCVVCMQTVTSTLELKIHGTFHMQKTGNGSAVQTTGRGQHVQKLYKCASCLKEFRSKQDLVKLDINGLPYGLCAGCVNLSKSASPGINVPPGTNRPGLGQNENLSAIEGKGKVGGLKTRCSSCNVKFESESELQNHIQTIHRELVPDSNSTQLKTPQVSPMPRISPSQSDEDIVFSMTEETSAHANTTEIWNLSIASPRRPINASSVRWFSTMNGIFRFMLQIT

SEQ ID NO: 100328 - protein, 1311 aa, Homo sapiens; identical to SEQ ID NO: 100326
  Payload ID: 19996
  Gene Name: zinc finger protein 521
  Uniprot ID: Q96K83
  ENSP ID: ENSP00000440768

SEQ ID NO: 100329 - protein, 224 aa, Homo sapiens
  Payload ID: 19996
  Gene Name: zinc finger protein 521
  ENSP ID: ENSP00000462724
MSRRKQAKPRSLKDPNCKLEDKTEDGEALDCKKRPEDGEELEDEAVHSCDSCLQVFESLSDITEHKINQCQLTDGVDVEDDPTCSWPASSPSSKDQTSPSHGEGCDFGEEEGGPGLPYPCQFCDKSFSRLSYLKHHEQSHSDKLPFKCTYCSRLFKHKRSRDRHIKLHTGDKKYHCSECDAAFSRSDHLKIHLKTHTSNKPYKCAICRRGFLSSSSLHGHMQVH

SEQ ID NO: 100330 - protein, 30 aa, Homo sapiens
  Payload ID: 19996
  Gene Name: zinc finger protein 521
  ENSP ID: ENSP00000462746
MSRRKQAKPRSLKDPNCKLEDKTEDGEALD

SEQ ID NO: 100331 - protein, 1091 aa, Homo sapiens
  Payload ID: 19996
  Gene Name: zinc finger protein 521
  ENSP ID: ENSP00000463000
MQVHERNKDGSQSGSRMEDWKMKDTQKCSQCEEGFDFPEDLQKHIAECHPECSPNEDRAALQCVYCHELFVEETSLMNHMEQVHSGEKKNSCSICSESFHTVEELYSHMDSHQQPESCNHSNSPSLVTVGYTSVSSTTPDSNLSVDSSTMVEAAPPIPKSRGRKRAAQQTPDMTGPSSKQAKVTYSCIYCNKQLFSSLAVLQIHLKTMHLDKPEQAHICQYCLEVLPSLYNLNEHLKQVHEAQDPGLIVSAMPAIVYQCNFCSEVVNDLNTLQEHIRCSHGFANPAAKDSNAFFCPHCYMGFLTDSSLEEHIRQVHCDLSGSRFGSPVLGTPKEPVVEVYSCSYCTNSPIFNSVLKLNKHIKENHKNIPLALNYIHNGKKSRALSPLSPVAIEQTSLKMMQAVGGAPARPTGEYICNQCGAKYTSLDSFQTHLKTHLDTVLPKLTCPQCNKEFPNQESLLKHVTIHFMITSTYYICESCDKQFTSVDDLQKHLLDMHTFVFFRCTLCQEVFDSKVSIQLHLAVKHSNEKKVYRCTSCNWDFRNETDLQLHVKHNHLENQGKVHKCIFCGESFGTEVELQCHITTHSKKYNCKFCSKAFHAIILLEKHLREKHCVFETKTPNCGTNGASEQVQKEEVELQTLLTNSQESHNSHDGSEEDVDTSEPMYGCDICGAAYTMETLLQNHQLRDHNIRPGESAIVKKKAELIKGNYKCNVCSRTFFSENGLREHMQTHLGPVKHYMCPICGERFPSLLTLTEHKVTHSKSLDTGNCRICKMPLQSEEEFLEHCQMHPDLRNSLTGFRCVVCMQTVTSTLELKIHGTFHMQKTGNGSAVQTTGRGQHVQKLYKCASCLKEFRSKQDLVKLDINGLPYGLCAGCVNLSKSASPGINVPPGTNRPGLGQNENLSAIEGKGKVGGLKTRCSSCNVKFESESELQNHIQTIHRELVPDSNSTQLKTPQVSPMPRISPSQSDEKKTYQCIKCQMVFYNEWDIQVHVANHMIDEGLNHECKLCSQTFDSPAKLQCHLIEHSFEGMGGTFKCPVCFTVFVQANKLQQHIFSAHGQEDKIYDCTQCPQKFFFQTELQNHTMTQHSS

SEQ ID NO: 100332 - protein, 184 aa, Homo sapiens
  Payload ID: 19996
  Gene Name: zinc finger protein 521
  ENSP ID: ENSP00000463748
  MOD_RES (1)..(1): Any amino acid
XQKTGNGSAVQTTGRGQHVQKLYKCASCLKEFRSKQDLVKLDINGLPYGLCAGCVNLSKSASPGINVPPGTNRPGLGQNENLSAIEGKGKVGGLKTRCSSCNVKFESESELQNHIQTIHRELVPDSNSTQLKTPQVSPMPRISPSQSDEKKTYQCIKCQMVFYNEWDIQVHVANHMIDSKTKDL

SEQ ID NO: 100333 - protein, 144 aa, Homo sapiens
  Payload ID: 19996
  Gene Name: zinc finger protein 521
  ENSP ID: ENSP00000464415
MSRRKQAKPRSLKDPNCKLEDKTEDGEALDCKKRPEDGEELEDEAVHSCDSCLQVFESLSDITEHKINQCQLTDGVDVEDDPTCSWPASSPSSKDQTSPSHGEGCDFGEEEGGPGLPYPCQFCDKSFSRLSYLKHHEQSHSDKL

SEQ ID NO: 100334 - protein, 264 aa, Homo sapiens
  Payload ID: 19997
  Gene Name: zinc finger protein 524
  Uniprot ID: Q96C55
  ENSP ID: ENSP00000301073
MDTPSPDPLPSPLPGEEEKPLALSPPVPRGRRGRRPGGATSSNRTLKASLPRKRGRPPKSGQEPPLVQVQGVTAPVGSSGGSDLLLIDDQGVPYTVSEGSAAGPEGSGPRKAPHFCPVCLRAFPYLSDLERHSISHSELKPHQCKVCGKTFKRSSHLRRHCNIHAGLRPFRCPLCPRRFREAGELAHHHRVHSGERPYQCPICRLRFTEANTLRRHAKRKHPEAMGVPLCAPDPGSEPPWDEEGIPATAGAEEEEETEGKGEPA

SEQ ID NO: 100335 - protein, 264 aa, Homo sapiens; identical to SEQ ID NO: 100334
  Payload ID: 19997
  Gene Name: zinc finger protein 524
  Uniprot ID: Q96C55
  ENSP ID: ENSP00000466907

SEQ ID NO: 100336 - protein, 130 aa, Homo sapiens
  Payload ID: 19997
  Gene Name: zinc finger protein 524
  ENSP ID: ENSP00000467175
MDTPSPDPLPSPLPGEEEKPLALSPPVPRGRRGRRPGGATSSNRTLKASLPRKRGRPPKSGQEPPLVQVQGVTAPVGSSGGSDLLLIDDQGVPYTVSEGSAAGPEGSGPRKAPHFCPVCLRAFPYLSDLE

SEQ ID NO: 100337 - protein, 479 aa, Homo sapiens
  Payload ID: 19998
  Gene Name: zinc finger protein 525
  ENSP ID: ENSP00000417696
MALPQGLLTFRDVAIEFSQEEWKCLDPAQRTLYRDVMLENYRNLVSLGISSKCTMKEFSSTAQGNTEVIHTGTLQRHERHHIGDFSFQEIEKDIHNFEFQWQEDERNGHEAPMTKIKKLMGSTEQYDHRHAGNKPIKYQLGSSFHSHLSELHIFQPKGKINNQVEKSINDASSVSTAQRISCRPKTHISNNYGDNFLNYSLLTQRQEVRMREKSFQCIESGKAFNYSSLLRKHQIIHLGEKQYKCDVCDKVFIRKRYLARHRRCHTGEKPYKCNECGKSFSQMSSLTYHHRLHTGEKPYKCEECDKAFRHNSALQRHRRIHTGEKPHKCNECGKTFSQKSYLACHRSIHTGKKPYECEECDKAFSFKSNLESHRITHTGEKPYKCNDCGKTFSHMSTLTCHRRLHTGEKPYKCEECDEAFRFKSSLERHRRIHNGEKLYKCNECGKTFSQELSLTCHCRLHSGEKPCKCGECDKAYSFK

SEQ ID NO: 100338 - protein, 50 aa, Homo sapiens
  Payload ID: 19998
  Gene Name: zinc finger protein 525
  ENSP ID: ENSP00000418468
MALPQGLLTFRDVAIEFSQEEWKCLDPAQRTLYRDVMLENYRNLVSLGFL

SEQ ID NO: 100339 - protein, 443 aa, Homo sapiens
  Payload ID: 19998
  Gene Name: zinc finger protein 525
  ENSP ID: ENSP00000419136
MLENYRNLVSLGISSKCTMKEFSSTAQGNTEVIHTGTLQRHERHHIGDFSFQEIEKDIHNFEFQWQEDERNGHEAPMTKIKKLMGSTEQYDHRHAGNKPIKYQLGSSFHSHLSELHIFQPKGKINNQVEKSINDASSVSTAQRISCRPKTHISNNYGDNFLNYSLLTQRQEVRMREKSFQCIESGKAFNYSSLLRKHQIIHLGEKQYKCDVCDKVFIRKRYLARHRRCHTGEKPYKCNECGKSFSQMSSLTYHHRLHTGEKPYKCEECDKAFRHNSALQRHRRIHTGEKPHKCNECGKTFSQKSYLACHRSIHTGKKPYECEECDKAFSFKSNLESHRITHTGEKPYKCNDCGKTFSHMSTLTCHRRLHTGEKPYKCEECDEAFRFKSSLERHRRIHNGEKLYKCNECGKTFSQELSLTCHCRLHSGEKPCKCGECDKAYSFK

SEQ ID NO: 100340 - protein, 119 aa, Homo sapiens
  Payload ID: 19998
  Gene Name: zinc finger protein 525
  ENSP ID: ENSP00000420476
MALPQGLLTFRDVAIEFSQEEWKCLDPAQRTLYRDVMLENYRNLVSLGSCCAVEVGLDLLGSRHPPRPPKKLGLQAPTPVPNYWLLFLNFLHMCVLRANMSLLWTTSSWFLLIESVFAF

SEQ ID NO: 100341 - protein, 52 aa, Homo sapiens
  Payload ID: 19998
  Gene Name: zinc finger protein 525
  ENSP ID: ENSP00000470407
MALPQGLLTFRDVAIEFSQEEWKCLDPAQRTLYRDVMLENYRNLVSLDGVFL

SEQ ID NO: 100342 - protein, 51 aa, Homo sapiens
  Payload ID: 19998
  Gene Name: zinc finger protein 525
  ENSP ID: ENSP00000489237
MSSHKTFRIKRFLAKKQKQNHPTPLWIQIKTGNKIRYDSKRRHWRRTKLGL

SEQ ID NO: 100343 - protein, 670 aa, Homo sapiens
  Payload ID: 19999
  Gene Name: zinc finger protein 526
  Uniprot ID: Q8TF50
  ENSP ID: ENSP00000301215
MAEVVAEVAEMPTQMSPGAVEMSTPMSAEMMEMSTEVTEMTPGEALASSLFFQHHQFMCSECGSLYNTLEEVLSHQEQHMLAVSEEEALTTQNVGLEPELVPGAEGPFQCGECSQLILSPGELLAHQDAHLRESANQIQYQCWDCQELFPSPELWVAHRKAQHLSATVAEPPVPPPLPPPTPLPPPSPPSEVKMEPYECPECSTLCATPEEFLEHQGTHFDSLEKEERNGLEEEEEDDEEDEEDDEEMEDEEAMAEVGDDAVGGDESTAGWAQGCGDCPQHQPSAGARRQHRRTAHSPASATHPFHCSQCQRSFSSANRLQAHGRAHVGGTHECTTCSKVFKKAASLEQHLRLHRGEARYLCVDCGRGFGTELTLVAHRRAHTANPLHRCRCGKTFSNMTKFLYHRRTHAGKSGAPPTGATAPPAPAEPTPPPPPPAPPAQLPCPQCSKSFASASRLSRHRRAVHGPPERRHRCGVCGKGFKKLIHVRNHLRTHTGERPFQCHSCGKTFASLANLSRHQLTHTGARPYQCLDCGKRFTQSSNLQQHRRLHLRPVAFARAPRLPITGLYNKSPYYCGTCGRWFRAMAGLRLHQRVHARARTLTLQPPRSPSPAPPPPPEPQQTIMCTELGETIAIIETSQPLALEDTLQLCQAALGASEAGGLLQLDTAFV

SEQ ID NO: 100344 - protein, 68 aa, Homo sapiens
  Payload ID: 19999
  Gene Name: zinc finger protein 526
  ENSP ID: ENSP00000473075
MAEVVAEVAEMPTQMSPGAVEMSTPMSAEMMEMSTEVTEMTPGEALASSLFFQHHQFMCSECGSLYNT

SEQ ID NO: 100345 - protein, 94 aa, Homo sapiens
  Payload ID: 20000
  Gene Name: zinc finger protein 527
  ENSP ID: ENSP00000348501
MAVGLCKAMSQGLVTFRDVALDFSQEEWEWLKPSQKDLYRDVMLENYRNLVWLGDGCSCCSTLRTTVTAEASSSSSSIQASFHSLALPLMSILA

SEQ ID NO: 100346 - protein, 609 aa, Homo sapiens
  Payload ID: 20000
  Gene Name: zinc finger protein 527
  Uniprot ID: Q8NB42
  ENSP ID: ENSP00000390179
MAVGLCKAMSQGLVTFRDVALDFSQEEWEWLKPSQKDLYRDVMLENYRNLVWLGLSISKPNMISLLEQGKEPWMVERKMSQGHCADWESWCEIEELSPKWFIDEDEISQEMVMERLASHGLECSSFREAWKYKGEFELHQGNAERHFMQVTAVKEISTGKRDNEFSNSGRSIPLKSVFLTQQKVPTIQQVHKFDIYDKLFPQNSVIIEYKRLHAEKESLIGNECEEFNQSTYLSKDIGIPPGEKPYESHDFSKLLSFHSLFTQHQTTHFGKLPHGYDECGDAFSCYSFFTQPQRIHSGEKPYACNDCGKAFSHDFFLSEHQRTHIGEKPYECKECNKAFRQSAHLAQHQRIHTGEKPFACNECGKAFSRYAFLVEHQRIHTGEKPYECKECNKAFRQSAHLNQHQRIHTGEKPYECNQCGKAFSRRIALTLHQRIHTGEKPFKCSECGKTFGYRSHLNQHQRIHTGEKPYECIKCGKFFRTDSQLNRHHRIHTGERPFECSKCGKAFSDALVLIHHKRSHAGEKPYECNKCGKAFSCGSYLNQHQRIHTGEKPYECSECGKAFHQILSLRLHQRIHAGEKPYKCNECGNNFSCVSALRRHQRIHNRETL

SEQ ID NO: 100347 - protein, 146 aa, Homo sapiens
  Payload ID: 20000
  Gene Name: zinc finger protein 527
  ENSP ID: ENSP00000466096
MAVGLCKAMSQGLVTFRDVALDFSQEEWEWLKPSQKDLYRDVMLENYRNLVWLGLSISKPNMISLLEQGKEPWMVERKMSQGHCAGSHSVAQAGVQWHDLGSLQPIPTELKQSSHLSMHTTAPDVVRMVVRRSCSPSLCSLCLAGF

SEQ ID NO: 100348 - protein, 58 aa, Homo sapiens
  Payload ID: 20000
  Gene Name: zinc finger protein 527
  ENSP ID: ENSP00000467136
MAVGLCKAMSQGLVTFRDVALDFSQEEWEWLKPSQKDLYRDVMLENYRNLDSPFLSPT

SEQ ID NO: 100349 - protein, 124 aa, Homo sapiens
  Payload ID: 20000
  Gene Name: zinc finger protein 527
  ENSP ID: ENSP00000468344
MAVGLCKAMSQGLVTFRDVALDFSQEEWEWLKPSQKDLYRDVMLENYRNLVWLGLSISKPNMISLLEQGKEPWMVERKMSQGHCAGSHSVAQAGVQWHDLGSLQPIPTELKQSSHLSMHTTAPG

SEQ ID NO: 100350 - protein, 157 aa, Homo sapiens
  Payload ID: 20000
  Gene Name: zinc finger protein 527
  ENSP ID: ENSP00000468517
MAVGLCKAMSQGLVTFRDVALDFSQEEWEWLKPSQKDLYRDVMLENYRNLVWLDWESWCEIEELSPKWFIDEDEISQEMVMERLASHGLECSSFREAWKYKGEFELHQGNAERHFMQVTAVKEISTGKRDNEFSNSGRSIPLKSVFLTQQKVPTIQQ

SEQ ID NO: 100351 - protein, 628 aa, Homo sapiens
  Payload ID: 20001
  Gene Name: zinc finger protein 528
  Uniprot ID: Q3MIS6
  ENSP ID: ENSP00000353652
MALTQGPLKFMDVAIEFSQEEWKCLDPAQRTLYRDVMLENYRNLVSLGICLPDLSVTSMLEQKRDPWTLQSEEKIANDPDGRECIKGVNTERSSKLGSNAGNKPCKNQLGFTFQLHLSDLQLFQAERKISGCKHFEKPVSDNSSVSPLEKISSSVKSHLLNKYRNNFDHAPLLPQEQKAHIREKAYKCNEHGQVFRASASLTNQVIHNADNPYKCSECGKVFSCSSKLVIHRRMHTGEKPYKCHECGKLFSSNSNLSQHQRIHTGEKPYKCHECDKVFRSSSKLAQHQRIHTGEKPYKCHECDKVFNQIAHLVRHQKIHTGEKPYSCNKCGKVFSRHSYLAEHQTVHTGEKPYKCEECGKAFSVRSSLITHQLIHTGRKPYKCKECDKVFGRKCFLTSHQRIHTRERPYGCSQCGKIFSQKSDLIRHRKTHTDEKPYKCNKCGTAFREFSDLTAHFLIHSGEKPYECKECGKVFRYKSSLTSHHRIHTGEKPYKCNRCGKVFSRSSNLVCHQKIHTGEKPYKCNQCGKVFNQASYLTRHQIIHTGERPYRCSKCGKAFRGCSGLTAHLAIHTEKKSHECKECGKIFTQKSSLTNHHRIHIGEKPYKCTLCSKVFSHNSDLAQHQRVHS

SEQ ID NO: 100352 - protein, 81 aa, Homo sapiens
  Payload ID: 20001
  Gene Name: zinc finger protein 528
  ENSP ID: ENSP00000375664
MALTQGPLKFMDVAIEFSQEEWKCLDPAQRTLYRDVMLENYRNLVSLGICLPDLSVTSMLEQKRDPWTLQSEEKIANDPDG

SEQ ID NO: 100353 - protein, 123 aa, Homo sapiens
  Payload ID: 20001
  Gene Name: zinc finger protein 528
  ENSP ID: ENSP00000375665
MDVAIEFSQEEWKCLDPAQRTLYRDVMLENYRNLVSLGICLPDLSVTSMLEQKRDPWTLQSEEKIANDPDGRECIKGVNTVPLLQQNLLCSRPQSPMFGGHLSDILGVPLLGHQLPPAQTLGD

SEQ ID NO: 100354 - protein, 85 aa, Homo sapiens
  Payload ID: 20001
  Gene Name: zinc finger protein 528
  ENSP ID: ENSP00000404087
  MOD_RES (1)..(1): Any amino acid
XLYRDVMLENYRNLVSLGICLPDLSVTSMLEQKRDPWTLQSEEKIANDPDGRECIKGVNTDSPLLQCITSVPCVFCTASMIHTIP

SEQ ID NO: 100355 - protein, 14 aa, Homo sapiens
  Payload ID: 20001
  Gene Name: zinc finger protein 528
  ENSP ID: ENSP00000413711
MALTQGPLKFMDVA

SEQ ID NO: 100356 - protein, 8 aa, Homo sapiens
  Payload ID: 20001
  Gene Name: zinc finger protein 528
  ENSP ID: ENSP00000432992
MDVAIEFS

SEQ ID NO: 100357 - protein, 3 aa, Homo sapiens
  Payload ID: 20001
  Gene Name: zinc finger protein 528
  ENSP ID: ENSP00000434962
MDV

SEQ ID NO: 100358 - protein, 106 aa, Homo sapiens
  Payload ID: 20001
  Gene Name: zinc finger protein 528
  ENSP ID: ENSP00000469481
MALTQGPLKFMDVAIEFSQEEWKCLDPAQRTLYRDVMLENYRNLVSLGICLPDLSVTSMLEQKRDPWTLQSEEKIANDPDGRECIKGVNTGESSGGQSGGPIIFVF

SEQ ID NO: 100359 - protein, 91 aa, Homo sapiens
  Payload ID: 20001
  Gene Name: zinc finger protein 528
  ENSP ID: ENSP00000470536
MALTQGPLKFMDVAIEFSQEEWKCLDPAQRTLYRDVMLENYRNLVSLGICLPDLSVTSMLEQKRDPWTLQSEEKIANDPDGRECIKGVNTG

SEQ ID NO: 100360 - protein, 458 aa, Homo sapiens
  Payload ID: 20002
  Gene Name: zinc finger protein 529
  ENSP ID: ENSP00000334695
MESSKLCGLEGSIFRNDWQSKSKIDLQGPEVGYFSQMKIISENVPSYKTHESLTLPRRTHDSEKPYEYKEYEKVFSCDLEFDEYQKIHTGGKNYECNQCWKTFGIDNSSMLQLNIHTGVKPCKYMEYGNTCSFYKDFNVYQKIHNEKFYKCKEYRRTFERVGKVTPLQRVHDGEKHFECSFCGKSFRVHAQLTRHQKIHTDEKTYKCMECGKDFRFHSQLTEHQRIHTGEKPYKCMHCEKVFRISSQLIEHQRIHTGEKPYACKECGKAFGVCRELARHQRIHTGKKPYECKACGKVFRNSSSLTRHQRIHTGEKPYKCKECEKAFGVGSELTRHERIHSGQKPYECKECGKFFRLTSALIQHQRIHSGEKPYECKVCGKAFRHSSALTEHQRIHTGEKPYECKACGKAFRHSSSFTKHQRIHTDDKPYECKECGNSFSVVGHLTCQPKIYTGEKSFD

SEQ ID NO: 100361 - protein, 563 aa, Homo sapiens
  Payload ID: 20002
  Gene Name: zinc finger protein 529
  Uniprot ID: Q6P280
  ENSP ID: ENSP00000465578
MANSSFIGDHVHGAPHAVMPEVEFPDQFFTVLTMDHELVTLRDVVINFSQEEWEYLDSAQRNLYWDVMMENYSNLLSLDLESRNETKHLSVGKDIIQNTGSQWEVMESSKLCGLEGSIFRNDWQSKSKIDLQGPEVGYFSQMKIISENVPSYKTHESLTLPRRTHDSEKPYEYKEYEKVFSCDLEFDEYQKIHTGGKNYECNQCWKTFGIDNSSMLQLNIHTGVKPCKYMEYGNTCSFYKDFNVYQKIHNEKFYKCKEYRRTFERVGKVTPLQRVHDGEKHFECSFCGKSFRVHAQLTRHQKIHTDEKTYKCMECGKDFRFHSQLTEHQRIHTGEKPYKCMHCEKVFRISSQLIEHQRIHTGEKPYACKECGKAFGVCRELARHQRIHTGKKPYECKACGKVFRNSSSLTRHQRIHTGEKPYKCKECEKAFGVGSELTRHERIHSGQKPYECKECGKFFRLTSALIQHQRIHSGEKPYECKVCGKAFRHSSALTEHQRIHTGEKPYECKACGKAFRHSSSFTKHQRIHTDDKPYECKECGNSFSVVGHLTCQPKIYTGEKSFD

SEQ ID NO: 100362 - protein, 85 aa, Homo sapiens
  Payload ID: 20002
  Gene Name: zinc finger protein 529
  ENSP ID: ENSP00000465682
MMENYSNLLSLDLESRNETKHLSVGKDIIQNTGSQWEVMESSKLCGLEGSIFRNDWQSKSKIDLQGPEVGYFSQMKIISENVPSY

SEQ ID NO: 100363 - protein, 112 aa, Homo sapiens
  Payload ID: 20002
  Gene Name: zinc finger protein 529
  ENSP ID: ENSP00000465917
  MOD_RES (1)..(1): Any amino acid
XVGKVTPLQRVHDGEKHFECSFCGKSFRVHAQLTRHQKIHTDEKTYKCMECGKDFRFHSQLTEHQRIHTGRLNNLLLEEAEKTMEGKWKLLTYSFPHAGVHLYLRFSCRKKS

SEQ ID NO: 100364 - protein, 92 aa, Homo sapiens
  Payload ID: 20002
  Gene Name: zinc finger protein 529
  ENSP ID: ENSP00000466182
MPEVEFPDQFFTVLTMDHELVTLRDVVINFSQEEWEYLDSAQRNLYWDVMMENYSNLLSLDLESRNETKHLSVGKDIIQNTGSQWEVMESSK

SEQ ID NO: 100365 - protein, 72 aa, Homo sapiens
  Payload ID: 20002
  Gene Name: zinc finger protein 529
  ENSP ID: ENSP00000468594
EKVFRISSQLIEHQRIHTGEKPYACKECGKAFGVCRELARHQRIHTGYTNQDPNEENSFKYLIKLLTQAMRT

SEQ ID NO: 100366 - protein, 110 aa, Homo sapiens
  Payload ID: 20002
  Gene Name: zinc finger protein 529
  ENSP ID: ENSP00000468619
MANSSFIGDHVHGAPHAVMPEVEFPDQFFTVLTMDHELVTLRDVVINFSQEEWEYLDSAQRNLYWDVMMENYSNLLSLDLESRNETKHLSVGKDIIQNTGSQWEVMESSK

SEQ ID NO: 100367 - protein, 599 aa, Homo sapiens
  Payload ID: 20003
  Gene Name: zinc finger protein 530
  Uniprot ID: Q6P9A1
  ENSP ID: ENSP00000332861
MAAALRAPTQQVFVAFEDVAIYFSQEEWELLDEMQRLLYRDVMLENFAVMASLGCWCGAVDEGTPSAESVSVEELSQGRTPKADTSTDKSHPCEICTPVLRDILQMIELHASPCGQKLYLGGASRDFWMSSNLHQLQKLDNGEKLFKVDGDQASFMMNCRFHVSGKPFTFGEVGRDFSATSGLLQHQVTPTIERPHSRIRHLRVPTGRKPLKYTESRKSFREKSVFIQHQRADSGERPYKCSECGKSFSQSSGFLRHRKAHGRTRTHECSECGKSFSRKTHLTQHQRVHTGERPYDCSECGKSFRQVSVLIQHQRVHTGERPYECSECGKSFSHSTNLYRHRSAHTSTRPYECSECGKSFSHSTNLFRHWRVHTGVRPYECSECGKAFSCNIYLIHHQRFHTGERPYVCSECGKSFGQKSVLIQHQRVHTGERPYECSECGKVFSQSSGLFRHRRAHTKTKPYECSECEKSFSCKTDLIRHQTVHTGERPYECSVCGKSFIRKTHLIRHQTVHTNERPYECDECGKSYSQSSALLQHRRVHTGERPYECRECGKSFTRKNHLIQHKTVHTGERPYECSECGKSFSQSSGLLRHRRVHVQ

SEQ ID NO: 100368 - protein, 28 aa, Homo sapiens
  Payload ID: 20003
  Gene Name: zinc finger protein 530
  ENSP ID: ENSP00000471527
MQRLLYRDVMLENFAVMASLGIIECFQE

SEQ ID NO: 100369 - protein, 32 aa, Homo sapiens
  Payload ID: 20003
  Gene Name: zinc finger protein 530
  ENSP ID: ENSP00000472024
MQRLLYRDVMLENFAVMASLGCWCGAVDEGTP

SEQ ID NO: 100370 - protein, 599 aa, Homo sapiens; identical to SEQ ID NO: 100367
  Payload ID: 20003
  Gene Name: zinc finger protein 530
  Uniprot ID: Q6P9A1
  ENSP ID: ENSP00000472564

SEQ ID NO: 100371 - protein, 1301 aa, Homo sapiens
  Payload ID: 20004
  Gene Name: zinc finger protein 532
  Uniprot ID: Q9HCE3
  ENSP ID: ENSP00000338217
MTMGDMKTPDFDDLLAAFDIPDMVDPKAAIESGHDDHESHMKQNAHGEDDSHAPSSSDVGVSVIVKNVRNIDSSEGGEKDGHNPTGNGLHNGFLTASSLDSYSKDGAKSLKGDVPASEVTLKDSTFSQFSPISSAEEFDDDEKIEVDDPPDKEDMRSSFRSNVLTGSAPQQDYDKLKALGGENSSKTGLSTSGNVEKNKAVKRETEASSINLSVYEPFKVRKAEDKLKESSDKVLENRVLDGKLSSEKNDTSLPSVAPSKTKSSSKLSSCIAAIAALSAKKAASDSCKEPVANSRESSPLPKEVNDSPRAADKSPESQNLIDGTKKPSLKQPDSPRSISSENSSKGSPSSPAGSTPAIPKVRIKTIKTSSGEIKRTVTRVLPEVDLDSGKKPSEQTASVMASVTSLLSSPASAAVLSSPPRAPLQSAVVTNAVSPAELTPKQVTIKPVATAFLPVSAVKTAGSQVINLKLANNTTVKATVISAASVQSASSAIIKAANAIQQQTVVVPASSLANAKLVPKTVHLANLNLLPQGAQATSELRQVLTKPQQQIKQAIINAAASQPPKKVSRVQVVSSLQSSVVEAFNKVLSSVNPVPVYIPNLSPPANAGITLPTRGYKCLECGDSFALEKSLTQHYDRRSVRIEVTCNHCTKNLVFYNKCSLLSHARGHKEKGVVMQCSHLILKPVPADQMIVSPSSNTSTSTSTLQSPVGAGTHTVTKIQSGITGTVISAPSSTPITPAMPLDEDPSKLCRHSLKCLECNEVFQDETSLATHFQQAADTSGQKTCTICQMLLPNQCSYASHQRIHQHKSPYTCPECGAICRSVHFQTHVTKNCLHYTRRVGFRCVHCNVVYSDVAALKSHIQGSHCEVFYKCPICPMAFKSAPSTHSHAYTQHPGIKIGEPKIIYKCSMCDTVFTLQTLLYRHFDQHIENQKVSVFKCPDCSLLYAQKQLMMDHIKSMHGTLKSIEGPPNLGINLPLSIKPATQNSANQNKEDTKSMNGKEKLEKKSPSPVKKSMETKKVASPGWTCWECDCLFMQRDVYISHVRKEHGKQMKKHPCRQCDKSFSSSHSLCRHNRIKHKGIRKVYACSHCPDSRRTFTKRLMLEKHVQLMHGIKDPDLKEMTDATNEEETEIKEDTKVPSPKRKLEEPVLEFRPPRGAITQPLKKLKINVFKVHKCAVCGFTTENLLQFHEHIPQHKSDGSSYQCRECGLCYTSHVSLSRHLFIVHKLKEPQPVSKQNGAGEDNQQENKPSHEDESPDGAVSDRKCKVCAKTFETEAALNTHMRTHGMAFIKSKRMSSAEK

SEQ ID NO: 100372 - protein, 124 aa, Homo sapiens
  Payload ID: 20004
  Gene Name: zinc finger protein 532
  ENSP ID: ENSP00000464894
PSKLCRHSLKCLECNEVFQDETSLATHFQQAADTSGQQMKKHPCRQCDKSFSSSHSLCRHNRIKHKGIRKVYACSHCPDSRRTFTKRLMLEKHVQLMHGIKDPDLKEMTDATNEEETEIKEDTK

SEQ ID NO: 100373 - protein, 93 aa, Homo sapiens
  Payload ID: 20004
  Gene Name: zinc finger protein 532
  ENSP ID: ENSP00000465236
MTMGDMKTPDFDDLLAAFDIPDMVDPKAAIESGHDDHESHMKQNAHGEDDSHAPSSSDVGVSVIVKNVRNIDSSEGGEKDGHNPTGNGLHNGF

SEQ ID NO: 100374 - protein, 1301 aa, Homo sapiens; identical to SEQ ID NO: 100371
  Payload ID: 20004
  Gene Name: zinc finger protein 532
  Uniprot ID: Q9HCE3
  ENSP ID: ENSP00000465709

SEQ ID NO: 100375 - protein, 81 aa, Homo sapiens
  Payload ID: 20004
  Gene Name: zinc finger protein 532
  ENSP ID: ENSP00000465802
MTMGDMKTPDFDDLLAAFDIPDMVDPKAAIESGHDDHESHMKQNAHGEDDSHAPSSSDVGVSVIVKNVRNIDSSEGGEKDG

SEQ ID NO: 100376 - protein, 118 aa, Homo sapiens
  Payload ID: 20004
  Gene Name: zinc finger protein 532
  ENSP ID: ENSP00000465873
MTMGDMKTPDFDDLLAAFDIPDMVDPKAAIESGHDDHESHMKQNAHGEDDSHAPSSSDVGVSVIVKNVRNIDSSEGGEKDGHNPTGNGLHNGFLTASSLDSYSKDGAKSLKGDVPASE

SEQ ID NO: 100377 - protein, 160 aa, Homo sapiens
  Payload ID: 20004
  Gene Name: zinc finger protein 532
  ENSP ID: ENSP00000466002
MTMGDMKTPDFDDLLAAFDIPDMVDPKAAIESGHDDHESHMKQNAHGEDDSHAPSSSDVGVSVIVKNVRNIDSSEGGEKDGHNPTGNGLHNGFLTASSLDSYSKDGAKSLKGDVPASEVTLKDSTFSQFSPISSAEEFDDDEKIEVDDPPDKEDMRSSFR

SEQ ID NO: 100378 - protein, 1301 aa, Homo sapiens; identical to SEQ ID NO: 100371
  Payload ID: 20004
  Gene Name: zinc finger protein 532
  Uniprot ID: Q9HCE3
  ENSP ID: ENSP00000466007

SEQ ID NO: 100379 - protein, 118 aa, Homo sapiens
  Payload ID: 20004
  Gene Name: zinc finger protein 532
  ENSP ID: ENSP00000466172
  MOD_RES (1)..(1): Any amino acid
XLKPVPADQMIVSPSSNTSTSTSTLQSPVGAGTHTVTKIQSGITGTVISAPSSTPITPAMPLDEDPSKLCRHSLKCLECNEVFQDETSLATHFQQAADTSGQNGMEPARWLTPVVPAL

SEQ ID NO: 100380 - protein, 68 aa, Homo sapiens
  Payload ID: 20004
  Gene Name: zinc finger protein 532
  ENSP ID: ENSP00000466488
MTMGDMKTPDFDDLLAAFDIPDMVDPKAAIESGHDDHESHMKQNAHGEDDSHAPSSSDVGVSVIVKNV

SEQ ID NO: 100381 - protein, 116 aa, Homo sapiens
  Payload ID: 20004
  Gene Name: zinc finger protein 532
  ENSP ID: ENSP00000466808
KPVPADQMIVSPSSNTSTSTSTLQSPVGAGTHTVTKIQSGITGTVISAPSSTPITPAMPLDEDPSKLCRHSLKCLECNEVFQDETSLATHFQQAADTSGQNGMEPARWLTPVVPAL

SEQ ID NO: 100382 - protein, 107 aa, Homo sapiens
  Payload ID: 20004
  Gene Name: zinc finger protein 532
  ENSP ID: ENSP00000467229
MTMGDMKTPDFDDLLAAFDIPDMVDPKAAIESGHDDHESHMKQNAHGEDDSHAPSSSDVGVSVIVKNVRNIDSSEGGEKDGHNPTGNGLHNGFLTASSLDSYSKDGA

SEQ ID NO: 100383 - protein, 121 aa, Homo sapiens
  Payload ID: 20004
  Gene Name: zinc finger protein 532
  ENSP ID: ENSP00000467402
MTMGDMKTPDFDDLLAAFDIPDMVDPKAAIESGHDDHESHMKQNAHGEDDSHAPSSSDVGVSVIVKNVRNIDSSEGGEKDGHNPTGNGLHNGFLTASSLDSYSKDGAKSLKGDVPASEVTL

SEQ ID NO: 100384 - protein, 129 aa, Homo sapiens
  Payload ID: 20004
  Gene Name: zinc finger protein 532
  ENSP ID: ENSP00000467903
  MOD_RES (1)..(1): Any amino acid
XSLLYAQKQLMMDHIKSMHGTLKSIEGPPNLGINLPLSIKPATQNSANQNKEDTKSMNGKEKLEKKSPSPVKKSMETKKVASPGWTCWECDCLFMQRDVYISHVRKEHGKWEEEPHPLTSSRSSVTPSH

SEQ ID NO: 100385 - protein, 124 aa, Homo sapiens
  Payload ID: 20004
  Gene Name: zinc finger protein 532
  ENSP ID: ENSP00000468009
MTMGDMKTPDFDDLLAAFDIPDMVDPKAAIESGHDDHESHMKQNAHGEDDSHAPSSSDVGVSVIVKNVRNIDSSEGGEKDGHNPTGNGLHNGFLTASSLDSYSKDGAKSLKGDVPASEVTLKDS

SEQ ID NO: 100386 - protein, 73 aa, Homo sapiens
  Payload ID: 20004
  Gene Name: zinc finger protein 532
  ENSP ID: ENSP00000468073
MTMGDMKTPDFDDLLAAFDIPDMVDPKAAIESGHDDHESHMKQNAHGEDDSHAPSSSDVGVSVIVKNVRNIDS

SEQ ID NO: 100387 - protein, 1301 aa, Homo sapiens; identical to SEQ ID NO: 100371
  Payload ID: 20004
  Gene Name: zinc finger protein 532
  Uniprot ID: Q9HCE3
  ENSP ID: ENSP00000468238

SEQ ID NO: 100388 - protein, 1301 aa, Homo sapiens; identical to SEQ ID NO: 100371
  Payload ID: 20004
  Gene Name: zinc finger protein 532
  Uniprot ID: Q9HCE3
  ENSP ID: ENSP00000468532

SEQ ID NO: 100389 - protein, 136 aa, Homo sapiens
  Payload ID: 20004
  Gene Name: zinc finger protein 532
  ENSP ID: ENSP00000468551
MHLSICSSTHPSVHPPTQLSVYQEHLLKLMTMGDMKTPDFDDLLAAFDIPDMVDPKAAIESGHDDHESHMKQNAHGEDDSHAPSSSDVGVSVIVKNVRNIDSSEGGEKDGHNPTGNGLHNGFLTASSLDSYSKDGA

SEQ ID NO: 100390 - protein, 193 aa, Homo sapiens
  Payload ID: 20005
  Gene Name: zinc finger protein 534
  ENSP ID: ENSP00000301085
MALTQGQLSFSDVAIEFSQEEWKCLDPGQKALYRDVMLENYRNLVSLGICLPDLSVTSMLEQKRDPWTLQSEVKIINNPDGRECIKGVNTDFSLLAWDARVFRVEAWRASGGAEEPTGPNFVGNDSPLPSPLALLPFPSVSASLGDAKRARLTAEGRGHGTLRAGPAPRPRSAAPHAPDAVQRWPPEQRLPRS

SEQ ID NO: 100391 - protein, 674 aa, Homo sapiens
  Payload ID: 20005
  Gene Name: zinc finger protein 534
  Uniprot ID: Q76KX8
  ENSP ID: ENSP00000327538
MALTQGQLSFSDVAIEFSQEEWKCLDPGQKALYRDVMLENYRNLVSLGEDNVRPEACICSGICLPDLSVTSMLEQKRDPWTLQSEVKIINNPDGRECIKGVNTEKSSKLGSSAGNKSLKNQHGLTLQLHLTEWQPFQAVRNIYGCKHVEKSISDNSSVSPVQISFFSVKTHIFNNYRNDFLFSTLLPQEQKVHIREKPYGCNEHGKVFRVSSSLTNRQVIHIADKTYKCSDCGEIFSSNSNFAQHQRIHTGEKPYKYNECGKVFNQNSHLAQHQKIHTGQKPYNNKECGKVFSHHAYLAQHRKIHTGEKPYKCSECGKAFSVCSSLTAHLVIHTGEKPYDCKECGKVFRHKSSLTTHQTVHTGERPYKCNECGKGFSRIAFLARHRKVHTGEKPYKCNECGKVFIGNSRLARHRKIHTGGRRYKCNECGKAFRTCSDLTAHLLIHTGEKPYECIDCGKVFRHKSSLTYHCRIHTGEKPYKCNECGKVFSQNSNLQRHRKIHTGEKLYKCNECGKVFRQNSHLAQHRDIHTGEKPYSCNECGKVFRRNSHLVRHRNVHTGEKPYSCNECGKVFSRNSHLARHRNIHTGEKPHSCNECGKVFSRNSHLARHRKIHTGEKLYKCNECSKVFSRNSRLAQHRNIHTGVKPYSCNECGKVFSKNSILVQHCSIHTREKP

SEQ ID NO: 100392 - protein, 661 aa, Homo sapiens
  Payload ID: 20005
  Gene Name: zinc finger protein 534
  Uniprot ID: Q76KX8
  ENSP ID: ENSP00000391358
MALTQGQLSFSDVAIEFSQEEWKCLDPGQKALYRDVMLENYRNLVSLGICLPDLSVTSMLEQKRDPWTLQSEVKIINNPDGRECIKGVNTEKSSKLGSSAGNKSLKNQHGLTLQLHLTEWQPFQAVRNIYGCKHVEKSISDNSSVSPVQISFFSVKTHIFNNYRNDFLFSTLLPQEQKVHIREKPYGCNEHGKVFRVSSSLTNRQVIHIADKTYKCSDCGEIFSSNSNFAQHQRIHTGEKPYKYNECGKVFNQNSHLAQHQKIHTGQKPYNNKECGKVFSHHAYLAQHRKIHTGEKPYKCSECGKAFSVCSSLTAHLVIHTGEKPYDCKECGKVFRHKSSLTTHQTVHTGERPYKCNECGKGFSRIAFLARHRKVHTGEKPYKCNECGKVFIGNSRLARHRKIHTGGRRYKCNECGKAFRTCSDLTAHLLIHTGEKPYECIDCGKVFRHKSSLTYHCRIHTGEKPYKCNECGKVFSQNSNLQRHRKIHTGEKLYKCNECGKVFRQNSHLAQHRDIHTGEKPYSCNECGKVFRRNSHLVRHRNVHTGEKPYSCNECGKVFSRNSHLARHRNIHTGEKPHSCNECGKVFSRNSHLARHRKIHTGEKLYKCNECSKVFSRNSRLAQHRNIHTGVKPYSCNECGKVFSKNSILVQHCSIHTREKP

SEQ ID NO: 100393 - protein, 150 aa, Homo sapiens
  Payload ID: 20005
  Gene Name: zinc finger protein 534
  ENSP ID: ENSP00000409421
MALTQGQLSFSDVAIEFSQEEWKCLDPGQKALYRDVMLENYRNLVSLDFSLLAWDARVFRVEAWRASGGAEEPTGPNFVGNDSPLPSPLALLPFPSVSASLGDAKRARLTAEGRGHGTLRAGPAPRPRSAAPHAPDAVQRWPPEQRLPRS

SEQ ID NO: 100394 - protein, 193 aa, Homo sapiens; identical to SEQ ID NO: 100390
  Payload ID: 20005
  Gene Name: zinc finger protein 534
  ENSP ID: ENSP00000480956

SEQ ID NO: 100395 - protein, 1300 aa, Homo sapiens
  Payload ID: 20006
  Gene Name: zinc finger protein 536
  Uniprot ID: O15090
  ENSP ID: ENSP00000347730
MEEASLCLGVSSAEPEAEPHLSGPVLNGQYAMSQKLHQITSQLSHAFPELHPRPNPEEKPPASLEEKAHVPMSGQPMGSQMALLANQLGREVDTSLNGRVDLQQFLNGQNLGIMSQMSDIEDDARKNRKYPCPLCGKRFRFNSILSLHMRTHTGEKPFKCPYCDHRAAQKGNLKIHLRTHKLGNLGKGRGRVREENRLLHELEERAILRDKQLKGSLLQPRPDLKPPPHAQQAPLAACTLALQANHSVPDVAHPVPSPKPASVQEDAVAPAAGFRCTFCKGKFKKREELDRHIRILHKPYKCTLCDFAASQEEELISHVEKAHITAESAQGQGPNGGGEQSANEFRCEVCGQVFSQAWFLKGHMRKHKDSFEHCCQICGRRFKEPWFLKNHMKVHLNKLSVKNKSPSDPEVPVPMGGMSQEAHANLYSRYLSCLQSGFMTPDKAGLSEPSQLYGKGELPMKEKEALGKLLSPISSMAHGVPEGDKHSLLGCLNLVPPLKSSCIERLQAAAKAAEMDPVNSYQAWQLMARGMAMEHGFLSKEHPLQRNHEDTLANAGVLFDKEKREYVLVGADGSKQKMPADLVHSTKVGSQRDLPSKLDPLESSRDFLSHGLNQTLEYNLQGPGNMKEKPTECPDCGRVFRTYHQVVVHSRVHKRDRKGEEDGLHVGLDERRGSGSDQESQSVSRSTTPGSSNVTEESGVGGGLSQTGSAQEDSPHPSSPSSSDIGEEAGRSAGVQQPALLRDRSLGSAMKDCPYCGKTFRTSHHLKVHLRIHTGEKPYKCPHCDYAGTQSASLKYHLERHHRERQNGAGPLSGQPPNQDHKDEMSSKASLFIRPDILRGAFKGLPGIDFRGGPASQQWTSGVLSSGDHSGQATGMSSEVPSDALKGTDLPSKSTHFSEIGRAYQSIVSNGVNFQGSLQAFMDSFVLSSLKKEKDMKDKALADPPSMKVHGVDGGEEKPSGKSSQRKSEKSQYEPLDLSVRPDAASLPGSSVTVQDSIAWHGCLFCAFTTSSMELMALHLQANHLGKAKRKDNTIGVTVNCKDQAREASKMALLPSLQSNKDLGLSNMISSLDSASEKMAQGQLKETLGEQKSGAWTGHVDPAFCNFPSDFYKQFGVYPGMVGSGASSSCPNKEPDGKAHSEEDVPILIPETTSKNTTDDLSDIASSEDMDSSKGENNDEEDVETEPEMMTKPLSALSKDSSSDGGDSLQPTGTSQPVQGLVSPLSQAPEKQWHSQGLLQAQDPLAGLPKPERGPQSLDKPMNMLSVLRAYSSDGLAAFNGLASSTANSGCIKRPDLCGK

SEQ ID NO: 100396 - protein, 138 aa, Homo sapiens
  Payload ID: 20006
  Gene Name: zinc finger protein 536
  ENSP ID: ENSP00000465268
MEEASLCLGVSSAEPEAEPHLSGPVLNGQYAMSQKLHQITSQLSHAFPELHPRPNPEEKPPASLEEKAHVPMSGQPMGSQMALLANQLGREVDTSLNGRVDLQQFLNGQNLGIMSQMSDIEDDARKNRKYPCPLCGKR

SEQ ID NO: 100397 - protein, 949 aa, Homo sapiens
  Payload ID: 20006
  Gene Name: zinc finger protein 536
  ENSP ID: ENSP00000465771
MEEASLCLGVSSAEPEAEPHLSGPVLNGQYAMSQKLHQITSQLSHAFPELHPRPNPEEKPPASLEEKAHVPMSGQPMGSQMALLANQLGREVDTSLNGRVDLQQFLNGQNLGIMSQMSDIEDDARKNRKYPCPLCGKRFRFNSILSLHMRTHTGEKPFKCPYCDHRAAQKGNLKIHLRTHKLGNLGKGRGRVREENRLLHELEERAILRDKQLKGSLLQPRPDLKPPPHAQQAPLAACTLALQANHSVPDVAHPVPSPKPASVQEDAVAPAAGFRCTFCKGKFKKREELDRHIRILHKPYKCTLCDFAASQEEELISHVEKAHITAESAQGQGPNGGGEQSANEFRCEVCGQVFSQAWFLKGHMRKHKDSFEHCCQICGRRFKEPWFLKNHMKVHLNKLSVKNKSPSDPEVPVPMGGMSQEAHANLYSRYLSCLQSGFMTPDKAGLSEPSQLYGKGELPMKEKEALGKLLSPISSMAHGVPEGDKHSLLGCLNLVPPLKSSCIERLQAAAKAAEMDPVNSYQAWQLMARGMAMEHGFLSKEHPLQRNHEDTLANAGVLFDKEKREYVLVGADGSKQKMPADLVHSTKVGSQRDLPSKLDPLESSRDFLSHGLNQTLEYNLQGPGNMKEKPTECPDCGRVFRTYHQVVVHSRVHKRDRKGEEDGLHVGLDERRGSGSDQESQSVSRSTTPGSSNVTEESGVGGGLSQTGSAQEDSPHPSSPSSSDIGEEAGRSAGVQQPALLRDRSLGSAMKDCPYCGKTFRTSHHLKVHLRIHTGEKPYKCPHCDYAGTQSASLKYHLERHHRERQNGAGPLSGQPPNQDHKDEMSSKASLFIRPDILRGAFKGLPGIDFRGGPASQQWTSGVLSSGDHSGQATGMSSEVPSDALKGTDLPSKSTHFSEIGRAYQSIVSNGVNFQGSLQAFMDSFVLSSLKKEKDMKDKALADPPSMKV

SEQ ID NO: 100398 - protein, 137 aa, Homo sapiens
  Payload ID: 20006
  Gene Name: zinc finger protein 536
  ENSP ID: ENSP00000467909
DPLAGLPKPERGPQSLDKPMNMLSVLRAYSSDGLAAFNGLASSTANSGCIKRPDLCGHRPFQCRYCPYSASQKGNLKTHVLCVHRMPFDNSQYPDRRFKRSRVDSEASGNFEEPTAVKAGSSADLTEEGGKGQEETN

SEQ ID NO: 100399 - protein, 660 aa, Homo sapiens
  Payload ID: 20007
  Gene Name: zinc finger protein 540
  Uniprot ID: Q8NDQ6
  ENSP ID: ENSP00000324598
MAHALVTFRDVAIDFSQKEWECLDTTQRKLYRDVMLENYNNLVSLGYSGSKPDVITLLEQGKEPCVVARDVTGRQCPGLLSRHKTKKLSSEKDIHEISLSKESIIEKSKTLRLKGSIFRNEWQNKSEFEGQQGLKERSISQKKIVSKKMSTDRKRPSFTLNQRIHNSEKSCDSHLVQHGKIDSDVKHDCKECGSTFNNVYQLTLHQKIHTGEKSCKCEKCGKVFSHSYQLTLHQRFHTGEKPYECQECGKTFTLYPQLNRHQKIHTGKKPYMCKKCDKGFFSRLELTQHKRIHTGKKSYECKECGKVFQLIFYFKEHERIHTGKKPYECKECGKAFSVCGQLTRHQKIHTGVKPYECKECGKTFRLSFYLTEHRRTHAGKKPYECKECGKSFNVRGQLNRHKTIHTGIKPFACKVCEKAFSYSGDLRVHSRIHTGEKPYECKECGKAFMLRSVLTEHQRLHTGVKPYECKECGKTFRVRSQISLHKKIHTDVKPYKCVRCGKTFRFGFYLTEHQRIHTGEKPYKCKECGKAFIRRGNLKEHLKIHSGLKPYDCKECGKSFSRRGQFTEHQKIHTGVKPYKCKECGKAFSRSVDLRIHQRIHTGEKPYECKQCGKAFRLNSHLTEHQRIHTGEKPYECKVCRKAFRQYSHLYQHQKTHNVI

SEQ ID NO: 100400 - protein, 660 aa, Homo sapiens; identical to SEQ ID NO: 100399
  Payload ID: 20007
  Gene Name: zinc finger protein 540
  Uniprot ID: Q8NDQ6
  ENSP ID: ENSP00000343768

SEQ ID NO: 100401 - protein, 552 aa, Homo sapiens
  Payload ID: 20007
  Gene Name: zinc finger protein 540
  ENSP ID: ENSP00000465503
MAHALVTFRDVAIDFSQKEWECLDTTQRKLYRDVMLENYNNLVSLGYSGSKPDVITLLEQGKEPCVVARDVTGRQCPGLLSRHKTKKLSSEKDIHEISLSKESIIEKSKTLRLKGSIFRNEWQNKSEFEGQQGLKERSISQKKIVSKKMSTDRKRPSFTLNQRIHNSEKSCDSHLVQHGKIDSDVKHDCKECGSTFNNVYQLTLHQKIHTGEKSCKCEKCGKVFSHSYQLTLHQRFHTGEKPYECQECGKTFTLYPQLNRHQKIHTGKKPYMCKKCDKGFFSRLELTQHKRIHTGKKSYECKECGKVFQLIFYFKEHERIHTGKKPYECKECGKAFSVCGQLTRHQKIHTGVKPYECKECGKTFRLSFYLTEHRRTHAGKKPYECKECGKSFNVRGQLNRHKTIHTGIKPFACKVCEKAFSYSGDLRVHSRIHTGEKPYECKECGKAFMLRSVLTEHQRLHTGVKPYECKECGKTFRVRSQISLHKKIHTDVKPYKCVRCGKTFRFGFYLTEHQRIHTGEKPYKCKECGKAFIRRGNLKEHLKIHSGLKPYD

SEQ ID NO: 100402 - protein, 660 aa, Homo sapiens; identical to SEQ ID NO: 100399
  Payload ID: 20007
  Gene Name: zinc finger protein 540
  Uniprot ID: Q8NDQ6
  ENSP ID: ENSP00000466274

SEQ ID NO: 100403 - protein, 628 aa, Homo sapiens
  Payload ID: 20007
  Gene Name: zinc finger protein 540
  Uniprot ID: Q8NDQ6
  ENSP ID: ENSP00000467118
MAHALVTFRDVAIDFSQKEWECLDTTQRKLYRDVMLENYNNLVSLGLLSRHKTKKLSSEKDIHEISLSKESIIEKSKTLRLKGSIFRNEWQNKSEFEGQQGLKERSISQKKIVSKKMSTDRKRPSFTLNQRIHNSEKSCDSHLVQHGKIDSDVKHDCKECGSTFNNVYQLTLHQKIHTGEKSCKCEKCGKVFSHSYQLTLHQRFHTGEKPYECQECGKTFTLYPQLNRHQKIHTGKKPYMCKKCDKGFFSRLELTQHKRIHTGKKSYECKECGKVFQLIFYFKEHERIHTGKKPYECKECGKAFSVCGQLTRHQKIHTGVKPYECKECGKTFRLSFYLTEHRRTHAGKKPYECKECGKSFNVRGQLNRHKTIHTGIKPFACKVCEKAFSYSGDLRVHSRIHTGEKPYECKECGKAFMLRSVLTEHQRLHTGVKPYECKECGKTFRVRSQISLHKKIHTDVKPYKCVRCGKTFRFGFYLTEHQRIHTGEKPYKCKECGKAFIRRGNLKEHLKIHSGLKPYDCKECGKSFSRRGQFTEHQKIHTGVKPYKCKECGKAFSRSVDLRIHQRIHTGEKPYECKQCGKAFRLNSHLTEHQRIHTGEKPYECKVCRKAFRQYSHLYQHQKTHNVI

SEQ ID NO: 100404 - protein, 100 aa, Homo sapiens
  Payload ID: 20007
  Gene Name: zinc finger protein 540
  ENSP ID: ENSP00000467667
MAHALVTFRDVAIDFSQKEWECLDTTQRKLYRDVMLENYNNLVSLAGYSGSKPDVITLLEQGKEPCVVARDVTGRQCPGLLSRHKTKKLSSEKDIHEISL

SEQ ID NO: 100405 - protein, 29 aa, Homo sapiens
  Payload ID: 20007
  Gene Name: zinc finger protein 540
  ENSP ID: ENSP00000468113
MAHVCYPGIRPRNYLQKRTFMKSVYPKRV

SEQ ID NO: 100406 - protein, 679 aa, Homo sapiens
  Payload ID: 20008
  Gene Name: zinc finger protein 541
  ENSP ID: ENSP00000263351
  MOD_RES (1)..(1): Any amino acid
XHSFQWLRNLPGCPKSKGNNVFVVHKPSAVPSREGSESGPGPSSGSPSEESPPGPGGGLEDALPFPAALLRVPAEAPSDPRSASGEDDPCAPKKVKVDCDSFLCQNPGEPGLQEAQKAGGLPADASPLFRQLFLKSQEPLVSHEQMQVFQMITKSQRIFSHAQVAAVSSQLPAPEGKPAALRPLQGPWPQQPPPLAPAVDSLHAGPGNPEAEGSPARRRKTTPGVPREASPGSTRRDAKGGLKVAAVPTPLAAPSLDPSRNPDISSLAKQLRSSKGTLDLEDIFPSTGQRQTQLGGEEPPGASLPGKQAPAENGAASRITKGEKGPACSRGGGYRLLGNPRAPRFSGFRKEKAKMDMCCAASPSQVAMASFSSAGPPADPSKSKLTIFSRIQGGNIYRLPHPVKEENVAGRGNQQNGSPTDWTKPRSTFVCKNCSQMFYTEKGLSSHMCFHSDQWPSPRGKQEPQVFGTEFCKPLRQVLRPEGDRHSPPGTKKPLDPTAAAPLVVPQSIPVVPVTRHIGSMAMIQTKTVAQCVEYYYIWKKMIKFDCGRAPGLEKRVKREPEEVERTEEKVPCSPRERPSHHPTPKLKTKSYRRESILSSSPNAGSKRTPELLGSAESQGIFPCRECERVFDKIKSRNAHMKRHRLQDHVEPIIRVKWPVKPFQLKEEELGADIGPLQW

SEQ ID NO: 100407 - protein, 1365 aa, Homo sapiens
  Payload ID: 20008
  Gene Name: zinc finger protein 541
  ENSP ID: ENSP00000313258
MDQYSLGDEGALPSEMHLPSFSESQGLNCSDTLNRDLGPNTRGFLYAGLSGLDPDPSLPTPDMSSEVLEDNLDTLSLYSGKDSDSVKLLEEYADSESQASLQDLGLGVLKAKEADEGGRATSGSARKGKRQHSSPQNPLLDCSLCGKVFSSASSLSKHYLTHSQERKHVCKICSKAFKRQDHLTGHMLTHQKTKPFVCIEQGCSKSYCDYRSLRRHYEVHHGLCILKEAPPEEEACGDSPHAHESAGQPPPSSLRSLVPPEARSPGSLLPHRDLLRRIVSSIVHQKTPSPGPAPAGASDSEGRNTACPCPASSGSSSCTPAGPHAAPAALDTELPEEPCLPQKEPATDVFTAPNSRAAENGAPDPPEPEPDTALLQARSTAECWPEGGSVPACLPLFRGQTVPASSQPSSHSFQWLRNLPGCPKSKGNNVFVVHKPSAVPSREGSESGPGPSSGSPSEESPPGPGGGLEDALPFPAALLRVPAEAPSDPRSASGEDDPCAPKKVKVDCDSFLCQNPGEPGLQEAQKAGGLPADASPLFRQLFLKSQEPLVSHEQMQVFQMITKSQRIFSHAQVAAVSSQLPAPEGKPAALRPLQGPWPQQPPPLAPAVDSLHAGPGNPEAEGSPARRRKTTPGVPREASPGSTRRDAKGGLKVAAVPTPLAAPSLDPSRNPDISSLAKQLRSSKGTLDLEDIFPSTGQRQTQLGGEEPPGASLPGKQAPAENGAASRITKGEKGPACSRGGGYRLLGNPRAPRFSGFRKEKAKMDMCCAASPSQVAMASFSSAGPPADPSKSKLTIFSRIQGGNIYRLPHPVKEENVAGRGNQQNGSPTDWTKPRSTFVCKNCSQMFYTEKGLSSHMCFHSDQWPSPRGKQEPQVFGTEFCKPLRQVLRPEGDRHSPPGTKKPLDPTAAAPLVVPQSIPVVPVTRHIGSMAMMEWCSRWLQATTCGSKLLQGQEKDGEERDSKESSQQRKRKKRPPPSTAGEPGPAGCHQSRLRSPMFLVDCLLKGLFQCSPYTPPPMLSPIREGSGVYFNTLCSTSTQASPDQLISSMLDQVDGSFGICVVKDDTKISIEPHINIGSRFQAEIPELQERSLAGTDEHVASLVWKPWGDMMISSETQDRVTELCNVACSSVMPGGGTNLELALHCLHEAQGNVQVALETLLLRGPHKPRTHLLADYRYTGSDVWTPIEKRLFKKAFYAHKKDFYLIHKMIQTKTVAQCVEYYYIWKKMIKFDCGRAPGLEKRVKREPEEVERTEEKVPCSPRERPSHHPTPKLKTKSYRRESILSSSPNAGSKRTPELLGSAESQGIFPCRECERVFDKIKSRNAHMKRHRLQDHVEPIIRVKWPVKPFQLKEEELGADIGPLQW

SEQ ID NO: 100408 - protein, 1346 aa, Homo sapiens
  Payload ID: 20008
  Gene Name: zinc finger protein 541
  Uniprot ID: Q9H0D2
  ENSP ID: ENSP00000375770
MDQYSLGDEGALPSEMHLPSFSESQGLNCSDTLNRDLGPNTRGFLYAGLSGLDPDPSLPTPDMSSEVLEDNLDTLSLYSGKDSDSVKLLEEYADSESQASLQDLGLGVLKAKEADEGGRATSGSARKGKRQHSSPQNPLLDCSLCGKVFSSASSLSKHYLTHSQERKHVCKICSKAFKRQDHLTGHMLTHQKTKPFVCIEQGCSKSYCDYRSLRRHYEVHHGLCILKEAPPEEEACGDSPHAHESAGQPPPSSLRSLVPPEARSPGSLLPHRDLLRRIVSSIVHQKTPSPGPAPAGASDSEGRNTACPCPASSGSSSCTPAGPHAAPAALDTELPEEPCLPQKEPATDVFTAPNSRAAENGAPDPPEPEPDTALLQARSTAECWPEGGSVPACLPLFRGQTVPASSQPSSHSFQWLRNLPGCPKSKGNNVFVVHKPSAVPSREGSESGPGPSSGSPSEESPPGPGGGLEDALPFPAALLRVPAEAPSDPRSASGEDDPCAPKKVKVDCDSFLCQNPGEPGLQEAQKAGGLPADASPLFRQLFLKSQEPLVSHEQMQVFQMITKSQRIFSHAQVAAVSSQLPAPEGKPAALRPLQGPWPQQPPPLAPAVDSLHAGPGNPEAEGSPARRRKTTPGVPREASPGSTRRDAKGGLKVAAVPTPLAAPSLDPSRNPDISSLAKQLRSSKGTLDLEDIFPSTGQRQTQLGGEEPPGASLPGKQAPAENGAASRITKGEKGPACSRGGGYRLLGNPRAPRFSGFRKEKAKMDMCCAASPSQVAMASFSSAGPPADPSKSKLTIFSRIQGGNIYRLPHPVKEENVAGRGNQQNGSPTDWTKPRSTFVCKNCSQMFYTEKGLSSHMCFHSDQWPSPRGKQEPQVFGTEFCKPLRQVLRPEGDRHSPPGTKKPLDPTAAAPLVVPQSIPVVPVTRHIGSMAMGQEKDGEERDSKESSQQRKRKKRPPPSTAGEPGPAGCHQSRLRSPMFLVDCLLKGLFQCSPYTPPPMLSPIREGSGVYFNTLCSTSTQASPDQLISSMLDQVDGSFGICVVKDDTKISIEPHINIGSRFQAEIPELQERSLAGTDEHVASLVWKPWGDMMISSETQDRVTELCNVACSSVMPGGGTNLELALHCLHEAQGNVQVALETLLLRGPHKPRTHLLADYRYTGSDVWTPIEKRLFKKAFYAHKKDFYLIHKMIQTKTVAQCVEYYYIWKKMIKFDCGRAPGLEKRVKREPEEVERTEEKVPCSPRERPSHHPTPKLKTKSYRRESILSSSPNAGSKRTPELLGSAESQGIFPCRECERVFDKIKSRNAHMKRHRLQDHVEPIIRVKWPVKPFQLKEEELGADIGPLQW

SEQ ID NO: 100409 - protein, 866 aa, Homo sapiens
  Payload ID: 20008
  Gene Name: zinc finger protein 541
  ENSP ID: ENSP00000471665
  MOD_RES (1)..(1): Any amino acid
XKSKGNNVFVVHKPSAVPSREGSESGPGPSSGSPSEESPPGPGGGLEDALPFPAALLRVPAEAPSDPRSASGEDDPCAPKKVKVDCDSFLCQNPGEPGLQEAQKAGGLPADASPLFRQLFLKSQEPLVSHEQMQVFQMITKSQRIFSHAQVAAVSSQLPAPEGKPAALRPLQGPWPQQPPPLAPAVDSLHAGPGNPEAEGSPARRRKTTPGVPREASPGSTRRDAKGGLKVAAVPTPLAAPSLDPSRNPDISSLAKQLRSSKGTLDLEDIFPSTGQRQTQLGGEEPPGASLPGKQAPAENGAASRITKGEKGPACSRGGGYRLLGNPRAPRFSGFRKEKAKMDMCCAASPSQVAMASFSSAGPPADPSKSKLTIFSRIQGGNIYRLPHPVKEENVAGRGNQQNGSPTDWTKPRSTFVCKNCSQMFYTEKGLSSHMCFHSDQWPSPRGKQEPQGQEKDGEERDSKESSQQRKRKKRPPPSTAGEPGPAGCHQSRLRSPMFLVDCLLKGLFQCSPYTPPPMLSPIREGSGVYFNTLCSTSTQASPDQLISSMLDQVDGSFGICVVKDDTKISIEPHINIGSRFQAEIPELQERSLAGTDEHVASLVWKPWGDMMISSETQDRVTELCNVACSSVMPGGGTNLELALHCLHEAQGNVQVALETLLLRGPHKPRTHLLADYRYTGSDVWTPIEKRLFKKAFYAHKKDFYLIHKMIQTKTVAQCVEYYYIWKKMIKFDCGRAPGLEKRVKREPEEVERTEEKVPCSPRERPSHHPTPKLKTKSYRRESILSSSPNAGSKRTPELLGSAESQGIFPCRECERVFDKIKSRNAHMKRHRLQDHVEPIIRVKWPVKPFQLKEEELGADIGPLQW

SEQ ID NO: 100410 - protein, 600 aa, Homo sapiens
  Payload ID: 20009
  Gene Name: zinc finger protein 543
  Uniprot ID: Q08ER8
  ENSP ID: ENSP00000322545
MAASAQVSVTFEDVAVTFTQEEWGQLDAAQRTLYQEVMLETCGLLMSLGCPLFKPELIYQLDHRQELWMATKDLSQSSYPGDNTKPKTTEPTFSHLALPEEVLLQEQLTQGASKNSQLGQSKDQDGPSEMQEVHLKIGIGPQRGKLLEKMSSERDGLGSDDGVCTKITQKQVSTEGDLYECDSHGPVTDALIREEKNSYKCEECGKVFKKNALLVQHERIHTQVKPYECTECGKTFSKSTHLLQHLIIHTGEKPYKCMECGKAFNRRSHLTRHQRIHSGEKPYKCSECGKAFTHRSTFVLHHRSHTGEKPFVCKECGKAFRDRPGFIRHYIIHTGEKPYECIECGKAFNRRSYLTWHQQIHTGVKPFECNECGKAFCESADLIQHYIIHTGEKPYKCMECGKAFNRRSHLKQHQRIHTGEKPYECSECGKAFTHCSTFVLHKRTHTGEKPYECKECGKAFSDRADLIRHFSIHTGEKPYECVECGKAFNRSSHLTRHQQIHTGEKPYECIQCGKAFCRSANLIRHSIIHTGEKPYECSECGKAFNRGSSLTHHQRIHTGRNPTIVTDVGRPFMTAQTSVNIQELLLGKEFLNITTEENLW

SEQ ID NO: 100411 - protein, 715 aa, Homo sapiens
  Payload ID: 20010
  Gene Name: zinc finger protein 544
  Uniprot ID: Q6NX49
  ENSP ID: ENSP00000269829
MEARSMLVPPQASVCFEDVAMAFTQEEWEQLDLAQRTLYREVTLETWEHIVSLGLFLSKSDVISQLEQEEDLCRAEQEAPRDWKATLEENRLNSEKDRAREELSHHVEVYRSGPEEPPSLVLGKVQDQSNQLREHQENSLRFMVLTSERLFAQREHCELELGGGYSLPSTLSLLPTTLPTSTGFPKPNSQVKELKQNSAFINHEKNGADGKHCESHQCARAFCQSIYLSKLGNVETGKKNPYEYIVSGDSLNYGSSLCFHGRTFSVKKSDDCKDYGNLFSHSVSLNEQKPVHFGKSQYECDECRETCSESLCLVQTERSGPGETPFRCEERCAAFPMASSFSDCNIIQTTEKPSVCNQCGKSFSCCKLIHQRTHTGEKPFECTQCGKSFSQSYDLVIHQRTHTGEKPYECDLCGKSFTQRSKLITHQRIHTGEKPYQCIECRKSFRWNSNLIVHQRIHTGEKPYECTHCGKSFSQSYELVTHKRTHTGEKPFKCTQCGKSFSQKYDLVVHQRTHTGEKPYECNLCGKSFSQSSKLITHQRIHTGEKPYQCIECGKSFRWNSNLVIHQRIHTGEKPYDCTHCGKSFSQSYQLVAHKRTHTGEKPYECNECGKAFNRSTQLIRHLQIHTGEKPYKCNQCNKAFARSSYLVMHQRTHTGEKPFECSQCGKAFSGSSNLLSHHRIHSGEKPYECSDCGKSFRQQSQLVVHRRTHTGEKP

SEQ ID NO: 100412 - protein, 97 aa, Homo sapiens
  Payload ID: 20010
  Gene Name: zinc finger protein 544
  ENSP ID: ENSP00000468975
MEARSMLVPPQASVCFEDVAMAFTQEEWEQLDLAQRTLYREVTLETWEHIVSLGLFLSKSDVISQLEQEEDLCRAEQEAPRDGVSLLLPRLECNGTI

SEQ ID NO: 100413 - protein, 573 aa, Homo sapiens
  Payload ID: 20010
  Gene Name: zinc finger protein 544
  ENSP ID: ENSP00000469514
MVLTSERLFAQREHCELELGGGYSLPSTLSLLPTTLPTSTGFPKPNSQVKELKQNSAFINHEKNGADGKHCESHQCARAFCQSIYLSKLGNVETGKKNPYEYIVSGDSLNYGSSLCFHGRTFSVKKSDDCKDYGNLFSHSVSLNEQKPVHFGKSQYECDECRETCSESLCLVQTERSGPGETPFRCEERCAAFPMASSFSDCNIIQTTEKPSVCNQCGKSFSCCKLIHQRTHTGEKPFECTQCGKSFSQSYDLVIHQRTHTGEKPYECDLCGKSFTQRSKLITHQRIHTGEKPYQCIECRKSFRWNSNLIVHQRIHTGEKPYECTHCGKSFSQSYELVTHKRTHTGEKPFKCTQCGKSFSQKYDLVVHQRTHTGEKPYECNLCGKSFSQSSKLITHQRIHTGEKPYQCIECGKSFRWNSNLVIHQRIHTGEKPYDCTHCGKSFSQSYQLVAHKRTHTGEKPYECNECGKAFNRSTQLIRHLQIHTGEKPYKCNQCNKAFARSSYLVMHQRTHTGEKPFECSQCGKAFSGSSNLLSHHRIHSGEKPYECSDCGKSFRQQSQLVVHRRTHTGEKP

SEQ ID NO: 100414 - protein, 715 aa, Homo sapiens; identical to SEQ ID NO: 100411
  Payload ID: 20010
  Gene Name: zinc finger protein 544
  Uniprot ID: Q6NX49
  ENSP ID: ENSP00000469635

SEQ ID NO: 100415 - protein, 97 aa, Homo sapiens
  Payload ID: 20010
  Gene Name: zinc finger protein 544
  ENSP ID: ENSP00000470645
MEARSMLVPPQASVCFEDVAMAFTQEEWEQLDLAQRTLYREVTLETWEHIVSLGLFLSKSDVISQLEQEEDLCRAEQEAPRGTRPSKKQRRYRARRI

SEQ ID NO: 100416 - protein, 139 aa, Homo sapiens
  Payload ID: 20010
  Gene Name: zinc finger protein 544
  ENSP ID: ENSP00000470843
MEARSMLVPPQASVCFEDVAMAFTQEEWEQLDLAQRTLYREVTLETWEHIVSLGLFLSKSDVISQLEQEEDLCRAEQEAPREKGMLPGSFLGLPIEDRFSLLEGCLIQFPQQLPLAQERGPAKSRDGTGPEGSERVWPA

SEQ ID NO: 100417 - protein, 74 aa, Homo sapiens
  Payload ID: 20010
  Gene Name: zinc finger protein 544
  ENSP ID: ENSP00000471452
MEARSMLVPPQASVCFEDVAMAFTQEEWEQLDLAQRTLYREVTLETWEHIVSLAGARRGPVQGRAGGPPSLKKW

SEQ ID NO: 100418 - protein, 75 aa, Homo sapiens
  Payload ID: 20010
  Gene Name: zinc finger protein 544
  ENSP ID: ENSP00000471480
MEARSMLVPPQASVCFEDVAMAFTQEEWEQLDLAQRTLYREVTLETWEHIVSLAGARRGPVQGRAGGPPRLESYP

SEQ ID NO: 100419 - protein, 687 aa, Homo sapiens
  Payload ID: 20010
  Gene Name: zinc finger protein 544
  ENSP ID: ENSP00000471684
MEARSMLVPPQASVCFEDVAMAFTQEEWEQLDLAQRTLYREVTLETWEHIVSLDWKATLEENRLNSEKDRAREELSHHVEVYRSGPEEPPSLVLGKVQDQSNQLREHQENSLRFMVLTSERLFAQREHCELELGGGYSLPSTLSLLPTTLPTSTGFPKPNSQVKELKQNSAFINHEKNGADGKHCESHQCARAFCQSIYLSKLGNVETGKKNPYEYIVSGDSLNYGSSLCFHGRTFSVKKSDDCKDYGNLFSHSVSLNEQKPVHFGKSQYECDECRETCSESLCLVQTERSGPGETPFRCEERCAAFPMASSFSDCNIIQTTEKPSVCNQCGKSFSCCKLIHQRTHTGEKPFECTQCGKSFSQSYDLVIHQRTHTGEKPYECDLCGKSFTQRSKLITHQRIHTGEKPYQCIECRKSFRWNSNLIVHQRIHTGEKPYECTHCGKSFSQSYELVTHKRTHTGEKPFKCTQCGKSFSQKYDLVVHQRTHTGEKPYECNLCGKSFSQSSKLITHQRIHTGEKPYQCIECGKSFRWNSNLVIHQRIHTGEKPYDCTHCGKSFSQSYQLVAHKRTHTGEKPYECNECGKAFNRSTQLIRHLQIHTGEKPYKCNQCNKAFARSSYLVMHQRTHTGEKPFECSQCGKAFSGSSNLLSHHRIHSGEKPYECSDCGKSFRQQSQLVVHRRTHTGEKP

SEQ ID NO: 100420 - protein, 75 aa, Homo sapiens; identical to SEQ ID NO: 100418
  Payload ID: 20010
  Gene Name: zinc finger protein 544
  ENSP ID: ENSP00000472512

SEQ ID NO: 100421 - protein, 75 aa, Homo sapiens; identical to SEQ ID NO: 100418
  Payload ID: 20010
  Gene Name: zinc finger protein 544
  ENSP ID: ENSP00000472614

SEQ ID NO: 100422 - protein, 687 aa, Homo sapiens; identical to SEQ ID NO: 100419
  Payload ID: 20010
  Gene Name: zinc finger protein 544
  ENSP ID: ENSP00000472721

SEQ ID NO: 100423 - protein, 106 aa, Homo sapiens
  Payload ID: 20010
  Gene Name: zinc finger protein 544
  ENSP ID: ENSP00000485736
MEARSMLVPPQASVCFEDVAMAFTQEEWEQLDLAQRTLYREVTLETWEHIVSLGLFLSKSDVISQLEQEEDLCRAEQEAPRGTSGLSQVTGVVADGSFRFPVWDFT

SEQ ID NO: 100424 - protein, 836 aa, Homo sapiens
  Payload ID: 20011
  Gene Name: zinc finger protein 546
  Uniprot ID: Q86UE3
  ENSP ID: ENSP00000339823
MQVDPPLHGPPNDFLIFQIIPLHSLSIMPRFLWILCFSMEETQGELTSSCGSKTMANVSLAFRDVSIDLSQEEWECLDAVQRDLYKDVMLENYSNLVSLGYTIPKPDVITLLEQEKEPWIVMREGTRNWFTDLEYKYITKNLLSEKNVCKIYLSQLQTGEKSKNTIHEDTIFRNGLQCKHEFERQERHQMGCVSQMLIQKQISHPLHPKIHAREKSYECKECRKAFRQQSYLIQHLRIHTGERPYKCMECGKAFCRVGDLRVHHTIHAGERPYECKECGKAFRLHYHLTEHQRIHSGVKPYECKECGKAFSRVRDLRVHQTIHAGERPYECKECGKAFRLHYQLTEHQRIHTGERPYECKVCGKTFRVQRHISQHQKIHTGVKPYKCNECGKAFSHGSYLVQHQKIHTGEKPYECKECGKSFSFHAELARHRRIHTGEKPYECRECGKAFRLQTELTRHHRTHTGEKPYECKECGKAFICGYQLTLHLRTHTGEIPYECKECGKTFSSRYHLTQHYRIHTGEKPYICNECGKAFRLQGELTRHHRIHTCEKPYECKECGKAFIHSNQFISHQRIHTSESTYICKECGKIFSRRYNLTQHFKIHTGEKPYICNECGKAFRFQTELTQHHRIHTGEKPYKCTECGKAFIRSTHLTQHHRIHTGEKPYECTECGKTFSRHYHLTQHHRGHTGEKPYICNECGNAFICSYRLTLHQRIHTGELPYECKECGKTFSRRYHLTQHFRLHTGEKPYSCKECGNAFRLQAELTRHHIVHTGEKPYKCKECGKAFSVNSELTRHHRIHTGEKPYQCKECGKAFIRSDQLTLHQRNHISEEVLCIM

SEQ ID NO: 100425 - protein, 126 aa, Homo sapiens
  Payload ID: 20011
  Gene Name: zinc finger protein 546
  ENSP ID: ENSP00000469168
MEETQGELTSSCGSKTMANVSLAFRDVSIDLSQEEWECLDAVQRDLYKDVMLENYSNLVSLGYTIPKPDVITLLEQEKEPWIVMREGTRNWFTESRSVTQAGVQWHNLGSLQPPPPGFKQFFCLSL

SEQ ID NO: 100426 - protein, 139 aa, Homo sapiens
  Payload ID: 20011
  Gene Name: zinc finger protein 546
  ENSP ID: ENSP00000469334
MEETQGELTSSCGSKTMANVSLAFRDVSIDLSQEEWECLDAVQRDLYKDVMLENYSNLVSLGYTIPKPDVITLLEQEKEPWIVMREGTRNWFTDLEYKYITKNLLSEKNVCKIYLSQLQTGEKSKNTIHEDTIFRNGLQ

SEQ ID NO: 100427 - protein, 810 aa, Homo sapiens
  Payload ID: 20011
  Gene Name: zinc finger protein 546
  ENSP ID: ENSP00000469540
MQPRFLWILCFSMEETQGELTSSCGSKTMANVSLAFRDVSIDLSQEEWECLDAVQRDLYKDVMLENYSNLVSLGYTIPKPDVITLLEQEKEPWIVMREGTRNWFTDLEYKYITKNLLSEKNVCKIYLSQLQTGEKSKNTIHEDTIFRNGLQCKHEFERQERHQMGCVSQMLIQKQISHPLHPKIHAREKSYECKECRKAFRQQSYLIQHLRIHTGERPYKCMECGKAFCRVGDLRVHHTIHAGERPYECKECGKAFRLHYHLTEHQRIHSGVKPYECKECGKAFSRVRDLRVHQTIHAGERPYECKECGKAFRLHYQLTEHQRIHTGERPYECKVCGKTFRVQRHISQHQKIHTGVKPYKCNECGKAFSHGSYLVQHQKIHTGEKPYECKECGKSFSFHAELARHRRIHTGEKPYECRECGKAFRLQTELTRHHRTHTGEKPYECKECGKAFICGYQLTLHLRTHTGEIPYECKECGKTFSSRYHLTQHYRIHTGEKPYICNECGKAFRLQGELTRHHRIHTCEKPYECKECGKAFIHSNQFISHQRIHTSESTYICKECGKIFSRRYNLTQHFKIHTGEKPYICNECGKAFRFQTELTQHHRIHTGEKPYKCTECGKAFIRSTHLTQHHRIHTGEKPYECTECGKTFSRHYHLTQHHRGHTGEKPYICNECGNAFICSYRLTLHQRIHTGELPYECKECGKTFSRRYHLTQHFRLHTGEKPYSCKECGNAFRLQAELTRHHIVHTGEKPYKCKECGKAFSVNSELTRHHRIHTGEKPYQCKECGKAFIRSDQLTLHQRNHISEEVLCIM

SEQ ID NO: 100428 - protein, 37 aa, Homo sapiens
  Payload ID: 20011
  Gene Name: zinc finger protein 546
  ENSP ID: ENSP00000470423
MQSLVLLPRLECSDVILAYCNLHLPGKLHEPKWQRLQ

SEQ ID NO: 100429 - protein, 124 aa, Homo sapiens
  Payload ID: 20011
  Gene Name: zinc finger protein 546
  ENSP ID: ENSP00000472403
MQVDPPLHGPPNDFLIFQIIPLHSLSIMPRFLWILCFSMEETQGELTSSCGSKTMANVSLAFRDVSIDLSQEEWECLDAVQRDLYKDVMLENYSNLVSLGYTIPKPDVITLLEQEKEPWIVMRE

SEQ ID NO: 100430 - protein, 139 aa, Homo sapiens; identical to SEQ ID NO: 100426
  Payload ID: 20011
  Gene Name: Zinc finger protein 546
  ENSP ID: ENSP00000486015

SEQ ID NO: 100431 - protein, 124 aa, Homo sapiens; identical to SEQ ID NO: 100429
  Payload ID: 20011
  Gene Name: Zinc finger protein 546
  ENSP ID: ENSP00000486294

SEQ ID NO: 100432 - protein, 126 aa, Homo sapiens; identical to SEQ ID NO: 100425
  Payload ID: 20011
  Gene Name: Zinc finger protein 546
  ENSP ID: ENSP00000486807

SEQ ID NO: 100433 - protein, 836 aa, Homo sapiens; identical to SEQ ID NO: 100424
  Payload ID: 20011
  Gene Name: Zinc finger protein 546
  ENSP ID: ENSP00000487125

SEQ ID NO: 100434 - protein, 810 aa, Homo sapiens; identical to SEQ ID NO: 100427
  Payload ID: 20011
  Gene Name: Zinc finger protein 546
  ENSP ID: ENSP00000487351

SEQ ID NO: 100435 - protein, 37 aa, Homo sapiens; identical to SEQ ID NO: 100428
  Payload ID: 20011
  Gene Name: Zinc finger protein 546
  ENSP ID: ENSP00000487382

SEQ ID NO: 100436 - protein, 402 aa, Homo sapiens
  Payload ID: 20012
  Gene Name: zinc finger protein 547
  Uniprot ID: Q8IVP9
  ENSP ID: ENSP00000282282
MAEMNPAQGHVVFEDVAIYFSQEEWGHLDEAQRLLYRDVMLENLALLSSLGCCHGAEDEEAPLEPGVSVGVSQVMAPKPCLSTQNTQPCETCSSLLKDILRLAEHDGTHPEQGLYTCPAHLHQHQKEQIREKLSRGDGGRPTFVKNHRVHMAGKTFLCSECGKAFSHKHKLSDHQKIHTGERTYKCSKCGILFMERSTLNRHQRTHTGERPYECNECGKAFLCKSHLVRHQTIHSGERPYECSECGKLFMWSSTLITHQRVHTGKRPYGCSECGKFFKCNSNLFRHYRIHTGKRSYGCSECGKFFMERSTLSRHQRVHTGERPYECNECGKFFSLKSVLIQHQRVHTGERPYECSECGKAFLTKSHLICHQTVHTAAKQCSECGKFFRYNSTLLRHQKVHTG

SEQ ID NO: 100437 - protein, 41 aa, Homo sapiens
  Payload ID: 20012
  Gene Name: zinc finger protein 547
  ENSP ID: ENSP00000468929
MAEMNPAQGHVVFEDVAIYFSQEEWGHLDEAQRLLYRDVML

SEQ ID NO: 100438 - protein, 148 aa, Homo sapiens
  Payload ID: 20012
  Gene Name: zinc finger protein 547
  ENSP ID: ENSP00000470111
MYSSFPIWQGHVVFEDVAIYFSQEEWGHLDEAQRLLYRDVMLENLALLSSLGCCHGAEDEEAPLEPGVSVGVSQVMAPKPCLSTQNTQPCETCSSLLKDILRLAEHDGTHPEQGLYTCPAHLHQHQKEQIREKLSRGDGGRPTFVKNH

SEQ ID NO: 100439 - protein, 45 aa, Homo sapiens
  Payload ID: 20012
  Gene Name: zinc finger protein 547
  ENSP ID: ENSP00000470884
MAEMNPAQMESCCVVTQAGVQWHDLGSLQPAPPGFKQFCLNLPSS

SEQ ID NO: 100440 - protein, 545 aa, Homo sapiens
  Payload ID: 20013
  Gene Name: zinc finger protein 548
  Uniprot ID: Q8NEK5
  ENSP ID: ENSP00000337555
MNLTEGPLAMAEMDPTQGRVVFEDVAIYFSQEEWGHLDEAQRLLYRDVMLENLALLSSLGSWHGAEDEEAPSQQGFSVGVSEVTASKPCLSSQKVHPSETCGPPLKDILCLVEHNGIHPEQHIYICEAELFQHPKQQIGENLSRGDDWIPSFGKNHRVHMAEEIFTCMEGWKDLPATSCLLQHQGPQSEWKPYRDTEDREAFQTGQNDYKCSECGKTFTCSYSFVEHQKIHTGERSYECNKCGKFFKYSANFMKHQTVHTSERTYECRECGKSFMYNYRLMRHKRVHTGERPYECNTCGKFFRYSSTFVRHQRVHTGERPYECRECGKFFMDSSTLIKHQRVHTGERPYKCNDCGKFFRYISTLIRHQRIHTGERPYECSVCGELFRYNSSLVKHWRNHTGERPYKCSECGKSFRYHCRLIRHQRVHTGERPYECSECGKFFRYNSNLIKHWRNHTGERPYECRECGKAFSHKHILVEHQKIHSGERPYECSECQKAFIRKSHLVHHQKIHSEERLVCSMNVGNSLAKTPTSLNIRDFTMEKVYH

SEQ ID NO: 100441 - protein, 533 aa, Homo sapiens
  Payload ID: 20013
  Gene Name: zinc finger protein 548
  Uniprot ID: Q8NEK5
  ENSP ID: ENSP00000379482
MNLTEGRVVFEDVAIYFSQEEWGHLDEAQRLLYRDVMLENLALLSSLGSWHGAEDEEAPSQQGFSVGVSEVTASKPCLSSQKVHPSETCGPPLKDILCLVEHNGIHPEQHIYICEAELFQHPKQQIGENLSRGDDWIPSFGKNHRVHMAEEIFTCMEGWKDLPATSCLLQHQGPQSEWKPYRDTEDREAFQTGQNDYKCSECGKTFTCSYSFVEHQKIHTGERSYECNKCGKFFKYSANFMKHQTVHTSERTYECRECGKSFMYNYRLMRHKRVHTGERPYECNTCGKFFRYSSTFVRHQRVHTGERPYECRECGKFFMDSSTLIKHQRVHTGERPYKCNDCGKFFRYISTLIRHQRIHTGERPYECSVCGELFRYNSSLVKHWRNHTGERPYKCSECGKSFRYHCRLIRHQRVHTGERPYECSECGKFFRYNSNLIKHWRNHTGERPYECRECGKAFSHKHILVEHQKIHSGERPYECSECQKAFIRKSHLVHHQKIHSEERLVCSMNVGNSLAKTPTSLNIRDFTMEKVYH

SEQ ID NO: 100442 - protein, 57 aa, Homo sapiens
  Payload ID: 20013
  Gene Name: zinc finger protein 548
  ENSP ID: ENSP00000468847
MAEMDPTQGRVVFEDVAIYFSQEEWGHLDEAQRLLYRDVMLENLALLSSLGSWHGAE

SEQ ID NO: 100443 - protein, 87 aa, Homo sapiens
  Payload ID: 20013
  Gene Name: zinc finger protein 548
  ENSP ID: ENSP00000469101
MNLTEGPLAMAEMDPTQGRVVFEDVAIYFSQEEWGHLDEAQRLLYRDVMLENLALLSSLGKALTLAQCPGLGCVTPFYPKAALRFPQ

SEQ ID NO: 100444 - protein, 75 aa, Homo sapiens
  Payload ID: 20013
  Gene Name: zinc finger protein 548
  ENSP ID: ENSP00000469598
MVILKCLKMDMSHRQVDIKGPLAMAEMDPTQGRVVFEDVAIYFSQEEWGHLDEAQRLLYRDVMLENLALLSSLGS

SEQ ID NO: 100445 - protein, 56 aa, Homo sapiens
  Payload ID: 20013
  Gene Name: zinc finger protein 548
  ENSP ID: ENSP00000469700
MNLTENGVGEVSIKSRFPGEDHRLDFGHGDSQMSQDGYVTQTGGHKGGLCVERTGG

SEQ ID NO: 100446 - protein, 114 aa, Homo sapiens
  Payload ID: 20013
  Gene Name: zinc finger protein 548
  ENSP ID: ENSP00000470982
MAEMDPTQGRVVFEDVAIYFSQEEWGHLDEAQRLLYRDVMLENLALLSSLGSWHGAEDEEAPSQQGFSVGVSEVTASKPCLSSQKVHPSETCGPPLKDILCLVEHNGIHPEQHI

SEQ ID NO: 100447 - protein, 63 aa, Homo sapiens
  Payload ID: 20013
  Gene Name: zinc finger protein 548
  ENSP ID: ENSP00000471923
MNLTENGVGEVSIKSRFPGEDHRLDFGHGDSQMSQDGYVTQTGGHKGSPGDGRNGPYTGPCGL

SEQ ID NO: 100448 - protein, 47 aa, Homo sapiens
  Payload ID: 20013
  Gene Name: zinc finger protein 548
  ENSP ID: ENSP00000472618
MNLTEVGSVLREQGAETWGPDHWWLHRHHTLSRTVQTWHNRDSGLHL

SEQ ID NO: 100449 - protein, 44 aa, Homo sapiens
  Payload ID: 20013
  Gene Name: zinc finger protein 548
  ENSP ID: ENSP00000473004
MAEMDPTQGRVVFEDVAIYFSQEEWGHLDEAQRLLYRDVMLENL

SEQ ID NO: 100450 - protein, 63 aa, Homo sapiens
  Payload ID: 20013
  Gene Name: zinc finger protein 548
  ENSP ID: ENSP00000473179
MNLTEGPLAMAEMDPTQGRVVFEDVAIYFSQEEWGHLDEAQRLLYRDVMLENLALLSSLAFLF

SEQ ID NO: 100451 - protein, 627 aa, Homo sapiens
  Payload ID: 20014
  Gene Name: zinc finger protein 549
  Uniprot ID: Q6P9A3
  ENSP ID: ENSP00000240719
MAEAALVITPQGHVTFEDIAVYFSQEEWGLLDEAQRCLYHDVMLENFSLMASVGCLHGIEAEEAPSEQTLSAQGVSQARTPKLGPSIPNAHSCEMCILVMKDILYLSEHQGTLPWQKPYTSVASGKWFSFGSNLQQHQNQDSGEKHIRKEESSALLLNSCKIPLSDNLFPCKDVEKDFPTILGLLQHQTTHSRQEYAHRSRETFQQRRYKCEQVFNEKVHVTEHQRVHTGEKAYKRREYGKSLNSKYLFVEHQRTHNAEKPYVCNICGKSFLHKQTLVGHQQRIHTRERSYVCIECGKSLSSKYSLVEHQRTHNGEKPYVCNVCGKSFRHKQTFVGHQQRIHTGERPYVCMECGKSFIHSYDRIRHQRVHTGEGAYQCSECGKSFIYKQSLLDHHRIHTGERPYECKECGKAFIHKKRLLEHQRIHTGEKPYVCIICGKSFIRSSDYMRHQRIHTGERAYECSDCGKAFISKQTLLKHHKIHTRERPYECSECGKGFYLEVKLLQHQRIHTREQLCECNECGKVFSHQKRLLEHQKVHTGEKPCECSECGKCFRHRTSLIQHQKVHSGERPYNCTACEKAFIYKNKLVEHQRIHTGEKPYECGKCGKAFNKRYSLVRHQKVHITEEP

SEQ ID NO: 100452 - protein, 640 aa, Homo sapiens
  Payload ID: 20014
  Gene Name: zinc finger protein 549
  Uniprot ID: Q6P9A3
  ENSP ID: ENSP00000365407
MAEAALVITPQIPMVTEEFVKPSQGHVTFEDIAVYFSQEEWGLLDEAQRCLYHDVMLENFSLMASVGCLHGIEAEEAPSEQTLSAQGVSQARTPKLGPSIPNAHSCEMCILVMKDILYLSEHQGTLPWQKPYTSVASGKWFSFGSNLQQHQNQDSGEKHIRKEESSALLLNSCKIPLSDNLFPCKDVEKDFPTILGLLQHQTTHSRQEYAHRSRETFQQRRYKCEQVFNEKVHVTEHQRVHTGEKAYKRREYGKSLNSKYLFVEHQRTHNAEKPYVCNICGKSFLHKQTLVGHQQRIHTRERSYVCIECGKSLSSKYSLVEHQRTHNGEKPYVCNVCGKSFRHKQTFVGHQQRIHTGERPYVCMECGKSFIHSYDRIRHQRVHTGEGAYQCSECGKSFIYKQSLLDHHRIHTGERPYECKECGKAFIHKKRLLEHQRIHTGEKPYVCIICGKSFIRSSDYMRHQRIHTGERAYECSDCGKAFISKQTLLKHHKIHTRERPYECSECGKGFYLEVKLLQHQRIHTREQLCECNECGKVFSHQKRLLEHQKVHTGEKPCECSECGKCFRHRTSLIQHQKVHSGERPYNCTACEKAFIYKNKLVEHQRIHTGEKPYECGKCGKAFNKRYSLVRHQKVHITEEP

SEQ ID NO: 100453 - protein, 104 aa, Homo sapiens
  Payload ID: 20014
  Gene Name: zinc finger protein 549
  ENSP ID: ENSP00000469280
MAEAALVITPQIPMVTEEFVKPSQGHVTFEDIAVYFSQEEWGLLDEAQRCLYHDVMLENFSLMASVAGLSQSNHKDSCSQQKVPVSLNNCVAQCSPDDGHYDPK

SEQ ID NO: 100454 - protein, 13 aa, Homo sapiens
  Payload ID: 20014
  Gene Name: zinc finger protein 549
  ENSP ID: ENSP00000471315
MAEAALVITPQLD

SEQ ID NO: 100455 - protein, 381 aa, Homo sapiens
  Payload ID: 20015
  Gene Name: zinc finger protein 550
  ENSP ID: ENSP00000422344
MLVTFKDVAVTFTREEWRQLDLAQRTLYREVMLETCGLLVSLGDRAQVHTREPTTYPPVLSERAFLRGSLTLESSTSSDSRLGRARDEEGLLEMQKGKVTPETDLHKETHLGKVSLEGEGLGTDDGLHSRALQEWLSADVLHECDSQQPGKDALIHAGTNPYKCKQCGKGFNRKWYLVRHQRVHTGMKPYECNACGKAFSQSSTLIRHYLIHTGEKPYKCLECGKAFKRRSYLMQHHPIHTGEKPYECSQCRKAFTHRSTFIRHNRTHTGEKPFECKECEKAFSNRAHLIQHYIIHTGEKPYDCMACGKAFRCSSELIQHQRIHTGEKPYECTQCGKAFHRSTYLIQHSVIHTGEMPYKCIECGKAFKRRSHLLQHQRVHT

SEQ ID NO: 100456 - protein, 339 aa, Homo sapiens
  Payload ID: 20015
  Gene Name: zinc finger protein 550
  ENSP ID: ENSP00000445978
  MOD_RES (1)..(1): Any amino acid
XDRAQVHTREPTTYPPVLSERAFLRGSLTLESSTSSDSRLGRARDEEGLLEMQKGKVTPETDLHKETHLGKVSLEGEGLGTDDGLHSRALQEWLSADVLHECDSQQPGKDALIHAGTNPYKCKQCGKGFNRKWYLVRHQRVHTGMKPYECNACGKAFSQSSTLIRHYLIHTGEKPYKCLECGKAFKRRSYLMQHHPIHTGEKPYECSQCRKAFTHRSTFIRHNRTHTGEKPFECKECEKAFSNRAHLIQHYIIHTGEKPYDCMACGKAFRCSSELIQHQRIHTGEKPYECTQCGKAFHRSTYLIQHSVIHTGEMPYKCIECGKAFKRRSHLLQHQRVHT

SEQ ID NO: 100457 - protein, 422 aa, Homo sapiens
  Payload ID: 20015
  Gene Name: zinc finger protein 550
  Uniprot ID: Q7Z398
  ENSP ID: ENSP00000446224
MAETKDAAQMLVTFKDVAVTFTREEWRQLDLAQRTLYREVMLETCGLLVSLGHRVPKPELVHLLEHGQELWIVKRGLSHATCAGDRAQVHTREPTTYPPVLSERAFLRGSLTLESSTSSDSRLGRARDEEGLLEMQKGKVTPETDLHKETHLGKVSLEGEGLGTDDGLHSRALQEWLSADVLHECDSQQPGKDALIHAGTNPYKCKQCGKGFNRKWYLVRHQRVHTGMKPYECNACGKAFSQSSTLIRHYLIHTGEKPYKCLECGKAFKRRSYLMQHHPIHTGEKPYECSQCRKAFTHRSTFIRHNRTHTGEKPFECKECEKAFSNRAHLIQHYIIHTGEKPYDCMACGKAFRCSSELIQHQRIHTGEKPYECTQCGKAFHRSTYLIQHSVIHTGEMPYKCIECGKAFKRRSHLLQHQRVHT

SEQ ID NO: 100458 - protein, 422 aa, Homo sapiens; identical to SEQ ID NO: 100457
  Payload ID: 20015
  Gene Name: zinc finger protein 550
  Uniprot ID: Q7Z398
  ENSP ID: ENSP00000469537

SEQ ID NO: 100459 - protein, 422 aa, Homo sapiens; identical to SEQ ID NO: 100457
  Payload ID: 20015
  Gene Name: zinc finger protein 550
  Uniprot ID: Q7Z398
  ENSP ID: ENSP00000469580

SEQ ID NO: 100460 - protein, 422 aa, Homo sapiens; identical to SEQ ID NO: 100457
  Payload ID: 20015
  Gene Name: zinc finger protein 550
  Uniprot ID: Q7Z398
  ENSP ID: ENSP00000469679

SEQ ID NO: 100461 - protein, 125 aa, Homo sapiens
  Payload ID: 20015
  Gene Name: zinc finger protein 550
  ENSP ID: ENSP00000472973
MAETKDAAQMLVTFKDVAVTFTREEWRQLDLAQRTLYREVMLETCGLLVSLGHRVPKPELVHLLEHGQELWIVKRGLSHATCAGQEPRKEEGPMSNSGKDRKLLEKGEEQSPAEVDGVVLRDLTY

SEQ ID NO: 100462 - protein, 670 aa, Homo sapiens
  Payload ID: 20016
  Gene Name: zinc finger protein 551
  Uniprot ID: Q7Z340
  ENSP ID: ENSP00000282296
MPAPVGRRSPPSPRSSMAAVALRDSAQGMTFEDVAIYFSQEEWELLDESQRFLYCDVMLENFAHVTSLGYCHGMENEAIASEQSVSIQVRTSKGNTPTQKTHLSEIKMCVPVLKDILPAAEHQTTSPVQKSYLGSTSMRGFCFSADLHQHQKHYNEEEPWKRKVDEATFVTGCRFHVLNYFTCGEAFPAPTDLLQHEATPSGEEPHSSSSKHIQAFFNAKSYYKWGEYRKASSHKHTLVQHQSVCSEGGLYECSKCEKAFTCKNTLVQHQQIHTGQKMFECSECEESFSKKCHLILHKIIHTGERPYECSDREKAFIHKSEFIHHQRRHTGGVRHECGECRKTFSYKSNLIEHQRVHTGERPYECGECGKSFRQSSSLFRHQRVHSGERPYQCCECGKSFRQIFNLIRHRRVHTGEMPYQCSDCGKSFSCKSELIQHQRIHSGERPYECRECGKSFRQFSNLIRHRSIHTGDRPYECSECEKSFSRKFILIQHQRVHTGERPYECSECGKSFTRKSDLIQHRRIHTGTRPYECSECGKSFRQRSGLIQHRRLHTGERPYECSECGKSFSQSASLIQHQRVHTGERPYECSECGKSFSQSSSLIQHQRGHTGERPYECSQCGKPFTHKSDLIQHQRVHTGERPYECSECGKSFSRKSNLIRHRRVHTEERP

SEQ ID NO: 100463 - protein, 58 aa, Homo sapiens
  Payload ID: 20016
  Gene Name: zinc finger protein 551
  ENSP ID: ENSP00000472230
MAAVALRDSAQGMTFEDVAIYFSQEEWELLDESQRFLYCDVMLENFAHVTSLDQATNI

SEQ ID NO: 100464 - protein, 556 aa, Homo sapiens
  Payload ID: 20016
  Gene Name: zinc finger protein 551
  ENSP ID: ENSP00000472674
MTFEDVAIYFSQEEWELLDESQRFLYCDVMLENFAHVTSLGYCHGMENEAIASEQSVSIQVRTSKGNTPTQKTHLSEIKMCVPVLKDILPAAEHQTTSPVQKSYLGSTSMRGFCFSADLHQHQKHYNEEEPWKRKVDEATFVTGCRFHVLNYFTCGEAFPAPTDLLQHEATPSGEEPHSSSSKHIQAFFNAKSYYKWGEYRKASSHKHTLVQHQSVCSEGGLYECSKCEKAFTCKNTLVQHQQIHTGQKMFECSECEESFSKKCHLILHKIIHTGERPYECSDREKAFIHKSEFIHHQRRHTGGVRHECGECRKTFSYKSNLIEHQRVHTGERPYECGECGKSFRQSSSLFRHQRVHSGERPYQCCECGKSFRQIFNLIRHRRVHTGEMPYQCSDCGKSFSCKSELIQHQRIHSGERPYECRECGKSFRQFSNLIRHRSIHTGDRPYECSECEKSFSRKFILIQHQRVHTGERPYECSECGKSFTRKSDLIQHRRIHTGTRPYECSECGKSFRQRSGLIQHRRLHTGERPYECSECGKSFSQSASLIQHQRVHTGE

SEQ ID NO: 100465 - protein, 407 aa, Homo sapiens
  Payload ID: 20017
  Gene Name: zinc finger protein 552
  Uniprot ID: Q9H707
  ENSP ID: ENSP00000375582
MAAAALRFPVQGTVTFEDVAVKFTQEEWNLLSEAQRCLYRDVTLENLALMSSLGCWCGVEDEAAPSKQSIYIQRETQVRTPMAGVSPKKAHPCEMCGPILGDILHVADHQGTHHKQKLHRCEAWGNKLYDSGNFHQHQNEHIGEKPYRGSVEEALFAKRCKLHVSGESSVFSESGKDFLLRSGLLQQEATHTGKSNSKTECVSLFHGGKSHYSCGGCMKHFSTKDILSQHERLLPTEEPSVWCECGKSSSKYDSFSNHQGVHTREKPYTCGICGKLFNSKSHLLVHQRIHTGEKPYECEVCQKFFRHKYHLIAHQRVHTGERPYECSDCGKSFTHSSTFRVHKRVHTGQKPYECSECGKSFAESSSLTKHRRVHTGEKPYGCSECEKKFRQISSLRHHQRVHKRKGL

SEQ ID NO: 100466 - protein, 49 aa, Homo sapiens
  Payload ID: 20017
  Gene Name: zinc finger protein 552
  ENSP ID: ENSP00000470362
MAAAALRFPVQVIVAPSVLSGHLLVTQVLKQRGSGTCLRLCNPDPASGH

SEQ ID NO: 100467 - protein, 62 aa, Homo sapiens
  Payload ID: 20017
  Gene Name: zinc finger protein 552
  ENSP ID: ENSP00000472459
  MOD_RES (1)..(1): Any amino acid
XDVAVKFTQEEWNLLSEAQRCLYRDVTLENLALMSSLGKETVAPLLPVPPLGEREAEEKTAA

SEQ ID NO: 100468 - protein, 538 aa, Homo sapiens
  Payload ID: 20018
  Gene Name: zinc finger protein 554
  Uniprot ID: Q86TJ5
  ENSP ID: ENSP00000321132
MVTCAHLGRRARLPAAQPSACPGTCFSQEERMAAGYLPRWSQELVTFEDVSMDFSQEEWELLEPAQKNLYREVMLENYRNVVSLEALKNQCTDVGIKEGPLSPAQTSQVTSLSSWTGYLLFQPVASSHLEQREALWIEEKGTPQASCSDWMTVLRNQDSTYKKVALQEEPASGINMIKLIREDGGWKQLEDSHEDPQGLLSQKASLHVVAVPQEKATAWHGFGENGNLSPALVLSQGSSKGNHLCGSELDITSLASDSVLNHHQLGYADRRPCESNECGNAIRQNSHFIQHGGKMFVYLENGQSLNHGMALTIHNKINTAEKPFECHQCGKVFNRRHSLSEHQRIHTGEKPYECQECGRAFTHSSTLTRHLRTHTGEKPYGCGECGKAFNRISSLTQHQRIHTGEKPYKCEDCGKSFCQSSYLILHKRTHTGEKPYECSECGKAFSDRSSLNQHERTHTGENPYECKQCGRAFSQRSSLVRHERTHTGEKPYRCQECGKAFSQSSSLVTHQKTHSSQKTYKIIDCGKAFYQNRHLIGY

SEQ ID NO: 100469 - protein, 68 aa, Homo sapiens
  Payload ID: 20018
  Gene Name: zinc finger protein 554
  ENSP ID: ENSP00000464865
MVTCAHLGRRARLPAAQPSACPGTCFSQEERMAAGYLPRWSQAGLPWHNLRSLQPLPPGSSDSPASAS

SEQ ID NO: 100470 - protein, 181 aa, Homo sapiens
  Payload ID: 20018
  Gene Name: zinc finger protein 554
  ENSP ID: ENSP00000467997
MVTCAHLGRRARLPAAQPSACPGTCFSQEERMAAGYLPRWSQELVTFEDVSMDFSQEEWELLEPAQKNLYREVMLENYRNVVSLEALKNQCTDVGIKEGPLSPAQTSQVTSLSSWTGYLLFQPVASSHLEQREALWIEEKGTPQASCSVSLLLPRLQCSGVISAHCNLHLPGSSDSSASAS

SEQ ID NO: 100471 - protein, 628 aa, Homo sapiens
  Payload ID: 20019
  Gene Name: zinc finger protein 555
  Uniprot ID: Q8NEP9
  ENSP ID: ENSP00000334853
MDSVVFEDVAVDFTLEEWALLDSAQRDLYRDVMLETFQNLASVDDETQFKASGSVSQQDIYGEKIPKESKIATFTRNVSWASVLGKIWDSLSIEDQTTNQGRNLSRNHGLERLCESNDQCGEALSQIPHLNLYKKIPPGVKQYEYNTYGKVFMHRRTSLKSPITVHTGHKPYQCQECGQAYSCRSHLRMHVRTHNGERPYVCKLCGKTFPRTSSLNRHVRIHTAEKTYECKQCGKAFIDFSSLTSHLRSHTGEKPYKCKECGKAFSYSSTFRRHTITHTGEKPYKCKECAEAFSYSSTFRRHMISHTGEKPHKCKECGEAFSYSSAFRRHMITHTGEKPYECKQCGKTFIYLQSFRRHERIHTGEKPYECKQCGKTFIYPQSFRRHERTHGGEKPYECNQCGKAFSHPSSFRGHMRVHTGEKPYECKQCGKTFNWPISLRKHMRTHTREKPYECKQCGKAFSLSACFREHVRMHPEDKSYECKLCGKAFYCHISLQKHMRRHTAEKLYKCKQCGKAFSWPELLQQHVRTHTVEKPYECKECGKVFKWPSSLPIHMRLHTGEKPYQCKHCGKAFNCSSSLRRHVRIHTTEKQYKCNVGHPPANEFMCSASEKSHQERDLIKVVNMVLPL

SEQ ID NO: 100472 - protein, 111 aa, Homo sapiens
  Payload ID: 20019
  Gene Name: zinc finger protein 555
  ENSP ID: ENSP00000466982
MLETFQNLASVDDETQFKASGSVSQQDIYGEKIPKESKIATFTRNVSWASVLGKIWDSLSIEDQTTNQGRNLSRNHGLERLCESNDQCGEALSQIPHLNLYKKIPPGVKQY

SEQ ID NO: 100473 - protein, 627 aa, Homo sapiens
  Payload ID: 20019
  Gene Name: zinc finger protein 555
  Uniprot ID: Q8NEP9
  ENSP ID: ENSP00000467893
MDSVVFEDVAVDFTLEEWALLDSAQRDLYRDVMLETFQNLASVDDETQFKASGSVSQQDIYGEKIPKESKIATFTRNVSWASVLGKIWDSLSIEDQTTNQGRNLRNHGLERLCESNDQCGEALSQIPHLNLYKKIPPGVKQYEYNTYGKVFMHRRTSLKSPITVHTGHKPYQCQECGQAYSCRSHLRMHVRTHNGERPYVCKLCGKTFPRTSSLNRHVRIHTAEKTYECKQCGKAFIDFSSLTSHLRSHTGEKPYKCKECGKAFSYSSTFRRHTITHTGEKPYKCKECAEAFSYSSTFRRHMISHTGEKPHKCKECGEAFSYSSAFRRHMITHTGEKPYECKQCGKTFIYLQSFRRHERIHTGEKPYECKQCGKTFIYPQSFRRHERTHGGEKPYECNQCGKAFSHPSSFRGHMRVHTGEKPYECKQCGKTFNWPISLRKHMRTHTREKPYECKQCGKAFSLSACFREHVRMHPEDKSYECKLCGKAFYCHISLQKHMRRHTAEKLYKCKQCGKAFSWPELLQQHVRTHTVEKPYECKECGKVFKWPSSLPIHMRLHTGEKPYQCKHCGKAFNCSSSLRRHVRIHTTEKQYKCNVGHPPANEFMCSASEKSHQERDLIKVVNMVLPL

SEQ ID NO: 100474 - protein, 456 aa, Homo sapiens
  Payload ID: 20020
  Gene Name: zinc finger protein 556
  Uniprot ID: Q9HAH1
  ENSP ID: ENSP00000302603
MDTVVFEDVVVDFTLEEWALLNPAQRKLYRDVMLETFKHLASVDNEAQLKASGSISQQDTSGEKLSLKQKIEKFTRKNIWASLLGKNWEEHSVKDKHNTKERHLSRNPRVERPCKSSKGNKRGRTFRKTRNCNRHLRKNCCTSVRRYECSQCGKLFTHSSSLIRHKRAHSGQKLYKCKECGKAFSRPSYLQTHEKTHSGEKPYACQSCGKTFLRSHSLTEHVRTHTGEKPYECGQCGKGFSCPKSFRAHVMMHAGGRPYECKHCGKAFRCQKSFRVHMIMHAGGRPYECKQCGKAYCWATSFQRHVRIHNGEKPYKCGKCGKAFGWPSSLHKHARTHAKKKPVSGGSVGKSSARPRPSTDVKSQTREKVYKCETCGKTYGWSSSLHKHERKHTGEKPVNAASVGKPSGGLCSSKNVRTQIGQKPSKCEKCGKAFSCPKAFQGHVRSHTGKKSCTSK

SEQ ID NO: 100475 - protein, 69 aa, Homo sapiens
  Payload ID: 20020
  Gene Name: zinc finger protein 556
  ENSP ID: ENSP00000465533
MDTVVFEDVVVDFTLEEWALLNPAQRKLYRDVMLETFKHLASIMRLSLKPVGLFLSRILLEKNYPSNRK

SEQ ID NO: 100476 - protein, 455 aa, Homo sapiens
  Payload ID: 20020
  Gene Name: zinc finger protein 556
  ENSP ID: ENSP00000467366
MDTVVFEDVVVDFTLEEWALLNPAQRKLYRDVMLETFKHLASVDNEAQLKASGSISQQDTSGEKLSLKQKIEKFTRKNIWASLLGKNWEEHSVKDKHNTKERHLRNPRVERPCKSSKGNKRGRTFRKTRNCNRHLRKNCCTSVRRYECSQCGKLFTHSSSLIRHKRAHSGQKLYKCKECGKAFSRPSYLQTHEKTHSGEKPYACQSCGKTFLRSHSLTEHVRTHTGEKPYECGQCGKGFSCPKSFRAHVMMHAGGRPYECKHCGKAFRCQKSFRVHMIMHAGGRPYECKQCGKAYCWATSFQRHVRIHNGEKPYKCGKCGKAFGWPSSLHKHARTHAKKKPVSGGSVGKSSARPRPSTDVKSQTREKVYKCETCGKTYGWSSSLHKHERKHTGEKPVNAASVGKPSGGLCSSKNVRTQIGQKPSKCEKCGKAFSCPKAFQGHVRSHTGKKSCTSK

SEQ ID NO: 100477 - protein, 430 aa, Homo sapiens
  Payload ID: 20021
  Gene Name: zinc finger protein 557
  Uniprot ID: Q8N988
  ENSP ID: ENSP00000252840
MAAVVLPPTAALSSLFPASQREGHTEGGELVNELLKSWLKGLVTFEDVAVEFTQEEWALLDPAQRTLYRDVMLENCRNLASLGNQVDKPRLISQLEQEDKVMTEERGILSGTCPDVENPFKAKGLTPKLHVFRKEQSRNMKMERNHLGATLNECNQCFKVFSTKSSLTRHRKIHTGERPYGCSECGKSYSSRSYLAVHKRIHNGEKPYECNDCGKTFSSRSYLTVHKRIHNGEKPYECSDCGKTFSNSSYLRPHLRIHTGEKPYKCNQCFREFRTQSIFTRHKRVHTGEGHYVCNQCGKAFGTRSSLSSHYSIHTGEYPYECHDCGRTFRRRSNLTQHIRTHTGEKPYTCNECGKSFTNSFSLTIHRRIHNGEKSYECSDCGKSFNVLSSVKKHMRTHTGKKPYECNYCGKSFTSNSYLSVHTRMHNRQM

SEQ ID NO: 100478 - protein, 423 aa, Homo sapiens
  Payload ID: 20021
  Gene Name: zinc finger protein 557
  Uniprot ID: Q8N988
  ENSP ID: ENSP00000404065
MAAVVLPPTAASQREGHTEGGELVNELLKSWLKGLVTFEDVAVEFTQEEWALLDPAQRTLYRDVMLENCRNLASLGNQVDKPRLISQLEQEDKVMTEERGILSGTCPDVENPFKAKGLTPKLHVFRKEQSRNMKMERNHLGATLNECNQCFKVFSTKSSLTRHRKIHTGERPYGCSECGKSYSSRSYLAVHKRIHNGEKPYECNDCGKTFSSRSYLTVHKRIHNGEKPYECSDCGKTFSNSSYLRPHLRIHTGEKPYKCNQCFREFRTQSIFTRHKRVHTGEGHYVCNQCGKAFGTRSSLSSHYSIHTGEYPYECHDCGRTFRRRSNLTQHIRTHTGEKPYTCNECGKSFTNSFSLTIHRRIHNGEKSYECSDCGKSFNVLSSVKKHMRTHTGKKPYECNYCGKSFTSNSYLSVHTRMHNRQM

SEQ ID NO: 100479 - protein, 402 aa, Homo sapiens
  Payload ID: 20022
  Gene Name: zinc finger protein 558
  Uniprot ID: Q96NG5
  ENSP ID: ENSP00000301475
MAAVILPSTAAPSSLFPASQQKGHTQGGELVNELLTSWLRGLVTFEDVAVEFTQEEWALLDPAQRTLYRDVMLENCRNLASLGCRVNKPSLISQLEQDKKVVTEERGILPSTCPDLETLLKAKWLTPKKNVFRKEQSKGVKTERSHRGVKLNECNQCFKVFSTKSNLTQHKRIHTGEKPYDCSQCGKSFSSRSYLTIHKRIHNGEKPYECNHCGKAFSDPSSLRLHLRIHTGEKPYECNQCFHVFRTSCNLKSHKRIHTGENHHECNQCGKAFSTRSSLTGHNSIHTGEKPYECHDCGKTFRKSSYLTQHVRTHTGEKPYECNECGKSFSSSFSLTVHKRIHTGEKPYECSDCGKAFNNLSAVKKHLRTHTGEKPYECNHCGKSFTSNSYLSVHKRIHNRWI

SEQ ID NO: 100480 - protein, 402 aa, Homo sapiens; identical to SEQ ID NO: 100479
  Payload ID: 20022
  Gene Name: zinc finger protein 558
  Uniprot ID: Q96NG5
  ENSP ID: ENSP00000471277

SEQ ID NO: 100481 - protein, 84 aa, Homo sapiens
  Payload ID: 20023
  Gene Name: zinc finger protein 559
  Uniprot ID: Q9BR84
  ENSP ID: ENSP00000325393
MVAGWLTNYSQDSVTFEDVAVDFTQEEWTLLDQTQRNLYRDVMLENYKNLVAVDWESHINTKWSAPQQNFLQGKTSSVVEMNSE

SEQ ID NO: 100482 - protein, 538 aa, Homo sapiens
  Payload ID: 20023
  Gene Name: zinc finger protein 559
  Uniprot ID: Q9BR84
  ENSP ID: ENSP00000377461
MVAGWLTNYSQDSVTFEDVAVDFTQEEWTLLDQTQRNLYRDVMLENYKNLVAVDWESHINTKWSAPQQNFLQGKTSSVVEMERNHFGEELFDFNQCEKALSEHSCLKTHRRTYFRKKTCECNQCEKAFRKPSIFTLHKKTDIGEELPNCNQCETAFSQHLHLVCKKTSQNLHLVCKKTHTQEKPYKCSDCEKGLPSSSHLRECVRIYGGERPYTHKEYVETFSHSTALFVHMQTQDGEKFYECKACGKPFTESSYLTQHLRTHSRVLPIEHKKFGKAFAFSPDLAKHIRLRTRGKHYVCNECGKEFTCFSKLNIHIRVHTGEKPYECNKCGKAFTDSSGLIKHRRTHTGEKPYECKECGKAFANSSHLTVHMRTHTGEKPYQCKECGKAFINSSSFKSHMQTHPGVKPYDCQQCGKAFIRSSFLIRHLRSHSAERPFECEECGKAFRYSSHLSQHKRIHTGERPYKCQKCGQAFSISSGLTVHMRTHTGERPFECQECGKAFTRSTYLIRHLRSHSVEKPYKECGQTFSNSSCLTECV

SEQ ID NO: 100483 - protein, 39 aa, Homo sapiens
  Payload ID: 20023
  Gene Name: zinc finger protein 559
  ENSP ID: ENSP00000465526
MLAIGLSLCDHLSQDVFCLHESKFEEERMVAGWLTNYSQ

SEQ ID NO: 100484 - protein, 149 aa, Homo sapiens
  Payload ID: 20023
  Gene Name: zinc finger protein 559
  ENSP ID: ENSP00000465787
MLAIGLSLCDHLSQDVFCLHESKFEEERMVAGWLTNYSQDSVTFEDVAVDFTQEEWTLLDQTQRNLYRDVMLENYKNLVAVDWESHINTKWSAPQQNFLQGKTSSVVEMSLTVSPRLECSGTISAHGSFHLPGSSNSCASASRVAGTCA

SEQ ID NO: 100485 - protein, 81 aa, Homo sapiens
  Payload ID: 20023
  Gene Name: zinc finger protein 559
  ENSP ID: ENSP00000466325
MLAIGLSLCDHLSQDVFCLHESKFEEERMVAGWLTNYSQDSVTFEDVAVDFTQEEWTLLDQTQRNLYRDVMLENYKNLVAV

SEQ ID NO: 100486 - protein, 112 aa, Homo sapiens
  Payload ID: 20023
  Gene Name: zinc finger protein 559
  ENSP ID: ENSP00000466496
MLAIGLSLCDHLSQDVFCLHESKFEEERMVAGWLTNYSQDSVTFEDVAVDFTQEEWTLLDQTQRNLYRDVMLENYKNLVAVDWESHINTKWSAPQQNFLQGKTSSVVEMNSE

SEQ ID NO: 100487 - protein, 52 aa, Homo sapiens
  Payload ID: 20023
  Gene Name: zinc finger protein 559
  ENSP ID: ENSP00000466745
QTQRNLYRDVMLENYKNLVAVDWESHINTKWSAPQQNFLQGKTSSVVEMETN

SEQ ID NO: 100488 - protein, 84 aa, Homo sapiens; identical to SEQ ID NO: 100481
  Payload ID: 20023
  Gene Name: zinc finger protein 559
  Uniprot ID: Q9BR84
  ENSP ID: ENSP00000467048

SEQ ID NO: 100489 - protein, 175 aa, Homo sapiens
  Payload ID: 20023
  Gene Name: zinc finger protein 559
  ENSP ID: ENSP00000467841
MVAGWLTNYSQDSVTFEDVAVDFTQEEWTLLDQTQRNLYRDVMLENYKNLVAVDWESHINTKWSAPQQNFLQGKTSSVVEMVRFRRYNLLSSMLEEDWKFLKMEKQHNNLETFETSVFHPKIICLLERLWIMSLTNTLNIPQNIFVYIFPSTFPYVSQMFLINNSLLGRYQLSSI

SEQ ID NO: 100490 - protein, 602 aa, Homo sapiens
  Payload ID: 20023
  Gene Name: zinc finger protein 559
  ENSP ID: ENSP00000468153
MRITAAILTARSRWRLRNSISAFLFTVTFAWCPPGLSNLTILSCPDHLSQDVFCLHESKFEEERMVAGWLTNYSQDSVTFEDVAVDFTQEEWTLLDQTQRNLYRDVMLENYKNLVAVDWESHINTKWSAPQQNFLQGKTSSVVEMERNHFGEELFDFNQCEKALSEHSCLKTHRRTYFRKKTCECNQCEKAFRKPSIFTLHKKTDIGEELPNCNQCETAFSQHLHLVCKKTSQNLHLVCKKTHTQEKPYKCSDCEKGLPSSSHLRECVRIYGGERPYTHKEYVETFSHSTALFVHMQTQDGEKFYECKACGKPFTESSYLTQHLRTHSRVLPIEHKKFGKAFAFSPDLAKHIRLRTRGKHYVCNECGKEFTCFSKLNIHIRVHTGEKPYECNKCGKAFTDSSGLIKHRRTHTGEKPYECKECGKAFANSSHLTVHMRTHTGEKPYQCKECGKAFINSSSFKSHMQTHPGVKPYDCQQCGKAFIRSSFLIRHLRSHSAERPFECEECGKAFRYSSHLSQHKRIHTGERPYKCQKCGQAFSISSGLTVHMRTHTGERPFECQECGKAFTRSTYLIRHLRSHSVEKPYKECGQTFSNSSCLTECV

SEQ ID NO: 100491 - protein, 68 aa, Homo sapiens
  Payload ID: 20023
  Gene Name: zinc finger protein 559
  ENSP ID: ENSP00000468299
MVAGWLTNYSQDSVTFEDVAVDFTQEEWTLLDQTQRNLYRDVMLENYKNLVAVDWESHINTKWSAPQQ

SEQ ID NO: 100492 - protein, 147 aa, Homo sapiens
  Payload ID: 20023
  Gene Name: zinc finger protein 559
  ENSP ID: ENSP00000474260
MERNHFGEELFDFNQCEKALSEHSCLKTHRRTYFRKKTCECNQCEKAFRKPSIFTLHKKTDIGEELPNCNQCETAFSQHLHLVCKKTSQNLHLVCKKTHTQEKPYKCSDCEKGLPSSSHLRECVRIYGGERPYTHKEYVETFSHSTA

SEQ ID NO: 100493 - protein, 524 aa, Homo sapiens
  Payload ID: 20023
  Gene Name: zinc finger protein 559
  ENSP ID: ENSP00000474719
ILTARSRWRLRNSISAFLFTVTFAWCPPGLSNLTILSCPDWESHINTKWSAPQQNFLQGKTSSVVEMERNHFGEELFDFNQCEKALSEHSCLKTHRRTYFRKKTCECNQCEKAFRKPSIFTLHKKTDIGEELPNCNQCETAFSQHLHLVCKKTSQNLHLVCKKTHTQEKPYKCSDCEKGLPSSSHLRECVRIYGGERPYTHKEYVETFSHSTALFVHMQTQDGEKFYECKACGKPFTESSYLTQHLRTHSRVLPIEHKKFGKAFAFSPDLAKHIRLRTRGKHYVCNECGKEFTCFSKLNIHIRVHTGEKPYECNKCGKAFTDSSGLIKHRRTHTGEKPYECKECGKAFANSSHLTVHMRTHTGEKPYQCKECGKAFINSSSFKSHMQTHPGVKPYDCQQCGKAFIRSSFLIRHLRSHSAERPFECEECGKAFRYSSHLSQHKRIHTGERPYKCQKCGQAFSISSGLTVHMRTHTGERPFECQECGKAFTRSTYLIRHLRSHSVEKPYKECGQTFSNSSCLTECV

SEQ ID NO: 100494 - protein, 538 aa, Homo sapiens; identical to SEQ ID NO: 100482
  Payload ID: 20023
  Gene Name: zinc finger protein 559
  Uniprot ID: Q9BR84
  ENSP ID: ENSP00000474760

SEQ ID NO: 100495 - protein, 790 aa, Homo sapiens
  Payload ID: 20024
  Gene Name: zinc finger protein 560
  Uniprot ID: Q96MR9
  ENSP ID: ENSP00000301480
MAYCLTNCYQYSVTFEDTAVDFTQEEWILLDPVQRNLYRDVMLENYENVAKVGFQLFKPSVISWLEEEELRTLQQGVLQDWAIKHQTSVSALQQEFWKIQTSNGIQMDLVTFDSVAVEFTQEEWTLLDPAQRNLYSDVMLENYKNLSSVGYQLFKPSLISWLEEEEELSTLPRVLQEWKMCLKTKGPALWQDNFCLKTLNGIQLARNQNGEELYDCKQCEDVFCKHPCLKTNMSTQNRGNTSECIQYAKDLLSLYNKTSTIRKVSVFSKHGKSFRLILNVQVQRKCTQDKSFEGTDYGKAFIYQSYLEAHRKTQSGEKLNEWKQCGEAFTHSTSHAVNVETHIIKNPYECKECGKDFRYPTHLNNHMQTHIGIKPYKCKHCGKTFTVPSGFLEHVRTHTGEKPYGCKECGKAFGTSAGLIEHIRCHAREKTFKCDHCGKAFISYPSLFGHLRVHNGEKPYEHKEYGKAFGTSSGVIEDRRSNTGQKRFDCDQCGKVFVSFSSLFAHLRTHTGEKPFKCYKCGKPFTSSACLRIHMRTHTEERLYQCKKCGKAFTKCSYLTKHLRTHAGEKPYECMKCGKAFTERSYLTKHLRRHSGEKPYECKKCGKAFTERSDLTKHLRRHTGDKPYEYKDCGKAFVVSSSLVDHLRTHTGYKPYKCNACEKAYSRSCVLTQHLKTHAAEKTSECNACGNSFRNSMCFHDRLKTLTKIKPYKCKDCGKAFTCHSDLTNHVRIHTGEKPYKCKECGKAFRTSSGRIQHLRTHMGEKPFECDQCGKAFASFSARIAHLKTH

SEQ ID NO: 100496 - protein, 486 aa, Homo sapiens
  Payload ID: 20025
  Gene Name: zinc finger protein 561
  Uniprot ID: Q8N587
  ENSP ID: ENSP00000303915
MAAIYLSRGFFSREPICPFEEKTKVERMVEDYLASGYQDSVTFDDVAVDFTPEEWALLDTTEKYLYRDVMLENYMNLASVEWEIQPRTKRSSLQQGFLKNQIFSGIQMTRGYSGWKLCDCKNCGEVFREQFCLKTHMRVQNGGNTSEGNCYGKDTLSVHKEASTGQELSKFNPCGKVFTLTPGLAVHLEVLNARQPYKCKECGKGFKYFASLDNHMGIHTDEKLCEFQEYGRAVTASSHLKQCVAVHTGKKSKKTKKCGKSFTNFSQLYAPVKTHKGEKSFECKECGRSFRNSSCLNDHIQIHTGIKPHKCTYCGKAFTRSTQLTEHVRTHTGIKPYECKECGQAFAQYSGLSIHIRSHSGKKPYQCKECGKAFTTSTSLIQHTRIHTGEKPYECVECGKTFITSSRRSKHLKTHSGEKPFVCKICGKAFLYSSRLNVHLRTHTGEKPFVCKECGKAFAVSSRLSRHERIHTGEKPYECKDMSVTI

SEQ ID NO: 100497 - protein, 90 aa, Homo sapiens
  Payload ID: 20025
  Gene Name: zinc finger protein 561
  ENSP ID: ENSP00000370284
MAAIYLSRGFFSREPICPFEEKTKVERMVEDYLASGYQDSVTFDDVAVDFTPEEWALLDTTEKYLYRDVMLENYMNLASVDKRLQWMETL

SEQ ID NO: 100498 - protein, 61 aa, Homo sapiens
  Payload ID: 20025
  Gene Name: zinc finger protein 561
  ENSP ID: ENSP00000391503
MAAIYLSRGFFSREPICPFEEKTKVERMVEDYLASGYQHLSGICSVLRSVLHRHQWDRKSS

SEQ ID NO: 100499 - protein, 287 aa, Homo sapiens
  Payload ID: 20025
  Gene Name: zinc finger protein 561
  ENSP ID: ENSP00000392013
MHIITPSASENGSHLFVPWEPICPFEEKTKVERMVEDYLASGYQDSVTFDDVAVDFTPEEWALLDTTEKYLYRDVMLENYMNLASVEWEIQPRTKRSSLQQGFLKNQIFSGIQMTRGYSGWKLCDCKNCGEVFREQFCLKTHMRVQNGGNTSEGNCYGKDTLSVHKEASTGQELSKFNPCGKVFTLTPGLAVHLEVLNARQPYKCKECGKGFKYFASLDNHMGIHTDEKLCEFQEYGRAVTASSHLKQCVAVHTGKKSKKTKKCGKSFTNFSQLYAPVKTHKGEKSF

SEQ ID NO: 100500 - protein, 417 aa, Homo sapiens
  Payload ID: 20025
  Gene Name: zinc finger protein 561
  ENSP ID: ENSP00000393074
MLENYMNLASVEWEIQPRTKRSSLQQGFLKNQIFSGIQMTRGYSGWKLCDCKNCGEVFREQFCLKTHMRVQNGGNTSEGNCYGKDTLSVHKEASTGQELSKFNPCGKVFTLTPGLAVHLEVLNARQPYKCKECGKGFKYFASLDNHMGIHTDEKLCEFQEYGRAVTASSHLKQCVAVHTGKKSKKTKKCGKSFTNFSQLYAPVKTHKGEKSFECKECGRSFRNSSCLNDHIQIHTGIKPHKCTYCGKAFTRSTQLTEHVRTHTGIKPYECKECGQAFAQYSGLSIHIRSHSGKKPYQCKECGKAFTTSTSLIQHTRIHTGEKPYECVECGKTFITSSRRSKHLKTHSGEKPFVCKICGKAFLYSSRLNVHLRTHTGEKPFVCKECGKAFAVSSRLSRHERIHTGEKPYECKDMSVTI

SEQ ID NO: 100501 - protein, 76 aa, Homo sapiens
  Payload ID: 20025
  Gene Name: zinc finger protein 561
  ENSP ID: ENSP00000397599
MAAIYLSRGFFSREPICPFEEKTKVERMVEDYLASGYQDSVTFDDVAVDFTPEEWALLDTTEKYLYRDVMLENYMN

SEQ ID NO: 100502 - protein, 43 aa, Homo sapiens
  Payload ID: 20025
  Gene Name: zinc finger protein 561
  ENSP ID: ENSP00000402974
MAAIYLSRGFFSREPICPFEEKTKVERMVEDYLASGYQVSAVC

SEQ ID NO: 100503 - protein, 38 aa, Homo sapiens
  Payload ID: 20025
  Gene Name: zinc finger protein 561
  ENSP ID: ENSP00000405257
MAAIYLSRGFFSREPICPFEEKTKVERMVEDYLASGYQ

SEQ ID NO: 100504 - protein, 43 aa, Homo sapiens; identical to SEQ ID NO: 100502
  Payload ID: 20025
  Gene Name: zinc finger protein 561
  ENSP ID: ENSP00000406079

SEQ ID NO: 100505 - protein, 41 aa, Homo sapiens
  Payload ID: 20025
  Gene Name: zinc finger protein 561
  ENSP ID: ENSP00000408053
MAAIYLSRGFFSREPICPFEEKTKVERMVEDYLASGYQDSV

SEQ ID NO: 100506 - protein, 354 aa, Homo sapiens
  Payload ID: 20026
  Gene Name: zinc finger protein 562
  Uniprot ID: Q6V9R5
  ENSP ID: ENSP00000293648
MSAFDMSHDFFFCLTSEWEIQPRTKRSSLQQGFLKNQIFTGIQMQTRSYSGWKLCENCGEVFSEQFCLKTHMRAQNGGNTFEGNCYGKDSISVHKEASIGQELSKFNPCGKVFTLTPGLAVHLEILNGRQPYKCKECGKGFKYFASLDNHMGIHIGEKLCEFQECERAITTSSHLKQCVAVHTGKKSEKTKNCGKSFTNFSQLSAHAKTHKGEKSFECKECGRSFRNSSSFNVHIQIHTGIKPHKCTECGKAFTRSTHLTQHVRTHTGIKPYECKECGQAFTQYTGLAIHIRNHTGEKPYQCKECGKAFNRSSTLTQHRRIHTGEKPYECVECGKTFITSSHRSKHLKTHSGER

SEQ ID NO: 100507 - protein, 426 aa, Homo sapiens
  Payload ID: 20026
  Gene Name: zinc finger protein 562
  Uniprot ID: Q6V9R5
  ENSP ID: ENSP00000410734
MSAFDMSHGFFPREPICPFEEKTKIGTMVEDHRSNSYQDSVTFDDVAVEFTPEEWALLDTTQKYLYRDVMLENYMNLASVDFFFCLTSEWEIQPRTKRSSLQQGFLKNQIFTGIQMQTRSYSGWKLCENCGEVFSEQFCLKTHMRAQNGGNTFEGNCYGKDSISVHKEASIGQELSKFNPCGKVFTLTPGLAVHLEILNGRQPYKCKECGKGFKYFASLDNHMGIHIGEKLCEFQECERAITTSSHLKQCVAVHTGKKSEKTKNCGKSFTNFSQLSAHAKTHKGEKSFECKECGRSFRNSSSFNVHIQIHTGIKPHKCTECGKAFTRSTHLTQHVRTHTGIKPYECKECGQAFTQYTGLAIHIRNHTGEKPYQCKECGKAFNRSSTLTQHRRIHTGEKPYECVECGKTFITSSHRSKHLKTHSGER

SEQ ID NO: 100508 - protein, 425 aa, Homo sapiens
  Payload ID: 20026
  Gene Name: zinc finger protein 562
  ENSP ID: ENSP00000464716
MSAFDMSHGFFPREPICPFEEKTKIGTMVEDHRSNSYQDSVTFDDVAVEFTPEEWALLDTTQKYLYRDVMLENYMNLASVDFFFCLTSEWEIQPRTKRSSLQQGFLKNQIFTGIQMTRSYSGWKLCENCGEVFSEQFCLKTHMRAQNGGNTFEGNCYGKDSISVHKEASIGQELSKFNPCGKVFTLTPGLAVHLEILNGRQPYKCKECGKGFKYFASLDNHMGIHIGEKLCEFQECERAITTSSHLKQCVAVHTGKKSEKTKNCGKSFTNFSQLSAHAKTHKGEKSFECKECGRSFRNSSSFNVHIQIHTGIKPHKCTECGKAFTRSTHLTQHVRTHTGIKPYECKECGQAFTQYTGLAIHIRNHTGEKPYQCKECGKAFNRSSTLTQHRRIHTGEKPYECVECGKTFITSSHRSKHLKTHSGER

SEQ ID NO: 100509 - protein, 116 aa, Homo sapiens
  Payload ID: 20026
  Gene Name: zinc finger protein 562
  ENSP ID: ENSP00000466039
MSAFDMSHGFFPREPICPFEEKTKIGTMVEDHRSNSYQDSVTFDDVAVEFTPEEWALLDTTQKYLYRDVMLENYMNLASVDFFFCLTSEWEIQPRTKRSSLQQGFLKNQIFTGIQM

SEQ ID NO: 100510 - protein, 43 aa, Homo sapiens
  Payload ID: 20026
  Gene Name: zinc finger protein 562
  ENSP ID: ENSP00000466728
MSAFDMSHGFFPREPICPFEEKTKIGTMVEDHRSNSYQISFSA

SEQ ID NO: 100511 - protein, 120 aa, Homo sapiens
  Payload ID: 20026
  Gene Name: zinc finger protein 562
  ENSP ID: ENSP00000466911
MDSVTFDDVAVEFTPEEWALLDTTQKYLYRDVMLENYMNLASVDFFFCLTSEWEIQPRTKRSSLQQGFLKNQIFTGIQMQTRSYSGWKLCENCGEVFSEQFCLKTHMRAQNGGNTFEGNC

SEQ ID NO: 100512 - protein, 91 aa, Homo sapiens
  Payload ID: 20026
  Gene Name: zinc finger protein 562
  ENSP ID: ENSP00000468039
MSAFDMSHGFFPREPICPFEEKTKIGTMVEDHRSNSYQDSVTFDDVAVEFTPEEWALLDTTQKYLYRDVMLENYMNLASVADKKLQWMETL

SEQ ID NO: 100513 - protein, 10 aa, Homo sapiens
  Payload ID: 20026
  Gene Name: zinc finger protein 562
  ENSP ID: ENSP00000468775
MSAFDMSHGF

SEQ ID NO: 100514 - protein, 476 aa, Homo sapiens
  Payload ID: 20027
  Gene Name: zinc finger protein 563
  Uniprot ID: Q8TA94
  ENSP ID: ENSP00000293725
MDAVAFEDVAVNFTQEEWALLGPSQKNLYRYVMQETIRNLDCIRMIWEEQNTEDQYKNPRRNLRCHMVERFSESKDSSQCGETFSLIRDSIVNNSICPGEDPCQSAECEEVIMGHLSLNSHIRVDSGHKPHEYQEYGEKPHTHKQRGKAFSYHHSFQSRGRPHTGKKRYECKECGKTFSSRRNLRRHMVVQGGNRPYKCKLCGKAFFWPSLLRMHERTHTGEKPYECKQCSKAFPFYSSYRRHERMHTGEKPYECKQCSKALPDSSSYIRHERTHTGEKPYTCKQCGKAFSVSSSLRRHETTHSAEKPYECKQCGKTFHHLGSFQIHMKRHTGDRPHKCKICGKGFDRPSLVRYHERIHTGEKPYECKQCGKTLSHSSSFRRHMIMHTGGGPHKCKICGKAFVYPSVCQRHEKSHSGEKPYECKQCGKALSHSSSFRRHMVMHTGDGPNKCKVCGKAFVYPSVCQRHEKTHWRETI

SEQ ID NO: 100515 - protein, 229 aa, Homo sapiens
  Payload ID: 20027
  Gene Name: zinc finger protein 563
  ENSP ID: ENSP00000469879
MDAVAFEDVAVNFTQEEWALLGPSQKNLYRYVMQETIRNLDCIRMIWEEQNTEDQYKNPRRNLRCHMVERFSESKDSSQCGETFSLIRDSIVNNSICPGEDPCQSAECEEVIMGHLSLNSHIRVDSGHKPHEYQEYGEKPHTHKQRGKAFSYHHSFQSRGRPHTGKKRYECKECGKTFSSRRNLRRHMVVQGGNRPYKFPIEDMRECTLGRNRMNVSSVLKPCLIPVPI

SEQ ID NO: 100516 - protein, 194 aa, Homo sapiens
  Payload ID: 20027
  Gene Name: zinc finger protein 563
  ENSP ID: ENSP00000471960
MQETIRNLDCIRMIWEEQNTEDQYKNPRRNLSHIRVDSGHKPHEYQEYGEKPHTHKQRGKAFSYHHSFQSRGRPHTGKKRYECKECGKTFSSRRNLRRHMVVQGGNRPYKCKLCGKAFFWPSLLRMHERTHTGEKPYECKQCSKAFPFYSSYRRHERMHTGEKPYECKQCSKALPDSSSYIRHERTHTGEKPYT

SEQ ID NO: 100517 - protein, 129 aa, Homo sapiens
  Payload ID: 20027
  Gene Name: zinc finger protein 563
  ENSP ID: ENSP00000472052
MQETIRNLDCIRMIWEEQNTEDQYKNPRRNLRCHMVERFSESKDSSQCGETFSLIRDSIVNNSICPGEDPCQSAECEEVIMGHLSLNSHIRVDSGHKPHEYQEYGEKPHTHKQRGKAFSYHHSFQSRGR

SEQ ID NO: 100518 - protein, 553 aa, Homo sapiens
  Payload ID: 20028
  Gene Name: zinc finger protein 564
  Uniprot ID: Q8TBZ8
  ENSP ID: ENSP00000340004
MDSVASEDVAVNFTLEEWALLDPSQKKLYRDVMRETFRNLACVGKKWEDQSIEDWYKNQGRILRNHMEEGLSESKEYDQCGEAFSQILNLNLNKKIPTIVRPCECSLCGKVFMHHSSLSRHIRSHLGHKPYDYQEYGEKPYKCKQCGKAFSSCQSFRRHERTHTGEKPYACPECGKAFISLPSVRRHMIKHTGDGPYKCQECGKAFDRPSLFQIHERTHTGEKPYECQECAKAFISLPSFQRHMIRHTGDGPYKCQECGKAFDRPSLFRIHERTHTGEKPHECKQCGKAFISFTNFQSHMIRHTGDGPYKCKVCGRAFIFPSYVRKHERTHTGEKPYECNKCGKTFSSSSNVRTHERTHTGEKPYECKECGKAFISLPSVRRHMIKHTGDGPYKCQVCGRAFDCPSSFQIHERTHTGEKPYECQVCGKAFISLKRIRKHMILHTGDGPYKCQVCGKAFDCPSSVRTHERTHTGEKPYECKECGKAFNYASSIRIHERTHTGEKPYECKQCGKTFSYSSSFQRHERAHNGDKPYVKNVGKLSFITQPSNTCENE

SEQ ID NO: 100519 - protein, 21 aa, Homo sapiens
  Payload ID: 20028
  Gene Name: zinc finger protein 564
  ENSP ID: ENSP00000408822
MGRDFVVMDNCSVSFHLDFGD

SEQ ID NO: 100520 - protein, 69 aa, Homo sapiens
  Payload ID: 20028
  Gene Name: zinc finger protein 564
  ENSP ID: ENSP00000415828
MTEFRSVAQAGVQWEDLSSLQPSPSGFKQFSCLSLLSNWDYRHAPPRPATFCIFGRNWVSPCWPGLSGL

SEQ ID NO: 100521 - protein, 35 aa, Homo sapiens
  Payload ID: 20028
  Gene Name: zinc finger protein 564
  ENSP ID: ENSP00000470670
MRETFRNLACVGKKWEDQSIEDWYKNQGRILRNHM

SEQ ID NO: 100522 - protein, 499 aa, Homo sapiens
  Payload ID: 20029
  Gene Name: zinc finger protein 565
  Uniprot ID: Q8N9K5
  ENSP ID: ENSP00000306869
MAQGLVTFRDVAIEFSLEEWKCLEPAQRDLYREVTLENFGHLASLGLSISKPDVVSLLEQGKEPWMIANDVTGPWCPDLESRCEKFLQKDIFEIGAFNWEIMESLKCSDLEGSDFRADWECEGQFERQVNEECYFKQVNVTYGHMPVFQHHTSHTVRQSRETGEKLMECHECGKAFSRGSHLIQHQKIHTGEKPFGCKECGKAFSRASHLVQHQRIHTGEKPYDCKDCGKAFGRTSELILHQRLHTGVKPYECKECGKTFRQHSQLILHQRTHTGEKPYVCKDCGKAFIRGSQLTVHRRIHTGARPYECKECGKAFRQHSQLTVHQRIHTGEKPYECKECGKGFIHSSEVTRHQRIHSGEKPYECKECGKAFRQHAQLTRHQRVHTGDRPYECKDCGKAFSRSSYLIQHQRIHTGDKPYECKECGKAFIRVSQLTHHQRIHTCEKPYECRECGMAFIRSSQLTEHQRIHPGIKPYECRECGQAFILGSQLIEHYRIHTG

SEQ ID NO: 100523 - protein, 539 aa, Homo sapiens
  Payload ID: 20029
  Gene Name: zinc finger protein 565
  Uniprot ID: Q8N9K5
  ENSP ID: ENSP00000347234
MRRGPWERWSLASHRLDAGLCTCPREESREIRAGQIVLKAMAQGLVTFRDVAIEFSLEEWKCLEPAQRDLYREVTLENFGHLASLGLSISKPDVVSLLEQGKEPWMIANDVTGPWCPDLESRCEKFLQKDIFEIGAFNWEIMESLKCSDLEGSDFRADWECEGQFERQVNEECYFKQVNVTYGHMPVFQHHTSHTVRQSRETGEKLMECHECGKAFSRGSHLIQHQKIHTGEKPFGCKECGKAFSRASHLVQHQRIHTGEKPYDCKDCGKAFGRTSELILHQRLHTGVKPYECKECGKTFRQHSQLILHQRTHTGEKPYVCKDCGKAFIRGSQLTVHRRIHTGARPYECKECGKAFRQHSQLTVHQRIHTGEKPYECKECGKGFIHSSEVTRHQRIHSGEKPYECKECGKAFRQHAQLTRHQRVHTGDRPYECKDCGKAFSRSSYLIQHQRIHTGDKPYECKECGKAFIRVSQLTHHQRIHTCEKPYECRECGMAFIRSSQLTEHQRIHPGIKPYECRECGQAFILGSQLIEHYRIHTG

SEQ ID NO: 100524 - protein, 499 aa, Homo sapiens; identical to SEQ ID NO: 100522
  Payload ID: 20029
  Gene Name: zinc finger protein 565
  Uniprot ID: Q8N9K5
  ENSP ID: ENSP00000376013

SEQ ID NO: 100525 - protein, 259 aa, Homo sapiens
  Payload ID: 20029
  Gene Name: zinc finger protein 565
  ENSP ID: ENSP00000465906
MIANDVTGPWCPDLESRCEKFLQKDIFEIGAFNWEIMESLKCSDLEGSDFRADWECEGQFERQVNEECYFKQVNVTYGHMPVFQHHTSHTVRQSRETGEKLMECHECGKAFSRGSHLIQHQKIHTGEKPFGCKECGKAFSRASHLVQHQRIHTGEKPYDCKDCGKAFGRTSELILHQRLHTGVKPYECKECGKTFRQHSQLILHQRTHTGEKPYVCKDCGKAFIRGSQLTVHRRIHTGARPYECKECGKAFRQHSQLTV

SEQ ID NO: 100526 - protein, 56 aa, Homo sapiens
  Payload ID: 20029
  Gene Name: zinc finger protein 565
  ENSP ID: ENSP00000468673
MAQGLVTFRDVAIEFSLEEWKCLEPAQRDLYREVTLENFGHLASLGLSISKPDVVS

SEQ ID NO: 100527 - protein, 419 aa, Homo sapiens
  Payload ID: 20030
  Gene Name: zinc finger protein 566
  Uniprot ID: Q969W8
  ENSP ID: ENSP00000376010
MAQESVMFSDVSVDFSQEEWECLNDDQRDLYRDVMLENYSNLVSMAGHSISKPNVISYLEQGKEPWLADRELTRGQWPVLESRCETKKLFLKKEIYEIESTQWEIMEKLTRRDFQCSSFRDDWECNRQFKKELGSQGGHFNQLVFTHEDLPTLSHHPSFTLQQIINSKKKFCASKEYRKTFRHGSQFATHEIIHTIEKPYECKECGKSFRHPSRLTHHQKIHTGKKPFECKECGKTFICGSDLTRHHRIHTGEKPYECKECGKAFSSGSNFTRHQRIHTGEKPYECKECGKAFSSGSNFTQHQRIHTGEKPYECKECGNAFSQSSQLIKHQRIHTGEKPYECKECEKAFRSGSDLTRHQRIHTGEKPYECKICGKAYSQSSQLISHHRIHTSEKPYEYRECGKNFNYDPQLIQHQNLYW

SEQ ID NO: 100528 - protein, 157 aa, Homo sapiens
  Payload ID: 20030
  Gene Name: zinc finger protein 566
  ENSP ID: ENSP00000400651
MAQESVMFSDVSVDFSQEEWECLNDDQRDLYRDVMLENYSNLVSMAGHSISKPNVISYLEQGKEPWLADRELTRGQWPVLESRCETKKLFLKKEIYEIESTQWEIMEKLTRRDFQCSSFRDDWECNRQFKKELGSQGGHFNQLVFTHEDLPTLSHHP

SEQ ID NO: 100529 - protein, 418 aa, Homo sapiens
  Payload ID: 20030
  Gene Name: zinc finger protein 566
  Uniprot ID: Q969W8
  ENSP ID: ENSP00000401259
MAQESVMFSDVSVDFSQEEWECLNDDQRDLYRDVMLENYSNLVSMGHSISKPNVISYLEQGKEPWLADRELTRGQWPVLESRCETKKLFLKKEIYEIESTQWEIMEKLTRRDFQCSSFRDDWECNRQFKKELGSQGGHFNQLVFTHEDLPTLSHHPSFTLQQIINSKKKFCASKEYRKTFRHGSQFATHEIIHTIEKPYECKECGKSFRHPSRLTHHQKIHTGKKPFECKECGKTFICGSDLTRHHRIHTGEKPYECKECGKAFSSGSNFTRHQRIHTGEKPYECKECGKAFSSGSNFTQHQRIHTGEKPYECKECGNAFSQSSQLIKHQRIHTGEKPYECKECEKAFRSGSDLTRHQRIHTGEKPYECKICGKAYSQSSQLISHHRIHTSEKPYEYRECGKNFNYDPQLIQHQNLYW

SEQ ID NO: 100530 - protein, 233 aa, Homo sapiens
  Payload ID: 20030
  Gene Name: zinc finger protein 566
  ENSP ID: ENSP00000411526
MAQESVMFSDVSVDFSQEEWECLNDDQRDLYRDVMLENYSNLVSMGHSISKPNVISYLEQGKEPWLADRELTRGQWPVLESRCETKKLFLKKEIYEIESTQWEIMEKLTRRDFQCSSFRDDWECNRQFKKELGSQGGHFNQLVFTHEDLPTLSHHPSFTLQQIINSKKKFCASKEYRKTFRHGSQFATHEIIHTIEKPYECKECGKSFRHPSRLTHHQKIHTGKKPFECKECG

SEQ ID NO: 100531 - protein, 418 aa, Homo sapiens; identical to SEQ ID NO: 100529
  Payload ID: 20030
  Gene Name: zinc finger protein 566
  Uniprot ID: Q969W8
  ENSP ID: ENSP00000415520

SEQ ID NO: 100532 - protein, 314 aa, Homo sapiens
  Payload ID: 20030
  Gene Name: zinc finger protein 566
  ENSP ID: ENSP00000465343
MEKLTRRDFQCSSFRDDWECNRQFKKELGSQGGHFNQLVFTHEDLPTLSHHPSFTLQQIINSKKKFCASKEYRKTFRHGSQFATHEIIHTIEKPYECKECGKSFRHPSRLTHHQKIHTGKKPFECKECGKTFICGSDLTRHHRIHTGEKPYECKECGKAFSSGSNFTRHQRIHTGEKPYECKECGKAFSSGSNFTQHQRIHTGEKPYECKECGNAFSQSSQLIKHQRIHTGEKPYECKECEKAFRSGSDLTRHQRIHTGEKPYECKICGKAYSQSSQLISHHRIHTSEKPYEYRECGKNFNYDPQLIQHQNLYW

SEQ ID NO: 100533 - protein, 77 aa, Homo sapiens
  Payload ID: 20030
  Gene Name: zinc finger protein 566
  ENSP ID: ENSP00000467764
FECKECGKTFICGSDLTRHHRIHTGEKPYECKECGKAFSSGSNFTRHQRIHTEKWITIHFPEICFFTFNCTFWIFLQ

SEQ ID NO: 100534 - protein, 616 aa, Homo sapiens
  Payload ID: 20031
  Gene Name: zinc finger protein 567
  Uniprot ID: Q8N184
  ENSP ID: ENSP00000353957
MDVMLENYCHLISVGCHMTKPDVILKLERGEEPWTSFAGHTCLEENWKAEDFLVKFKEHQEKYSRSVVSINHKKLVKEKSKIYEKTFTLGKNPVNSKNLPPEYDTHGRILKNVSELIISNLNPARKRLSEYNGYGKSLLSTKQETTHPEVKSHNQSARAFSHNEVLMQYQKTETPAQSFGYNDCEKSFLQRGGLITHSRPYKGENPSVYNKKRRATNIEKKHTCNECGKSFCRKSVLILHQGIHSEEKPYQCHQCGNAFRRKSYLIDHQRTHTGEKPFVCNECGKSFRLKTALTDHQRTHTGEKSYECLQCRNAFRLKSHLIRHQRTHTGEKPYECNDCGKSFRQKTTLSLHQRIHTGEKPYICKECGKSFHQKANLTVHQRTHTGEKPYICNECGKSFSQKTTLALHEKTHNEEKPYICSECGKSFRQKTTLVAHQRTHTGEKSYECPHCGKAFRMKSYLIDHHRTHTGEKPYECNECGKSFSQKTNLNLHQRIHTGEKPYVCNECGKSFRQKATLTVHQKIHTGQKSYECPQCGKAFSRKSYLIHHQRTHTGEKPYKCSECGKCFRQKTNLIVHQRTHTGEKPYVCNECGKSFSYKRNLIVHQRTHKGENIEMQ

SEQ ID NO: 100535 - protein, 647 aa, Homo sapiens
  Payload ID: 20031
  Gene Name: zinc finger protein 567
  Uniprot ID: Q8N184
  ENSP ID: ENSP00000441838
MAQGSVSFNDVTVDFTQEEWQHLDHAQKTLYMDVMLENYCHLISVGCHMTKPDVILKLERGEEPWTSFAGHTCLEENWKAEDFLVKFKEHQEKYSRSVVSINHKKLVKEKSKIYEKTFTLGKNPVNSKNLPPEYDTHGRILKNVSELIISNLNPARKRLSEYNGYGKSLLSTKQETTHPEVKSHNQSARAFSHNEVLMQYQKTETPAQSFGYNDCEKSFLQRGGLITHSRPYKGENPSVYNKKRRATNIEKKHTCNECGKSFCRKSVLILHQGIHSEEKPYQCHQCGNAFRRKSYLIDHQRTHTGEKPFVCNECGKSFRLKTALTDHQRTHTGEKSYECLQCRNAFRLKSHLIRHQRTHTGEKPYECNDCGKSFRQKTTLSLHQRIHTGEKPYICKECGKSFHQKANLTVHQRTHTGEKPYICNECGKSFSQKTTLALHEKTHNEEKPYICSECGKSFRQKTTLVAHQRTHTGEKSYECPHCGKAFRMKSYLIDHHRTHTGEKPYECNECGKSFSQKTNLNLHQRIHTGEKPYVCNECGKSFRQKATLTVHQKIHTGQKSYECPQCGKAFSRKSYLIHHQRTHTGEKPYKCSECGKCFRQKTNLIVHQRTHTGEKPYVCNECGKSFSYKRNLIVHQRTHKGENIEMQ

SEQ ID NO: 100536 - protein, 64 aa, Homo sapiens
  Payload ID: 20031
  Gene Name: zinc finger protein 567
  ENSP ID: ENSP00000466458
HLDHAQKTLYMDVMLENYCHLISVGCHMTKPDVILKLERGEEPWTSFAGHTCLGGEDGLTGCLS

SEQ ID NO: 100537 - protein, 616 aa, Homo sapiens; identical to SEQ ID NO: 100534
  Payload ID: 20031
  Gene Name: zinc finger protein 567
  Uniprot ID: Q8N184
  ENSP ID: ENSP00000467379

SEQ ID NO: 100538 - protein, 592 aa, Homo sapiens
  Payload ID: 20031
  Gene Name: zinc finger protein 567
  ENSP ID: ENSP00000467712
MDVMLENYCHLISVGCHMTKPDVILKLERGEEPWTSFAGHTCLEENWKAEDFLVKFKEHQEKYSRSVVSINHKKLVKEKSKIYEKTFTLGKNPVNSKNLPPEYDTHGRILKNVSELIISNLNPARKRLSEYNGYGKSLLSTKQETTHPEVKSHNQSARAFSHNEVLMQYQKTETPAQSFGYNDCEKSFLQRGGLITHSRPYKGENPSVYNKKRRATNIEKKHTCNECGKSFCRKSVLILHQGIHSEEKPYQCHQCGNAFRRKSYLIDHQRTHTGEKPFVCNECGKSFRLKTALTDHQRTHTGEKSYECLQCRNAFRLKSHLIRHQRTHTGEKPYECNDCGKSFRQKTTLSLHQRIHTGEKPYICKECGKSFHQKANLTVHQRTHTGEKPYICNECGKSFSQKTTLALHEKTHNEEKPYICSECGKSFRQKTTLVAHQRTHTGEKSYECPHCGKAFRMKSYLIDHHRTHTGEKPYECNECGKSFSQKTNLNLHQRIHTGEKPYVCNECGKSFRQKATLTVHQKIHTGQKSYECPQCGKAFSRKSYLIHHQRTHTGEKPYKCSECGKCFRQKTNLIVHQRTHTGGEDGLTGCLS

SEQ ID NO: 100539 - protein, 50 aa, Homo sapiens
  Payload ID: 20031
  Gene Name: zinc finger protein 567
  ENSP ID: ENSP00000468750
LENYCHLISVGCHMTKPDVILKLERGEEPWTSFAGHTCLGGEDGLTGCLS

SEQ ID NO: 100540 - protein, 644 aa, Homo sapiens
  Payload ID: 20032
  Gene Name: zinc finger protein 568
  Uniprot ID: Q3ZCX4
  ENSP ID: ENSP00000334685
MTSQSSVISNSCVTMERLSHMMERKAWCSQESALSEEEEDTTRPLETVTFKDVAVDLTQEEWEQMKPAQRNLYRDVMLENYSNLVTVGCQVTKPDVIFKLEQEEEPWVMEEEMFGRHCPEVWEVDEQIKKQQETLVRKVTSISKKILIKEKVIECKKVAKIFPLSSDIVTSRQSFYDCDSLDKGLEHNLDLLRYEKGCVREKQSNEFGKPFYHCASYVVTPFKCNQCGQDFSHKFDLIRHERIHAGEKPYECKECGKAFSRKENLITHQKIHTGEKPYKCNECGKAFIQMSNLIRHHRIHTGEKPYACKDCWKAFSQKSNLIEHERIHTGEKPYECKECGKSFSQKQNLIEHEKIHTGEKPYACNECGRAFSRMSSVTLHMRSHTGEKPYKCNKCGKAFSQCSVFIIHMRSHTGEKPYVCSECGKAFSQSSSLTVHMRNHTAEKPYECKECGKAFSRKENLITHQKIHTGEKPYECSECGKAFIQMSNLIRHQRIHTGEKPYACTVCGKAFSQKSNLTEHEKIHTGEKPYHCNQCGKAFSQRQNLLEHEKIHTGEKPFKCNECGKAFSRISSLTLHVRSHTGEKPYECNKCGKAFSQCSLLIIHMRSHTGEKPFECNECGKAFSQRASLSIHKRGHTGERHQVY

SEQ ID NO: 100541 - protein, 583 aa, Homo sapiens
  Payload ID: 20032
  Gene Name: zinc finger protein 568
  ENSP ID: ENSP00000389794
MTSQSSVISNSCVTMERLSHMMERKAWCSQESALSEEEEDTTRPLETVTFKDVAVDLTQEEWEQMKPAQRNLYRDVMLENYSNLVTVGCQVTKPDVIFKLEQEEEPWVMEEEMFGRHCPEPRRGENCCASEVMAEGLKFKDVVIYFSQKEWECLHSAQKDLYRDVMLENYGNLVLLGLSDTKPNVISLLEQKKEPWMVKRKETKEWCPDWEFGRETKNLSPKENIYEIRSPQQEKARVIREIRCQVERQQGHQEGHFRPAVIPFTSMQCTAHREYQWLHTGEKSCECRKCKNAFRYQSCPIQHEIIHNKEKEPECGECRKIFNSGSDLIKHQTLHESKKHSENNKCAFNHDSGITQPQSINTGEKPHKCKECGKAFRSSSQISQHQRMHLGEKPYKCRECGKAFPSTAQLNLHQRIHTDEKYYESKACGKAFTRPSHLFRHQRIHTGEKPHKCKECGKAFRYDTQLSLHQIIHTGERRYECRECGKVYSCASQLSLHQRIHTGEKPHECKECGKAFISDSHLIRHQSVHTGEKPCKCKECGKSFRRGSELTRHQRAHTGEKPYECKECEKAFTCSTELVRHQK

SEQ ID NO: 100542 - protein, 580 aa, Homo sapiens
  Payload ID: 20032
  Gene Name: zinc finger protein 568
  Uniprot ID: Q3ZCX4
  ENSP ID: ENSP00000394514
MKPAQRNLYRDVMLENYSNLVTVGCQVTKPDVIFKLEQEEEPWVMEEEMFGRHCPEVWEVDEQIKKQQETLVRKVTSISKKILIKEKVIECKKVAKIFPLSSDIVTSRQSFYDCDSLDKGLEHNLDLLRYEKGCVREKQSNEFGKPFYHCASYVVTPFKCNQCGQDFSHKFDLIRHERIHAGEKPYECKECGKAFSRKENLITHQKIHTGEKPYKCNECGKAFIQMSNLIRHHRIHTGEKPYACKDCWKAFSQKSNLIEHERIHTGEKPYECKECGKSFSQKQNLIEHEKIHTGEKPYACNECGRAFSRMSSVTLHMRSHTGEKPYKCNKCGKAFSQCSVFIIHMRSHTGEKPYVCSECGKAFSQSSSLTVHMRNHTAEKPYECKECGKAFSRKENLITHQKIHTGEKPYECSECGKAFIQMSNLIRHQRIHTGEKPYACTVCGKAFSQKSNLTEHEKIHTGEKPYHCNQCGKAFSQRQNLLEHEKIHTGEKPFKCNECGKAFSRISSLTLHVRSHTGEKPYECNKCGKAFSQCSLLIIHMRSHTGEKPFECNECGKAFSQRASLSIHKRGHTGERHQVY

SEQ ID NO: 100543 - protein, 382 aa, Homo sapiens
  Payload ID: 20032
  Gene Name: zinc finger protein 568
  ENSP ID: ENSP00000399643
MAEGLKFKDVVIYFSQKEWECLHSAQKDLYRDVMLENYGNLVLLGLSDTKPNVISLLEQKKEPWMVKRKETKEWCPDWEFGRETKNLSPKENIYEIRSPQQEKARVIREIRCQVERQQGHQEGHFRPAVIPFTSMQCTAHREYQWLHTGEKSCECRKCKNAFRYQSCPIQHEIIHNKEKEPECGECRKIFNSGSDLIKHQTLHESKKHSENNKCAFNHDSGITQPQSINTGEKPHKCKECGKAFRSSSQISQHQRMHLGEKPYKCRECGKAFPSTAQLNLHQRIHTDEKYYESKACGKAFTRPSHLFRHQRIHTGEKPHKCKECGKAFRYDTQLSLHQIIHTGERRYECRECGKVYSCASQLSLHQRIHTGEKPHECKECGK

SEQ ID NO: 100544 - protein, 171 aa, Homo sapiens
  Payload ID: 20032
  Gene Name: zinc finger protein 568
  ENSP ID: ENSP00000407012
MTSQSSVISNSCVTMERLSHMMERKAWCSQESALSEEEEDTTRPLETVTFKDVAVDLTQEEWEQMKPAQRNLYRDVMLENYSNLVTVGCQVTKPDVIFKLEQEEEPWVMEEEMFGRHCPEPRRGENCCASEVMAEMEFCPCCPGWSAMARSQLTATSASRVEVILLPQPPE

SEQ ID NO: 100545 - protein, 79 aa, Homo sapiens
  Payload ID: 20032
  Gene Name: zinc finger protein 568
  ENSP ID: ENSP00000407153
MVKRKETKEWCPDWEFGRETKNLSPKENIYEIRSPQQEKARVIREIRCQVERQQGHQEGHFRPAVIPFTSMQCTAHREY

SEQ ID NO: 100546 - protein, 571 aa, Homo sapiens
  Payload ID: 20032
  Gene Name: zinc finger protein 568
  Uniprot ID: Q3ZCX4
  ENSP ID: ENSP00000413396
MKPAQRNLYRDVMLENYSNLVTVGCQVTKPDVIFKLEQEEEPWVMEEEMFGRHCPEPRRGENCCASEVMAEGLKFKDVVIYFSQKEWECLHSAQKDLYRDVMLENYGNLVLLGLSDTKPNVISLLEQKKEPWMVKRKETKEWCPDWEFGRETKNLSPKENIYEIRSPQQEKARVIREIRCQVERQQGHQEGHFRPAVIPFTSMQCTAHREYQWLHTGEKSCECRKCKNAFRYQSCPIQHEIIHNKEKEPECGECRKIFNSGSDLIKHQTLHESKKHSENNKCAFNHDSGITQPQSINTGEKPHKCKECGKAFRSSSQISQHQRMHLGEKPYKCRECGKAFPSTAQLNLHQRIHTDEKYYESKACGKAFTRPSHLFRHQRIHTGEKPHKCKECGKAFRYDTQLSLHQIIHTGERRYECRECGKVYSCASQLSLHQRIHTGEKPHECKECGKAFISDSHLIRHQSVHTGEKPCKCKECGKSFRRGSELTRHQRAHTGEKPYECKECEKAFTCSTELVRHQKVHTGERPHKCKECGKAFIRRSELTHHERSHTGEKPYECKECGKPFGGGSELS

SEQ ID NO: 100547 - protein, 39 aa, Homo sapiens
  Payload ID: 20032
  Gene Name: zinc finger protein 568
  ENSP ID: ENSP00000465833
MAEMEFCPCCPGWSAMARSQLTATSASRVEVILLPQPPE

SEQ ID NO: 100548 - protein, 25 aa, Homo sapiens
  Payload ID: 20032
  Gene Name: zinc finger protein 568
  ENSP ID: ENSP00000465977
MAEGLKFKDVVIYFSQKEWECLHSA

SEQ ID NO: 100549 - protein, 58 aa, Homo sapiens
  Payload ID: 20032
  Gene Name: zinc finger protein 568
  ENSP ID: ENSP00000466125
MVKRKETKEWCPDWEFGRETKNLSPKENIYEIRSPQQEKARVIREIRCQVERQQGHQE

SEQ ID NO: 100550 - protein, 530 aa, Homo sapiens
  Payload ID: 20032
  Gene Name: zinc finger protein 568
  ENSP ID: ENSP00000466901
MKPAQRNLYRDVMLENYSNLVTVGCQVTKPDVIFKLEQEEEPWVMEEEMFGRHCPEVWEVDEQIKKQQETLVRKVTSISKKILIKEKVIECKKVAKIFPLSSDIVTSRQSFYDCDSLDKGLEHNLDLLRYEKGCVREKQSNEFGKPFYHCASYVVTPFKCNQCGQDFSHKFDLIRHERIHAGEKPYECKECGKAFSRKENLITHQKIHTGEKPYKCNECGKAFIQMSNLIRHHRIHTGEKPYACKDCWKAFSQKSNLIEHERIHTGEKPYECKECGKSFSQKQNLIEHEKIHTGEKPYACNECGRAFSRMSSVTLHMRSHTGEKPYKCNKCGKAFSQCSVFIIHMRSHTGEKPYVCSECGKAFSQSSSLTVHMRNHTAEKPYECKECGKAFSRKENLITHQKIHTGEKPYECSECGKAFIQMSNLIRHQRIHTGEKPYACTVCGKAFSQKSNLTEHEKIHTGEKPYHCNQCGKAFSQRQNLLEHEKIHTGEKPFKCNECGKAFSRISSLTLHVRSHTGEKPYECNKCGKA

SEQ ID NO: 100551 - protein, 7 aa, Homo sapiens
  Payload ID: 20032
  Gene Name: zinc finger protein 568
  ENSP ID: ENSP00000467578
MKPAQRN

SEQ ID NO: 100552 - protein, 377 aa, Homo sapiens
  Payload ID: 20032
  Gene Name: zinc finger protein 568
  ENSP ID: ENSP00000480246
MKPAQRNLYRDVMLENYSNLVTVGCQVTKPDVIFKLEQEEEPWVMEEEMFGRHCPEVWEVDEQIKKQQETLVRKVTSISKKILIKEKVIECKKVAKIFPLSSDIVTSRQSFYDCDSLDKGLEHNLDLLRYEKGCVREKQSNEFGKPFYHCASYVVTPFKCNQCGQDFSHKFDLIRHERIHAGEKPYECKECGKAFSRKENLITHQKIHTGEKPYKCNECGKAFIQMSNLIRHHRIHTGEKPYACKDCWKAFSQKSNLIEHERIHTGEKPYECKECGKSFSQKQNLIEHEKIHTGEKPYACNECGRAFSRMSSVTLHMRSHTGEKPYKCNKCGKAFSQCSVFIIHMRSHTGEKPYVCSECGKAFSQSSSLTVHAKSYS

SEQ ID NO: 100553 - protein, 644 aa, Homo sapiens; identical to SEQ ID NO: 100540
  Payload ID: 20032
  Gene Name: zinc finger protein 568
  Uniprot ID: Q3ZCX4
  ENSP ID: ENSP00000481819

SEQ ID NO: 100554 - protein, 635 aa, Homo sapiens
  Payload ID: 20032
  Gene Name: zinc finger protein 568
  ENSP ID: ENSP00000482444
MTSQSSVISNSCVTMERLSHMMERKAWCSQESALSEEEEDTTRPLETVTFKDVAVDLTQEEWEQMKPAQRNLYRDVMLENYSNLVTVGCQVTKPDVIFKLEQEEEPWVMEEEMFGRHCPEPRRGENCCASEVMAEGLKFKDVVIYFSQKEWECLHSAQKDLYRDVMLENYGNLVLLGLSDTKPNVISLLEQKKEPWMVKRKETKEWCPDWEFGRETKNLSPKENIYEIRSPQQEKARVIREIRCQVERQQGHQEGHFRPAVIPFTSMQCTAHREYQWLHTGEKSCECRKCKNAFRYQSCPIQHEIIHNKEKEPECGECRKIFNSGSDLIKHQTLHESKKHSENNKCAFNHDSGITQPQSINTGEKPHKCKECGKAFRSSSQISQHQRMHLGEKPYKCRECGKAFPSTAQLNLHQRIHTDEKYYESKACGKAFTRPSHLFRHQRIHTGEKPHKCKECGKAFRYDTQLSLHQIIHTGERRYECRECGKVYSCASQLSLHQRIHTGEKPHECKECGKAFISDSHLIRHQSVHTGEKPCKCKECGKSFRRGSELTRHQRAHTGEKPYECKECEKAFTCSTELVRHQKVHTGERPHKCKECGKAFIRRSELTHHERSHTGEKPYECKECGKPFGGGSELS

SEQ ID NO: 100555 - protein, 686 aa, Homo sapiens
  Payload ID: 20033
  Gene Name: zinc finger protein 569
  Uniprot ID: Q5MCW4
  ENSP ID: ENSP00000325018
MTESQGTVTFKDVAIDFTQEEWKRLDPAQRKLYRNVMLENYNNLITVGYPFTKPDVIFKLEQEEEPWVMEEEVLRRHWQGEIWGVDEHQKNQDRLLRQVEVKFQKTLTEEKGNECQKKFANVFPLNSDFFPSRHNLYEYDLFGKCLEHNFDCHNNVKCLMRKEHCEYNEPVKSYGNSSSHFVITPFKCNHCGKGFNQTLDLIRHLRIHTGEKPYECSNCRKAFSHKEKLIKHYKIHSREQSYKCNECGKAFIKMSNLIRHQRIHTGEKPYACKECEKSFSQKSNLIDHEKIHTGEKPYECNECGKAFSQKQSLIAHQKVHTGEKPYACNECGKAFPRIASLALHMRSHTGEKPYKCDKCGKAFSQFSMLIIHVRIHTGEKPYECNECGKAFSQSSALTVHMRSHTGEKPYECKECRKAFSHKKNFITHQKIHTREKPYECNECGKAFIQMSNLVRHQRIHTGEKPYICKECGKAFSQKSNLIAHEKIHSGEKPYECNECGKAFSQKQNFITHQKVHTGEKPYDCNECGKAFSQIASLTLHLRSHTGEKPYECDKCGKAFSQCSLLNLHMRSHTGEKPYVCNECGKAFSQRTSLIVHMRGHTGEKPYECNKCGKAFSQSSSLTIHIRGHTGEKPFDCSKCGKAFSQISSLTLHMRKHTGEKPYHCIECGKAFSQKSHLVRHQRIHTH

SEQ ID NO: 100556 - protein, 686 aa, Homo sapiens; identical to SEQ ID NO: 100555
  Payload ID: 20033
  Gene Name: zinc finger protein 569
  Uniprot ID: Q5MCW4
  ENSP ID: ENSP00000375992

SEQ ID NO: 100557 - protein, 527 aa, Homo sapiens
  Payload ID: 20033
  Gene Name: zinc finger protein 569
  Uniprot ID: Q5MCW4
  ENSP ID: ENSP00000375993
MRKEHCEYNEPVKSYGNSSSHFVITPFKCNHCGKGFNQTLDLIRHLRIHTGEKPYECSNCRKAFSHKEKLIKHYKIHSREQSYKCNECGKAFIKMSNLIRHQRIHTGEKPYACKECEKSFSQKSNLIDHEKIHTGEKPYECNECGKAFSQKQSLIAHQKVHTGEKPYACNECGKAFPRIASLALHMRSHTGEKPYKCDKCGKAFSQFSMLIIHVRIHTGEKPYECNECGKAFSQSSALTVHMRSHTGEKPYECKECRKAFSHKKNFITHQKIHTREKPYECNECGKAFIQMSNLVRHQRIHTGEKPYICKECGKAFSQKSNLIAHEKIHSGEKPYECNECGKAFSQKQNFITHQKVHTGEKPYDCNECGKAFSQIASLTLHLRSHTGEKPYECDKCGKAFSQCSLLNLHMRSHTGEKPYVCNECGKAFSQRTSLIVHMRGHTGEKPYECNKCGKAFSQSSSLTIHIRGHTGEKPFDCSKCGKAFSQISSLTLHMRKHTGEKPYHCIECGKAFSQKSHLVRHQRIHTH

SEQ ID NO: 100558 - protein, 71 aa, Homo sapiens
  Payload ID: 20033
  Gene Name: zinc finger protein 569
  ENSP ID: ENSP00000464980
MDSARHHISHSTSAGPIPSQKEEEMTESQGTVTFKDVAIDFTQEEWKRLDPAQRKLYRNVMLENYNNLITV

SEQ ID NO: 100559 - protein, 21 aa, Homo sapiens
  Payload ID: 20033
  Gene Name: zinc finger protein 569
  ENSP ID: ENSP00000465577
MTESQEKYGELMSIRKTRTDF

SEQ ID NO: 100560 - protein, 260 aa, Homo sapiens
  Payload ID: 20033
  Gene Name: zinc finger protein 569
  ENSP ID: ENSP00000466221
MDSARHHISHSTSAGPIPSQKEEEMTESQGTVTFKDVAIDFTQEEWKRLDPAQRKLYRNVMLENYNNLITVGYPFTKPDVIFKLEQEEEPWVMEEEVLRRHWQGEIWGVDEHQKNQDRLLRQVEVKFQKTLTEEKGNECQKKFANVFPLNSDFFPSRHNLYEYDLFGKCLEHNFDCHNNVKCLMRKEHCEYNEPVKSYGNSSSHFVITPFKCNHCGKGFNQTLDLIRHLRIHTGEKPYECSNCRKAFSHKEKLIKHYKIH

SEQ ID NO: 100561 - protein, 104 aa, Homo sapiens
  Payload ID: 20033
  Gene Name: zinc finger protein 569
  ENSP ID: ENSP00000467046
MDSARHHISHSTSAGPIPSQKEEEMTESQGTVTFKDVAIDFTQEEWKRLDPAQRKLYRNVMLENYNNLITVGYPFTKPDVIFKLEQEEEPWVMEEEVLRRHWQG

SEQ ID NO: 100562 - protein, 555 aa, Homo sapiens
  Payload ID: 20034
  Gene Name: zinc finger protein 57
  Uniprot ID: Q68EA5
  ENSP ID: ENSP00000303696
MDSVVFEDVAVDFTLEEWALLDSAQRDLYRDVMLETFRNLASVDDGTQFKANGSVSLQDMYGQEKSKEQTIPNFTGNNSCAYTLEKNCEGYGTEDHHKNLRNHMVDRFCTHNEGNQYGEAIHQMPDLTLHKKVSAGEKPYECTKCRTVFTHLSSLKRHVKSHCGRKAPPGEECKQACICPSHLHSHGRTDTEEKPYKCQACGQTFQHPRYLSHHVKTHTAEKTYKCEQCRMAFNGFASFTRHVRTHTKDRPYKCQECGRAFIYPSTFQRHMTTHTGEKPYKCQHCGKAFTYPQAFQRHEKTHTGEKPYECKQCGKTFSWSETLRVHMRIHTGDKLYKCEHCGKAFTSSRSFQGHLRTHTGEKPYECKQCGKAFTWSSTFREHVRIHTQEQLYKCEQCGKAFTSSRSFRGHLRTHTGEKPYECKQCGKTFTWSSTFREHVRIHTQEQLHKCEHCGKAFTSSRAFQGHLRMHTGEKPYECKQCGKTFTWSSTLHNHVRMHTGEKPHKCKQCGMSFKWHSSFRNHLRMHTGQKSHECQSYSKAFSCQVILSKTSESTH

SEQ ID NO: 100563 - protein, 523 aa, Homo sapiens
  Payload ID: 20034
  Gene Name: zinc finger protein 57
  ENSP ID: ENSP00000430223
MLETFRNLASVDDGTQFKANGSVSLQDMYGQEKSKEQTIPNFTGNNSCAYTLEKNCEGYGTEDHHKNLRNHMVDRFCTHNEGNQYGEAIHQMPDLTLHKKVSAGEKPYECTKCRTVFTHLSSLKRHVKSHCGRKAPPGEECKQACICPSHLHSHGRTDTEEKPYKCQACGQTFQHPRYLSHHVKTHTAEKTYKCEQCRMAFNGFASFTRHVRTHTKDRPYKCQECGRAFIYPSTFQRHMTTHTGEKPYKCQHCGKAFTYPQAFQRHEKTHTGEKPYECKQCGKTFSWSETLRVHMRIHTGDKLYKCEHCGKAFTSSRSFQGHLRTHTGEKPYECKQCGKAFTWSSTFREHVRIHTQEQLYKCEQCGKAFTSSRSFRGHLRTHTGEKPYECKQCGKTFTWSSTFREHVRIHTQEQLHKCEHCGKAFTSSRAFQGHLRMHTGEKPYECKQCGKTFTWSSTLHNHVRMHTGEKPHKCKQCGMSFKWHSSFRNHLRMHTGQKSHECQSYSKAFSCQVILSKTSESTH

SEQ ID NO: 100564 - protein, 147 aa, Homo sapiens
  Payload ID: 20034
  Gene Name: zinc finger protein 57
  ENSP ID: ENSP00000430905
MLETFRNLASVDDGTQFKANGSVSLQDMYGQEKSKEQTIPNFTGNNSCAYTLEKNCEGYGTEDHHKNLRNHMVDRFCTHNEGNQYGEAIHQMPDLTLHKKVSAGEKPYECTKCRTVFTHLSSLKRHVKSHCGRKAPPGEECKQACIC

SEQ ID NO: 100565 - protein, 151 aa, Homo sapiens
  Payload ID: 20034
  Gene Name: zinc finger protein 57
  ENSP ID: ENSP00000468191
MLETFRNLASVDDGTQFKANGSVSLQDMYGQEKSKEQTIPNFTGNNSCAYTLEKNCEGYGTEDHHKNLRNHMVDRFCTHNEGNQYGEAIHQMPDLTLHKKVSAGEKPYECTKCRTVFTHLSSLKRHVKSHCGRKAPPGEECKQACICPSHL

SEQ ID NO: 100566 - protein, 557 aa, Homo sapiens [sequence omitted]

SEQ ID NO: 100567 - protein, 536 aa, Homo sapiens
  Payload ID: 20035
  Gene Name: zinc finger protein 570
  Uniprot ID: Q96NI8
  ENSP ID: ENSP00000331540
MAVGLLKAMYQELVTFRDVAVDFSQEEWDCLDSSQRHLYSNVMLENYRILVSLGLCFSKPSVILLLEQGKAPWMVKRELTKGLCSGWEPICETEELTPKQDFYEEHQSQKIIETLTSYNLEYSSLREEWKCEGYFERQPGNQKACFKEEIITHEEPLFDEREQEYKSWGSFHQNPLLCTQKIIPKEEKVHKHDTQKRSFKKNLMAIKPKSVCAEKKLLKCNDCEKVFSQSSSLTLHQRIHTGEKPYKCIECGKAFSQRSNLVQHQRIHTGEKPYECKECRKAFSQNAHLVQHLRVHTGEKPYECKVCRKAFSQFAYLAQHQRVHTGEKPYECIECGKAFSNRSSIAQHQRVHTGEKPYECNVCGKAFSLRAYLTVHQRIHTGERPYECKECGKAFSQNSHLAQHQRIHTGEKPYKCQECRKAFSQIAYLAQHQRVHTGEKPYECIECGKAFSNDSSLTQHQRVHTGEKPYECTVCGKAFSYCGSLAQHQRIHTGERPYECKECKKTFRQHAHLAHHQRIHIGESLSPPNPVNHQVL

SEQ ID NO: 100568 - protein, 86 aa, Homo sapiens
  Payload ID: 20035
  Gene Name: zinc finger protein 570
  ENSP ID: ENSP00000466484
MAVGLLKAMYQELVTFRDVAVDFSQEEWDCLDSSQRHLYSNVMLENYRILVSLGLCFSKPSVILLLEQGKAPWMVKRELTKGLCSG

SEQ ID NO: 100569 - protein, 44 aa, Homo sapiens
  Payload ID: 20035
  Gene Name: zinc finger protein 570
  ENSP ID: ENSP00000467139
MLENYRILVSLGLCFSKPSVILLLEQGKAPWMVKRELTKGLCSG

SEQ ID NO: 100570 - protein, 592 aa, Homo sapiens
  Payload ID: 20035
  Gene Name: zinc finger protein 570
  ENSP ID: ENSP00000467218
MCMYLFFLDFSIVGSGLRSGVWVSGSSSQAICVTPVRVESSEATAISQEKSQEEERMAVGLLKAMYQELVTFRDVAVDFSQEEWDCLDSSQRHLYSNVMLENYRILVSLGLCFSKPSVILLLEQGKAPWMVKRELTKGLCSGWEPICETEELTPKQDFYEEHQSQKIIETLTSYNLEYSSLREEWKCEGYFERQPGNQKACFKEEIITHEEPLFDEREQEYKSWGSFHQNPLLCTQKIIPKEEKVHKHDTQKRSFKKNLMAIKPKSVCAEKKLLKCNDCEKVFSQSSSLTLHQRIHTGEKPYKCIECGKAFSQRSNLVQHQRIHTGEKPYECKECRKAFSQNAHLVQHLRVHTGEKPYECKVCRKAFSQFAYLAQHQRVHTGEKPYECIECGKAFSNRSSIAQHQRVHTGEKPYECNVCGKAFSLRAYLTVHQRIHTGERPYECKECGKAFSQNSHLAQHQRIHTGEKPYKCQECRKAFSQIAYLAQHQRVHTGEKPYECIECGKAFSNDSSLTQHQRVHTGEKPYECTVCGKAFSYCGSLAQHQRIHTGERPYECKECKKTFRQHAHLAHHQRIHIGESLSPPNPVNHQVL

SEQ ID NO: 100571 - protein, 148 aa, Homo sapiens
  Payload ID: 20035
  Gene Name: zinc finger protein 570
  ENSP ID: ENSP00000467246
MAVGLLKAMYQELVTFRDVAVDFSQEEWDCLDSSQRHLYSNVMLENYRILVSLGLCFSKPSVILLLEQGKAPWMVKRELTKGLCSGWEPICETEELTPKQDFYEEHQSQKIIETLTSYNLEYSSLREEWKCEGYFERQPGNQKACFKE

SEQ ID NO: 100572 - protein, 44 aa, Homo sapiens
  Payload ID: 20035
  Gene Name: zinc finger protein 570
  ENSP ID: ENSP00000468034
MCMYLFFLDFSIVSVTVLLDFMTRDRERKVVWPDRLTSKQTWPY

SEQ ID NO: 100573 - protein, 609 aa, Homo sapiens
  Payload ID: 20036
  Gene Name: zinc finger protein 571
  Uniprot ID: Q7Z3V5
  ENSP ID: ENSP00000333660
MPHLLVTFRDVAIDFSQEEWECLDPAQRDLYRDVMLENYSNLISLDLESSCVTKKLSPEKEIYEMESLQWENMGKRINHHLQYNGLGDNMECKGNLEGQEASQEGLYMCVKITCEEKATESHSTSSTFHRIIPTKEKLYKCKECRQGFSYLSCLIQHEENHNIEKCSEVKKHRNTFSKKPSYIQHQRIQTGEKPYECMECGKAFGRTSDLIQHQKIHTNEKPYQCNACGKAFIRGSQLTEHQRVHTGEKPYECKKCGKAFSYCSQYTLHQRIHSGEKPYECKDCGKAFILGSQLTYHQRIHSGEKPYECKECGKAFILGSHLTYHQRVHTGEKPYICKECGKAFLCASQLNEHQRIHTGEKPYECKECGKTFFRGSQLTYHLRVHSGERPYKCKECGKAFISNSNLIQHQRIHTGEKPYKCKECGKAFICGKQLSEHQRIHTGEKPFECKECGKAFIRVAYLTQHEKIHGEKHYECKECGKTFVRATQLTYHQRIHTGEKPYKCKECDKAFIYGSQLSEHQRIHRGEKPYECKQCGKAFIRGSHLTEHLRTHTGEKPYECKECGRAFSRGSELTLHQRIHTGEKPYTCVQCGKDFRCPSQLTQHTRLHN

SEQ ID NO: 100574 - protein, 609 aa, Homo sapiens; identical to SEQ ID NO: 100573
  Payload ID: 20036
  Gene Name: zinc finger protein 571
  Uniprot ID: Q7Z3V5
  ENSP ID: ENSP00000351594

SEQ ID NO: 100575 - protein, 609 aa, Homo sapiens; identical to SEQ ID NO: 100573
  Payload ID: 20036
  Gene Name: zinc finger protein 571
  Uniprot ID: Q7Z3V5
  ENSP ID: ENSP00000392638

SEQ ID NO: 100576 - protein, 84 aa, Homo sapiens
  Payload ID: 20036
  Gene Name: zinc finger protein 571
  ENSP ID: ENSP00000466225
MDLLFQLLVTFRDVAIDFSQEEWECLDPAQRDLYRDVMLENYSNLISLDLESSCVTKKLSPEKEIYEMESLQWENMGKRINHHL

SEQ ID NO: 100577 - protein, 609 aa, Homo sapiens; identical to SEQ ID NO: 100573
  Payload ID: 20036
  Gene Name: zinc finger protein 571
  Uniprot ID: Q7Z3V5
  ENSP ID: ENSP00000467572

SEQ ID NO: 100578 - protein, 142 aa, Homo sapiens
  Payload ID: 20036
  Gene Name: zinc finger protein 571
  ENSP ID: ENSP00000468192
MPHLLVTFRDVAIDFSQEEWECLDPAQRDLYRDVMLENYSNLISLEPARTREEQHNLPVPKAGSVNLAAGFGHSRSQTGCGSSKGAEKGLQNVDFYLCPGNHPDTSCRDTYQFFCPDWTCVTLATYSGGSTRSSFHNSCFSS

SEQ ID NO: 100579 - protein, 529 aa, Homo sapiens
  Payload ID: 20037
  Gene Name: zinc finger protein 572
  Uniprot ID: Q7Z3I7
  ENSP ID: ENSP00000319305
MEQEKKLLVSDSNSFMERESLKSPFTGDTSMNNLETVHHNNSKADKLKEKPSEWSKRHRPQHYKHEDAKEMPLTWVQDEIWCHDSYESDGKSENWGNFIAKEEEKPNHQEWDSGEHTNACVQQNSSFVDRPYKCSECWKSFSNSSHLRTHQRTHSGEKPYKCSECAKCFCNSSHLIQHLRMHTGEKPYQCGECGKSFSNTSHLIIHERTHTGEKPYKCPECGKRFSSSSHLIQHHRSHTGEKPYECSVCGKGFSHSYVLIEHQRTHTGEKPYKCPDCGKSFSQSSSLIRHQRTHTGEKPYKCLECEKSFGCNSTLIKHQRIHTGEKPYQCPECGKNFSRSSNLITHQKMHTGEKSYESSEYEESLGQNCNVIEECRIQLGEKPYRCCECGKSFGLSSHLIRHQRTHTGEKPYRCSECWKTFSQSSTLVIHQRTHTGEKPYKCPDCGESFSQSFNLIRHRRTHIGEKPYKCTSCEKCFSRSAYLSQHRKIHVEKPFESPDVGDFPHEWTWKNCSGEMPFISSFSVSNSSS

SEQ ID NO: 100580 - protein, 607 aa, Homo sapiens
  Payload ID: 20038
  Gene Name: zinc finger protein 573
  Uniprot ID: Q86YE8
  ENSP ID: ENSP00000340171
MESCSVAQAGVQWPDLSSLQPPPPRFKQFSCHSLQVAGITDLDLQCEIISYIEVPTYETDISSTQLQSIYKREKLYECKKCQKKFSSGYQLILHHRFHVIERPYECKECGKNFRSGYQLTLHQRFHTGEKPYECTECGKNFRSGYQLTVHQRFHTGEKTYECRQCGKAFIYASHIVQHERIHTGGKPYECQECGRAFSQGGHLRIHQRVHTGEKPYKCKECGKTFSRRSNLVEHGQFHTDEKPYICEKCGKAFRRGHQLTVHQRVHTGKKPYECKECGKGYTTASYFLLHQRIHKGGKPYECKECKKTFTLYRNLTRHQNIHTGEKLFECKQCGKTYTTGSKLFQHQKTHTGEKPYECKECGKAFSLYGYLKQHQKIHTGMKHFECKECKKTFTLYRNLTRHQNIHTGKKLFECQECGKAYSTGSNLIQHRKTHTGEKPYKCKECGKTFSLHGYLNQHQKIHTGMKPYECKVCRKTFTFYRNLTLHQSIHTDEKPFECKECGKTFRRSSHLTAHQSIHADKKPYECKECGKAFKMYGYLTQHQKIHTGGKPYECKECGKAFSRASNLVQHERIHTGEKPYVCKQCGKTFRYGSALKAHQRIHRSIKV

SEQ ID NO: 100581 - protein, 577 aa, Homo sapiens
  Payload ID: 20038
  Gene Name: zinc finger protein 573
  Uniprot ID: Q86YE8
  ENSP ID: ENSP00000349861
MILREETQFTDLDLQCEIISYIEVPTYETDISSTQLQSIYKREKLYECKKCQKKFSSGYQLILHHRFHVIERPYECKECGKNFRSGYQLTLHQRFHTGEKPYECTECGKNFRSGYQLTVHQRFHTGEKTYECRQCGKAFIYASHIVQHERIHTGGKPYECQECGRAFSQGGHLRIHQRVHTGEKPYKCKECGKTFSRRSNLVEHGQFHTDEKPYICEKCGKAFRRGHQLTVHQRVHTGKKPYECKECGKGYTTASYFLLHQRIHKGGKPYECKECKKTFTLYRNLTRHQNIHTGEKLFECKQCGKTYTTGSKLFQHQKTHTGEKPYECKECGKAFSLYGYLKQHQKIHTGMKHFECKECKKTFTLYRNLTRHQNIHTGKKLFECQECGKAYSTGSNLIQHRKTHTGEKPYKCKECGKTFSLHGYLNQHQKIHTGMKPYECKVCRKTFTFYRNLTLHQSIHTDEKPFECKECGKTFRRSSHLTAHQSIHADKKPYECKECGKAFKMYGYLTQHQKIHTGGKPYECKECGKAFSRASNLVQHERIHTGEKPYVCKQCGKTFRYGSALKAHQRIHRSIKV

SEQ ID NO: 100582 - protein, 141 aa, Homo sapiens
  Payload ID: 20038
  Gene Name: zinc finger protein 573
  ENSP ID: ENSP00000367706
MFPVLEPHQVGLIRSYNSKTMTCELVTFRDVAIDFSRQEWEYLDPNQRDLYRDVMLENYRNLVSLGGHSISKPVVVDLLERGKEPWMILREETQFTDLDLQCEIISYIEVPTYETDISSTQLQSIYKREKLYECKKCQKKF

SEQ ID NO: 100583 - protein, 578 aa, Homo sapiens
  Payload ID: 20038
  Gene Name: zinc finger protein 573
  Uniprot ID: Q86YE8
  ENSP ID: ENSP00000375983
MLENYRNLVSLDLDLQCEIISYIEVPTYETDISSTQLQSIYKREKLYECKKCQKKFSSGYQLILHHRFHVIERPYECKECGKNFRSGYQLTLHQRFHTGEKPYECTECGKNFRSGYQLTVHQRFHTGEKTYECRQCGKAFIYASHIVQHERIHTGGKPYECQECGRAFSQGGHLRIHQRVHTGEKPYKCKECGKTFSRRSNLVEHGQFHTDEKPYICEKCGKAFRRGHQLTVHQRVHTGKKPYECKECGKGYTTASYFLLHQRIHKGGKPYECKECKKTFTLYRNLTRHQNIHTGEKLFECKQCGKTYTTGSKLFQHQKTHTGEKPYECKECGKAFSLYGYLKQHQKIHTGMKHFECKECKKTFTLYRNLTRHQNIHTGKKLFECQECGKAYSTGSNLIQHRKTHTGEKPYKCKECGKTFSLHGYLNQHQKIHTGMKPYECKVCRKTFTFYRNLTLHQSIHTDEKPFECKECGKTFRRSSHLTAHQSIHADKKPYECKECGKAFKMYGYLTQHQKIHTGGKPYECKECGKAFSRASNLVQHERIHTGEKPYVCKQCGKTFRYGSALKAHQRIHRSIKV

SEQ ID NO: 100584 - protein, 665 aa, Homo sapiens
  Payload ID: 20038
  Gene Name: zinc finger protein 573
  Uniprot ID: Q86YE8
  ENSP ID: ENSP00000440464
MFPVLEPHQVGLIRSYNSKTMTCFQELVTFRDVAIDFSRQEWEYLDPNQRDLYRDVMLENYRNLVSLGGHSISKPVVVDLLERGKEPWMILREETQFTDLDLQCEIISYIEVPTYETDISSTQLQSIYKREKLYECKKCQKKFSSGYQLILHHRFHVIERPYECKECGKNFRSGYQLTLHQRFHTGEKPYECTECGKNFRSGYQLTVHQRFHTGEKTYECRQCGKAFIYASHIVQHERIHTGGKPYECQECGRAFSQGGHLRIHQRVHTGEKPYKCKECGKTFSRRSNLVEHGQFHTDEKPYICEKCGKAFRRGHQLTVHQRVHTGKKPYECKECGKGYTTASYFLLHQRIHKGGKPYECKECKKTFTLYRNLTRHQNIHTGEKLFECKQCGKTYTTGSKLFQHQKTHTGEKPYECKECGKAFSLYGYLKQHQKIHTGMKHFECKECKKTFTLYRNLTRHQNIHTGKKLFECQECGKAYSTGSNLIQHRKTHTGEKPYKCKECGKTFSLHGYLNQHQKIHTGMKPYECKVCRKTFTFYRNLTLHQSIHTDEKPFECKECGKTFRRSSHLTAHQSIHADKKPYECKECGKAFKMYGYLTQHQKIHTGGKPYECKECGKAFSRASNLVQHERIHTGEKPYVCKQCGKTFRYGSALKAHQRIHRSIKV

SEQ ID NO: 100585 - protein, 665 aa, Homo sapiens; identical to SEQ ID NO: 100584
  Payload ID: 20038
  Gene Name: zinc finger protein 573
  Uniprot ID: Q86YE8
  ENSP ID: ENSP00000465020

SEQ ID NO: 100586 - protein, 104 aa, Homo sapiens
  Payload ID: 20038
  Gene Name: zinc finger protein 573
  ENSP ID: ENSP00000465148
MFPVLEPHQVGLIRSYNSKTMTCFQELVTFRDVAIDFSRQEWEYLDPNQRDLYRDVMLENYRNLVSLEMRSRSVARVGLKLLVSSDPPTSAFQNAGIIGVSHHA

SEQ ID NO: 100587 - protein, 104 aa, Homo sapiens; identical to SEQ ID NO: 100586
  Payload ID: 20038
  Gene Name: zinc finger protein 573
  ENSP ID: ENSP00000465857

SEQ ID NO: 100588 - protein, 110 aa, Homo sapiens
  Payload ID: 20038
  Gene Name: zinc finger protein 573
  ENSP ID: ENSP00000466316
MFPVLEPHQVGLIRSYNSKTMTCFQELVTFRDVAIDFSRQEWEYLDPNQRDLYRDVMLENYRNLVSLGGHSISKPVVVDLLERGKEPWMILREETQFTEMGVSLGCSAGL

SEQ ID NO: 100589 - protein, 44 aa, Homo sapiens
  Payload ID: 20038
  Gene Name: zinc finger protein 573
  ENSP ID: ENSP00000466356
MFPVLEPHQVGLIRSYNSKTMTCEDIPFLNQLWLIYWSEEKSPG

SEQ ID NO: 100590 - protein, 125 aa, Homo sapiens
  Payload ID: 20038
  Gene Name: zinc finger protein 573
  ENSP ID: ENSP00000467929
MFPVLEPHQVGLIRSYNSKTMTCNWGRPLKFCPTKYMKFQELVTFRDVAIDFSRQEWEYLDPNQRDLYRDVMLENYRNLVSLGGHSISKPVVVDLLERGKEPWMILREETQFTEMGVSLGCSAGL

SEQ ID NO: 100591 - protein, 102 aa, Homo sapiens
  Payload ID: 20038
  Gene Name: zinc finger protein 573
  ENSP ID: ENSP00000468391
MFPVLEPHQVGLIRSYNSKTMTCNWGRPLKFCPTKYMKFQELVTFRDVAIDFSRQEWEYLDPNQRDLYRDVMLENYRNLVSLGGHSISKPVVVDLLERGKEP

SEQ ID NO: 100592 - protein, 986 aa, Homo sapiens
  Payload ID: 20039
  Gene Name: zinc finger protein 574
  ENSP ID: ENSP00000222339
MPRATWANSKERSWAESERGPRDTGNGGSKAERHIQEIETGRGGDRAKAHRRQRMRLRGTERASLGPGRRLGDSRGTDMPGARAQGLAAAMTEESEETVLYIEHRYVCSECNQLYGSLEEVLMHQNSHVPQQHFELVGVADPGVTVATDTASGTGLYQTLVQESQYQCLECGQLLMSPSQLLEHQELHLKMMAPQEAVPAEPSPKAPPLSSSTIHYECVDCKALFASQELWLNHRQTHLRATPTKAPAPVVLGSPVVLGPPVGQARVAVEHSYRKAEEGGEGATVPSAAATTTEVVTEVELLLYKCSECSQLFQLPADFLEHQATHFPAPVPESQEPALQQEVQASSPAEVPVSQPDPLPASDHSYELRNGEAIGRDRRGRRARRNNSGEAGGAATQELFCSACDQLFLSPHQLQQHLRSHREGVFKCPLCSRVFPSPSSLDQHLGDHSSESHFLCVDCGLAFGTEALLLAHRRAHTPNPLHSCPCGKTFVNLTKFLYHRRTHGVGGVPLPTTPVPPEEPVIGFPEPAPAETGEPEAPEPPVSEETSAGPAAPGTYRCLLCSREFGKALQLTRHQRFVHRLERRHKCSICGKMFKKKSHVRNHLRTHTGERPFPCPDCSKPFNSPANLARHRLTHTGERPYRCGDCGKAFTQSSTLRQHRLVHAQHFPYRCQECGVRFHRPYRLLMHRYHHTGEYPYKCRECPRSFLLRRLLEVHQLVVHAGRQPHRCPSCGAAFPSSLRLREHRCAAAAAQAPRRFECGTCGKKVGSAARLQAHEAAHAAAGPGEVLAKEPPAPRAPRATRAPVASPAALGSTATASPAAPARRRGLECSECKKLFSTETSLQVHRRIHTGERPYPCPDCGKAFRQSTHLKDHRRLHTGERPFACEVCGKAFAISMRLAEHRRIHTGERPYSCPDCGKSYRSFSNLWKHRKTHQQQHQAAVRQQLAEAEAAVGLAVMETAVEALPLVEAIEIYPLAEAEGVQISG

SEQ ID NO: 100593 - protein, 896 aa, Homo sapiens
  Payload ID: 20039
  Gene Name: zinc finger protein 574
  Uniprot ID: Q6ZN55
  ENSP ID: ENSP00000351939
MTEESEETVLYIEHRYVCSECNQLYGSLEEVLMHQNSHVPQQHFELVGVADPGVTVATDTASGTGLYQTLVQESQYQCLECGQLLMSPSQLLEHQELHLKMMAPQEAVPAEPSPKAPPLSSSTIHYECVDCKALFASQELWLNHRQTHLRATPTKAPAPVVLGSPVVLGPPVGQARVAVEHSYRKAEEGGEGATVPSAAATTTEVVTEVELLLYKCSECSQLFQLPADFLEHQATHFPAPVPESQEPALQQEVQASSPAEVPVSQPDPLPASDHSYELRNGEAIGRDRRGRRARRNNSGEAGGAATQELFCSACDQLFLSPHQLQQHLRSHREGVFKCPLCSRVFPSPSSLDQHLGDHSSESHFLCVDCGLAFGTEALLLAHRRAHTPNPLHSCPCGKTFVNLTKFLYHRRTHGVGGVPLPTTPVPPEEPVIGFPEPAPAETGEPEAPEPPVSEETSAGPAAPGTYRCLLCSREFGKALQLTRHQRFVHRLERRHKCSICGKMFKKKSHVRNHLRTHTGERPFPCPDCSKPFNSPANLARHRLTHTGERPYRCGDCGKAFTQSSTLRQHRLVHAQHFPYRCQECGVRFHRPYRLLMHRYHHTGEYPYKCRECPRSFLLRRLLEVHQLVVHAGRQPHRCPSCGAAFPSSLRLREHRCAAAAAQAPRRFECGTCGKKVGSAARLQAHEAAHAAAGPGEVLAKEPPAPRAPRATRAPVASPAALGSTATASPAAPARRRGLECSECKKLFSTETSLQVHRRIHTGERPYPCPDCGKAFRQSTHLKDHRRLHTGERPFACEVCGKAFAISMRLAEHRRIHTGERPYSCPDCGKSYRSFSNLWKHRKTHQQQHQAAVRQQLAEAEAAVGLAVMETAVEALPLVEAIEIYPLAEAEGVQISG

SEQ ID NO: 100594 - protein, 896 aa, Homo sapiens; identical to SEQ ID NO: 100593
  Payload ID: 20039
  Gene Name: zinc finger protein 574
  Uniprot ID: Q6ZN55
  ENSP ID: ENSP00000469029

SEQ ID NO: 100595 - protein, 125 aa, Homo sapiens
  Payload ID: 20039
  Gene Name: zinc finger protein 574
  ENSP ID: ENSP00000471611
MTEESEETVLYIEHRYVCSECNQLYGSLEEVLMHQNSHVPQQHFELVGVADPGVTVATDTASGTGLYQTLVQESQYQCLECGQLLMSPSQLLEHQELHLKMMAPQEAVPAEPSPKAPPLSSSTIH

SEQ ID NO: 100596 - protein, 544 aa, Homo sapiens
  Payload ID: 20039
  Gene Name: zinc finger protein 574
  ENSP ID: ENSP00000478729
MSMWEDLCQPYQVPLSPAYSWGRGCPLPTTPVPPEEPVIGFPEPAPAETGEPEAPEPPVSEETSAGPAAPGTYRCLLCSREFGKALQLTRHQRFVHRLERRHKCSICGKMFKKKSHVRNHLRTHTGERPFPCPDCSKPFNSPANLARHRLTHTGERPYRCGDCGKAFTQSSTLRQHRLVHAQHFPYRCQECGVRFHRPYRLLMHRYHHTGEYPYKCRECPRSFLLRRLLEVHQLVVHAGRQPHRCPSCGAAFPSSLRLREHRCAAAAAQAPRRFECGTCGKKVGSAARLQAHEAAHAAAGPGEVLAKEPPAPRAPRATRAPVASPAALGSTATASPAAPARRRGLECSECKKLFSTETSLQVHRRIHTGERPYPCPDCGKAFRQSTHLKDTGACTQVSGPLPVKCVARPLPSPCAWQNIAASTQANDPTPALTVARATAPSPTSGSTARPISSSIRQLCGSSWQRRRLPLAWPSWRLLWRRYPWWKPLRSTLWPRLRGSRSVADSARLPLWHLHSLLLKALQHPLKHLYILCPFLFPSPPPCKF

SEQ ID NO: 100597 - protein, 245 aa, Homo sapiens
  Payload ID: 20040
  Gene Name: zinc finger protein 575
  Uniprot ID: Q86XF7
  ENSP ID: ENSP00000315870
MLERGAESAAGATDPSPTGKEPVTKEAPHQGPPQKPSQSAPGPTASAGSPPRPRRRPPPQRPHRCPDCDKAFSYPSKLATHRLAHGGARPHPCPDCPKAFSYPSKLAAHRLTHSGARPHPCPHCPKSFGHRSKLAAHLWTHAPTRPYPCPDCPKSFCYPSKLAAHRHTHHATDARPYPCPHCPKAFSFPSKLAAHRLCHDPPTAPGSQATAWHRCSSCGQAFGQRRLLLLHQRSHHQVEHKGERD

SEQ ID NO: 100598 - protein, 344 aa, Homo sapiens
  Payload ID: 20040
  Gene Name: zinc finger protein 575
  ENSP ID: ENSP00000413956
MSLVPGLTSIEQPQPQLLDQLGIPRRCFQDWVDQNGLPGLSVTQQIRGITLLRRLECSNTIIAHCRHELLGPPTLSPSAWSSPASPPPRALPLGSCASKMLERGAESAAGATDPSPTGKEPVTKEAPHQGPPQKPSQSAPGPTASAGSPPRPRRRPPPQRPHRCPDCDKAFSYPSKLATHRLAHGGARPHPCPDCPKAFSYPSKLAAHRLTHSGARPHPCPHCPKSFGHRSKLAAHLWTHAPTRPYPCPDCPKSFCYPSKLAAHRHTHHATDARPYPCPHCPKAFSFPSKLAAHRLCHDPPTAPGSQATAWHRCSSCGQAFGQRRLLLLHQRSHHQVEHKGERD

SEQ ID NO: 100599 - protein, 101 aa, Homo sapiens
  Payload ID: 20040
  Gene Name: zinc finger protein 575
  ENSP ID: ENSP00000471083
MLERGAESAAGATDPSPTGKEPVTKEAPHQGPPQKPSQSAPGPTASAGSPPRPRRRPPPQRPHRCPDCDKAFSYPSKLATHRLAHGGARPHPCPDCPKAFS

SEQ ID NO: 100600 - protein, 245 aa, Homo sapiens; identical to SEQ ID NO: 100597
  Payload ID: 20040
  Gene Name: zinc finger protein 575
  Uniprot ID: Q86XF7
  ENSP ID: ENSP00000472578

SEQ ID NO: 100601 - protein, 170 aa, Homo sapiens
  Payload ID: 20041
  Gene Name: zinc finger protein 576
  Uniprot ID: Q9H609
  ENSP ID: ENSP00000337852
MEDPNPEENMKQQDSPKERSPQSPGGNICHLGAPKCTRCLITFADSKFQERHMKREHPADFVAQKLQGVLFICFTCARSFPSSKALITHQRSHGPAAKPTLPVATTTAQPTFPCPDCGKTFGQAVSLRRHRQMHEVRAPPGTFACTECGQDFAQEAGLHQHYIRHARGEL

SEQ ID NO: 100602 - protein, 170 aa, Homo sapiens; identical to SEQ ID NO: 100601
  Payload ID: 20041
  Gene Name: zinc finger protein 576
  Uniprot ID: Q9H609
  ENSP ID: ENSP00000375827

SEQ ID NO: 100603 - protein, 170 aa, Homo sapiens; identical to SEQ ID NO: 100601
  Payload ID: 20041
  Gene Name: zinc finger protein 576
  Uniprot ID: Q9H609
  ENSP ID: ENSP00000435463

SEQ ID NO: 100604 - protein, 170 aa, Homo sapiens; identical to SEQ ID NO: 100601
  Payload ID: 20041
  Gene Name: zinc finger protein 576
  Uniprot ID: Q9H609
  ENSP ID: ENSP00000435899

SEQ ID NO: 100605 - protein, 170 aa, Homo sapiens; identical to SEQ ID NO: 100601
  Payload ID: 20041
  Gene Name: zinc finger protein 576
  Uniprot ID: Q9H609
  ENSP ID: ENSP00000435934

SEQ ID NO: 100606 - protein, 170 aa, Homo sapiens; identical to SEQ ID NO: 100601
  Payload ID: 20041
  Gene Name: zinc finger protein 576
  Uniprot ID: Q9H609
  ENSP ID: ENSP00000436182

SEQ ID NO: 100607 - protein, 485 aa, Homo sapiens
  Payload ID: 20042
  Gene Name: zinc finger protein 577
  Uniprot ID: Q9BSK1
  ENSP ID: ENSP00000301399
MKNATIVMSVRREQGSSSGEGSLSFEDVAVGFTREEWQFLDQSQKVLYKEVMLENYINLVSIGYRGTKPDSLFKLEQGEPPGIAEGAAHSQICPGFVIQSRRYAGKDSDAFGGYGRSCLHIKRDKTLTGVKYHRCVKPSSPKSQLNDLQKICAGGKPHECSVCGRAFSRKAQLIQHQRTERGEKPHGCGECGKTFMRKIQLTEHQRTHTGEKPHECSECGKAFSRKSQLMVHQRTHTGEKPYRCSKCGKAFSRKCRLNRHQRSHTGEKLYGCSVCGKAFSQKAYLTAHQRLHTGDKPYKCSDCGRTFYFKSDLTRHQRIHTGEKPYECSECEKAFRSKSKLIQHQRTHTGERPYSCRECGKAFAHMSVLIKHEKTHIRETAINSLTVEKPSSRSHTSLYMSELIQEQKTVNTVPIEMPSSGTPPLLNKSERLVGRNVVIVEQPFPRNQAFVVNQEFEQRISLTNEVNVAPSVINYILYLTDIVSE

SEQ ID NO: 100608 - protein, 426 aa, Homo sapiens
  Payload ID: 20042
  Gene Name: zinc finger protein 577
  Uniprot ID: Q9BSK1
  ENSP ID: ENSP00000389652
MKNATIVMSVRREQGSSSGEGSLSFEDVAVGFTREEWQFLDQSQKVLYKEVMLENYINLVSIGYRGTKPDSLFKLEQGEPPGIAEGAAHSQICPGGKPHECSVCGRAFSRKAQLIQHQRTERGEKPHGCGECGKTFMRKIQLTEHQRTHTGEKPHECSECGKAFSRKSQLMVHQRTHTGEKPYRCSKCGKAFSRKCRLNRHQRSHTGEKLYGCSVCGKAFSQKAYLTAHQRLHTGDKPYKCSDCGRTFYFKSDLTRHQRIHTGEKPYECSECEKAFRSKSKLIQHQRTHTGERPYSCRECGKAFAHMSVLIKHEKTHIRETAINSLTVEKPSSRSHTSLYMSELIQEQKTVNTVPIEMPSSGTPPLLNKSERLVGRNVVIVEQPFPRNQAFVVNQEFEQRISLTNEVNVAPSVINYILYLTDIVSE

SEQ ID NO: 100609 - protein, 111 aa, Homo sapiens
  Payload ID: 20042
  Gene Name: zinc finger protein 577
  ENSP ID: ENSP00000394828
MKNATIVMSVRREQGSSSGEGSLSFEDVAVGFTREEWQFLDQSQKVLYKEVMLENYINLVSIGYRGTKPDSLFKLEQGEPPGIAEGAAHSQICPGYSFRRRTLQMEGMQES

SEQ ID NO: 100610 - protein, 480 aa, Homo sapiens
  Payload ID: 20042
  Gene Name: zinc finger protein 577
  ENSP ID: ENSP00000404509
MKNATIVMSVRREQGSSSGEGSLSFEDVAVGFTREEWQFLDQSQKVLYKEVMLENYINLVSIGYRGTKPDSLFKLEQGEPPGIAEGAAHSQICPGFVIQSRRYAGKDSDAFGGYGRSCLHIKRDKTLTGVKYHRCVKPSSPKSQLNDLQKICAGGKPHECSVCGRAFSRKAQLIQHQRTERGEKPHGCGECGKTFMRKIQLTEHQRTHTGEKPHECSECGKAFSRKSQLMVHQRTHTGEKPYRCSKCGKAFSRKCRLNRHQRSHTGEKLYGCSVCGKAFSQKAYLTAHQRLHTGDKPYKCSDCGRTFYFKSDLTRHQRIHTGEKPYECSECEKAFRSKSKLIQHQRTHTGERPYSCRECGKAFAHMSVLIKHEKTHIRETAINSLTVEKPSSRSHTSLYMSELIQEQKTVNTVPIEMPSSGTPPLLNKSERLVGRNVVIVEQPFPRNQAFVVNQEFEQRISLTNEVNVAPSVINYILYLT

SEQ ID NO: 100611 - protein, 44 aa, Homo sapiens
  Payload ID: 20042
  Gene Name: zinc finger protein 577
  ENSP ID: ENSP00000407476
MKNATIVMSVRREQGSSSGEGSLSFEDVAVGFTREEWQFLDQSQ

SEQ ID NO: 100612 - protein, 426 aa, Homo sapiens; identical to SEQ ID NO: 100608
  Payload ID: 20042
  Gene Name: zinc finger protein 577
  Uniprot ID: Q9BSK1
  ENSP ID: ENSP00000413476

SEQ ID NO: 100613 - protein, 62 aa, Homo sapiens
  Payload ID: 20042
  Gene Name: zinc finger protein 577
  ENSP ID: ENSP00000413560
MKNATIVMSVRREQGSSSGEGSLSFEDVAVGFTREEWQFLDQSQKVLYKEVMLENYINLVSI

SEQ ID NO: 100614 - protein, 58 aa, Homo sapiens
  Payload ID: 20042
  Gene Name: zinc finger protein 577
  ENSP ID: ENSP00000415307
MKNATIVMSVRREQGSSSGEGSLSFEDVAVGFTREEWQFLDQSQKVLYKEVMLENYIN

SEQ ID NO: 100615 - protein, 59 aa, Homo sapiens
  Payload ID: 20042
  Gene Name: zinc finger protein 577
  ENSP ID: ENSP00000467321
MKNATIVMSVRREQGSSSGEGSLSFEDVAVGFTREEWQFLDQSQKVLYKEVMLENYINL

SEQ ID NO: 100616 - protein, 14 aa, Homo sapiens
  Payload ID: 20042
  Gene Name: zinc finger protein 577
  ENSP ID: ENSP00000467575
MKNATIVMSVRREQ

SEQ ID NO: 100617 - protein, 590 aa, Homo sapiens
  Payload ID: 20043
  Gene Name: zinc finger protein 578
  Uniprot ID: Q96N58
  ENSP ID: ENSP00000459216
MLHEEAAQKRKGKEPGMALPQGRLTFRDVAIEFSLAEWKFLNPAQRALYREVMLENYRNLEAVDISSKRMMKEVLSTGQGNTEVIHTGMLQRHESYHTGDFCFQEIEKDIHDFEFQSQKDERNGHEASMPKIKELMGSTDRHDQRHAGNKPIKDQLGLSFHLHLPELHIFQPEEKIANQVEKSVNDASSISTSQRISCRPETHTPNNYGNNFFHSSLLTQKQEVHMREKSFQCNETGEAFNCSSFVRKHQIIHLGEKQYKFDICGKVFNEKRYLARHRRCHTSEKPYKCNECGKSFSYKSSLTCHRRCHTGEKPYKCNECGKSFSYKSSLTCHHRCHTGEKPYKCNECGKSFSYKSSLRCHRRLHTGIKPYKCNECGKMFGQNSTLVIHKAIHTGEKPYKCNECGKAFNQQSHLSRHHRLHTGEKPYKCNDCGKAFIHQSSLARHHRLHTGEKSYKCEECDRVFSQKSNLERHKIIHTGEKPYKCNECHKTFSHRSSLPCHRRLHSGEKPYKCNECGKTFNVQSHLSRHHRLHTGEKPYKCKVCDKAFMCHSYLANHTRIHSGEKPYKCNECGKAHNHLIDSSIKPCMSS

SEQ ID NO: 100618 - protein, 253 aa, Homo sapiens
  Payload ID: 20043
  Gene Name: zinc finger protein 578
  ENSP ID: ENSP00000470790
MLHEEAAQKRKGKEPGMALPQGRLTFRDVAIEFSLAEWKFLNPAQRALYREVMLENYRNLEAVDISSKRMMKEVLSTGQGNTEVIHTGMLQRHESYHTGDFCFQEIEKDIHDFEFQSQKDERNGHEASMPKIKELMGSTDRHDQRHAGNKPIKDQLGLSFHLHLPELHIFQPEEKIANQVEKSVNDASSISTSQRISCRPETHTPNNYGNNFFHSSLLTQKQEVHMREKSFQCNETGEAFNCSSFVRKHQIIH

SEQ ID NO: 100619 - protein, 562 aa, Homo sapiens
  Payload ID: 20044
  Gene Name: zinc finger protein 579
  Uniprot ID: Q8NAF0
  ENSP ID: ENSP00000320188
MDPQPPPPAQGSPPHRGRGRGRGRGRGRGRGRGRGGAGAPRAPLPCPTCGRLFRFPYYLSRHRLSHSGLRPHACPLCPKAFRRPAHLSRHLRGHGPQPPLRCAACPRTFPEPAQLRRHLAQEHAGGEVELAIERVAKETAEPSWGPQDEGSEPPTTAAAGATEEEAVAAWPETWPAGEPSTLAAPTSAAEPRESESEEAEAGAAELRAELALAAGRQEEKQVLLQADWTLLCLRCREAFATKGELKAHPCLRPEGEQEGEGGPPPRPKRHQCSICLKAFARPWSLSRHRLVHSTDRPFVCPDCGLAFRLASYLRQHRRVHGPLSLLAPLPAAGKKDDKASGARNSAKGPEGGEGAECGGASEGGEGQNGGDAAPARPPAGEPRFWCPECGKGFRRRAHLRQHGVTHSGARPFQCVRCQREFKRLADLARHAQVHAGGPAPHPCPRCPRRFSRAYSLLRHQRCHRAELERAAALQALQAQAPTSPPPPPPPLKAEQEEEGLPLPLANIKEEPPSPGTPPQSPPAPPVFLSASCFDSQDHSAFEMEEEEVDSKAHLRGLGGLAS

SEQ ID NO: 100620 - protein, 15 aa, Homo sapiens
  Payload ID: 20044
  Gene Name: zinc finger protein 579
  ENSP ID: ENSP00000465146
MDPQPPPPAQGSPPH

SEQ ID NO: 100621 - protein, 172 aa, Homo sapiens
  Payload ID: 20045
  Gene Name: zinc finger protein 580
  Uniprot ID: Q9UK33
  ENSP ID: ENSP00000320050
MLLLPPRPPHPRSSSPEAMDPPPPKAPPFPKAEGPSSTPSSAAGPRPPRLGRHLLIDANGVPYTYTVQLEEEPRGPPQREAPPGEPGPRKGYSCPECARVFASPLRLQSHRVSHSDLKPFTCGACGKAFKRSSHLSRHRATHRARAGPPHTCPLCPRRFQDAAELAQHVRLH

SEQ ID NO: 100622 - protein, 172 aa, Homo sapiens; identical to SEQ ID NO: 100621
  Payload ID: 20045
  Gene Name: zinc finger protein 580
  Uniprot ID: Q9UK33
  ENSP ID: ENSP00000443957

SEQ ID NO: 100623 - protein, 172 aa, Homo sapiens; identical to SEQ ID NO: 100621
  Payload ID: 20045
  Gene Name: zinc finger protein 580
  Uniprot ID: Q9UK33
  ENSP ID: ENSP00000446126

SEQ ID NO: 100624 - protein, 22 aa, Homo sapiens
  Payload ID: 20045
  Gene Name: zinc finger protein 580
  ENSP ID: ENSP00000465028
MLLLPPRPPHPRSSSPEAMDPP

SEQ ID NO: 100625 - protein, 104 aa, Homo sapiens
  Payload ID: 20045
  Gene Name: zinc finger protein 580
  ENSP ID: ENSP00000467142
MLLLPPRPPHPRSSSPEAMDPPPPKAPPFPKAEGPSSTPSSAAGPRPPRLGRHLLIDANGVPYTYTVQLEEEPRGPPQREAPPGEPGPRKGYSCPECARVFASP

SEQ ID NO: 100626 - protein, 103 aa, Homo sapiens
  Payload ID: 20045
  Gene Name: zinc finger protein 580
  ENSP ID: ENSP00000468407
MLLLPPRPPHPRSSSPEAMDPPPPKAPPFPKAEGPSSTPSSAAGPRPPRLGRHLLIDANGVPYTYTVQLEEEPRGPPQREAPPGEPGPRKGYSCPECARVFAS

SEQ ID NO: 100627 - protein, 197 aa, Homo sapiens
  Payload ID: 20046
  Gene Name: zinc finger protein 581
  Uniprot ID: Q9P0T4
  ENSP ID: ENSP00000270451
MLVLPSPCPQPLAFSSVETMEGPPRRTCRSPEPGPSSSIGSPQASSPPRPNHYLLIDTQGVPYTVLVDEESQREPGASGAPGQKKCYSCPVCSRVFEYMSYLQRHSITHSEVKPFECDICGKAFKRASHLARHHSIHLAGGGRPHGCPLCPRRFRDAGELAQHSRVHSGERPFQCPHCPRRFMEQNTLQKHTRWKHP

SEQ ID NO: 100628 - protein, 197 aa, Homo sapiens; identical to SEQ ID NO: 100627
  Payload ID: 20046
  Gene Name: zinc finger protein 581
  Uniprot ID: Q9P0T4
  ENSP ID: ENSP00000466047

SEQ ID NO: 100629 - protein, 139 aa, Homo sapiens
  Payload ID: 20046
  Gene Name: zinc finger protein 581
  ENSP ID: ENSP00000466338
MLVLPSPCPQPLAFSSVETMEGPPRRTCRSPEPGPSSSIGSPQASSPPRPNHYLLIDTQGVPYTVLVDEESQREPGASGAPGQKKCYSCPVCSRVFEYMSYLQRHSITHSEVKPFECDICGKAFKRASHLARHHSIHLA

SEQ ID NO: 100630 - protein, 197 aa, Homo sapiens; identical to SEQ ID NO: 100627
  Payload ID: 20046
  Gene Name: zinc finger protein 581
  Uniprot ID: Q9P0T4
  ENSP ID: ENSP00000466564

SEQ ID NO: 100631 - protein, 517 aa, Homo sapiens
  Payload ID: 20047
  Gene Name: zinc finger protein 582
  Uniprot ID: Q96NG8
  ENSP ID: ENSP00000301310
MSLGSELFRDVAIVFSQEEWQWLAPAQRDLYRDVMLETYSNLVSLGLAVSKPDVISFLEQGKEPWMVERVVSGGLCPVLESRYDTKELFPKQHVYEVESPQWEIMESLTSYGLECSSFQDDWECRNQFDRQQGNPDRHFHQMIIRHEEMPTFDQHASLTFYQKIHTREKPFGYNKCRKDFWQKELLINHQGIYTNEKPYKCKECGKAFKYGSRLIQHENIHSGKKPYECKECGKAFNSGSNFIQHQRVHTGEKPYECKDCEKAFSRSSQLIEHQRTHTGEKPYQCKECGKAFNRISHLKVHYRIHTGEKPYACKECGKTFSHRSQLIQHQTVHTGRKLYECKECGKAFNQGSTLIRHQRIHTGEKPYECKVCGKAFRVSSQLKQHQRIHTGEKPYQCKVCGRAFKRVSHLTVHYRIHTGEKPYECKECGKAFSHCSQLIHHQVIHTEKKPYEYKECEKTLSHDSTTVQPQRMHNRETHVNIINVEKPSISSYPLLIIREFMLASNHMNGSNGESPLA

SEQ ID NO: 100632 - protein, 517 aa, Homo sapiens; identical to SEQ ID NO: 100631
  Payload ID: 20047
  Gene Name: zinc finger protein 582
  Uniprot ID: Q96NG8
  ENSP ID: ENSP00000465619

SEQ ID NO: 100633 - protein, 78 aa, Homo sapiens
  Payload ID: 20047
  Gene Name: zinc finger protein 582
  ENSP ID: ENSP00000465639
MSLGSELFRDVAIVFSQEEWQWLAPAQRDLYRDVMLETYSNLVSLGLAVSKPDVISFLEQGKEPWMVERVVSGGLCPG

SEQ ID NO: 100634 - protein, 178 aa, Homo sapiens
  Payload ID: 20047
  Gene Name: zinc finger protein 582
  ENSP ID: ENSP00000466452
MSLGSELFRDVAIVFSQEEWQWLAPAQRDLYRDVMLETYSNLVSLGLAVSKPDVISFLEQGKEPWMVERVVSGGLCPVLESRYDTKELFPKQHVYEVESPQWEIMESLTSYGLECSSFQDDWECRNQFDRQQGNPDRHFHQMIIRHEEMPTFDQHASLTFYQKIHTREKPFGYNKCRK

SEQ ID NO: 100635 - protein, 181 aa, Homo sapiens
  Payload ID: 20047
  Gene Name: zinc finger protein 582
  ENSP ID: ENSP00000466875
MSLGSELFRDVAIVFSQEEWQWLAPAQRDLYRDVMLETYSNLVSLGLAVSKPDVISFLEQGKEPWMVERVVSGGLCPVLESRYDTKELFPKQHVYEVESPQWEIMESLTSYGLECSSFQDDWECRNQFDRQQGNPDRHFHQMIIRHEEMPTFDQHASLTFYQKIHTREKPFGYNKCRKDFW

SEQ ID NO: 100636 - protein, 103 aa, Homo sapiens
  Payload ID: 20047
  Gene Name: zinc finger protein 582
  ENSP ID: ENSP00000468679
MSLGSELFRDVAIVFSQEEWQWLAPAQRDLYRDVMLETYSNLVSLGLAVSKPDVISFLEQGKEPWMVERVVSGGLCPGAKGQRGRDAGCACCKRTEQNPGQLW

SEQ ID NO: 100637 - protein, 517 aa, Homo sapiens; identical to SEQ ID NO: 100631
  Payload ID: 20047
  Gene Name: zinc finger protein 582
  Uniprot ID: Q96NG8
  ENSP ID: ENSP00000483414

SEQ ID NO: 100638 - protein, 569 aa, Homo sapiens
  Payload ID: 20048
  Gene Name: zinc finger protein 583
  Uniprot ID: Q96ND8
  ENSP ID: ENSP00000291598
MSKDLVTFGDVAVNFSQEEWEWLNPAQRNLYRKVMLENYRSLVSLGVSVSKPDVISLLEQGKEPWMVKKEGTRGPCPDWEYVFKNSEFSSKQETYEESSKVVTVGARHLSYSLDYPSLREDCQSEDWYKNQLGSQEVHLSQLIITHKEILPEVQNKEYNKSWQTFHQDTIFDIQQSFPTKEKAHKHEPQKKSYRKKSVEMKHRKVYVEKKLLKCNDCEKVFNQSSSLTLHQRIHTGEKPYACVECGKTFSQSANLAQHKRIHTGEKPYECKECRKAFSQNAHLAQHQRVHTGEKPYQCKECKKAFSQIAHLTQHQRVHTGERPFECIECGKAFSNGSFLAQHQRIHTGEKPYVCNVCGKAFSHRGYLIVHQRIHTGERPYECKECRKAFSQYAHLAQHQRVHTGEKPYECKVCRKAFSQIAYLDQHQRVHTGEKPYECIECGKAFSNSSSLAQHQRSHTGEKPYMCKECRKTFSQNAGLAQHQRIHTGEKPYECNVCGKAFSYSGSLTLHQRIHTGERPYECKDCRKSFRQRAHLAHHERIHTMESFLTLSSPSPSTSNQLPRPVGFIS

SEQ ID NO: 100639 - protein, 137 aa, Homo sapiens
  Payload ID: 20048
  Gene Name: zinc finger protein 583
  ENSP ID: ENSP00000375657
MSKDLVTFGDVAVNFSQEEWEWLNPAQRNLYRKVMLENYRSLVSLGVSVSKPDVISLLEQGKEPWMVKKEGTRGPCPDWEYVFKNSEFSSKQETYEESSKVVTVGARHLSYSLDYPSLREDCQSEDWYKNQLGSQEV

SEQ ID NO: 100640 - protein, 569 aa, Homo sapiens; identical to SEQ ID NO: 100638
  Payload ID: 20048
  Gene Name: zinc finger protein 583
  Uniprot ID: Q96ND8
  ENSP ID: ENSP00000388502

SEQ ID NO: 100641 - protein, 129 aa, Homo sapiens
  Payload ID: 20048
  Gene Name: zinc finger protein 583
  ENSP ID: ENSP00000444291
MSKDLVTFGDVAVNFSQEEWEWLNPAQRNLYRKVMLENYRSLVSLGVSVSKPDVISLLEQGKEPWMVKKEGTRGPCPDWEYVFKNSEFSSKQETYEESSKVVTVGARHLSYSLDYPSLREDCQSEDWYK

SEQ ID NO: 100642 - protein, 421 aa, Homo sapiens
  Payload ID: 20049
  Gene Name: zinc finger protein 584
  Uniprot ID: Q8IVC4
  ENSP ID: ENSP00000306756
MAGEAEAQLDPSLQGLVMFEDVTVYFSREEWGLLNVTQKGLYRDVMLENFALVSSLGLAPSRSPVFTQLEDDEQSWVPSWVDVTPVSRAEARRGFGLDGLCRVEDERAHPEHLKSYRVIQHQDTHSEGKPRRHTEHGAAFPPGSSCGQQQEVHVAEKLFKCSDCGKVFLKAFALLDHLITHSEERPFRCPTGRSAFKKSAHINPRKIHTGETAHVCNECGKAFSYPSKLRKHQKVHTGIKPFKCSDCGKTFNRKDALVLHQRIHTGERPYECSKCGKTFSVLSTLIRHRKVHIGERPYECTECGKFFKYNNSFILHQRVHTGERPFECKQCGKGYVTRSGLYQHWKVHTGERPYECSLCGKTFTTRSYRNRHQQFHTEERSYECTECGKAFKHSSTLLQHKKVHTPERRQEDRAHGKVVSC

SEQ ID NO: 100643 - protein, 145 aa, Homo sapiens
  Payload ID: 20049
  Gene Name: zinc finger protein 584
  ENSP ID: ENSP00000320731
MAGEAEGLVMFEDVTVYFSREEWGLLNVTQKGLYRDVMLENFALVSSLGLAPSRSPVFTQLEDDEQSWVPSWVDVTPVSRAEARRGFGLGPACSCLSGLRLLIALLCICAELSTVGDSVRVLKCAHILKQMVCVEWRMREPILSI

SEQ ID NO: 100644 - protein, 93 aa, Homo sapiens
  Payload ID: 20049
  Gene Name: zinc finger protein 584
  ENSP ID: ENSP00000470404
MLENFALVSSLGLAPSRSPVFTQLEDDEQSWVPSWVDVTPVSRAEARRGFGLVCHLYHDFQAPHVPASLACVSSLPFSVSVQSCLLLATQCVS

SEQ ID NO: 100645 - protein, 376 aa, Homo sapiens
  Payload ID: 20049
  Gene Name: zinc finger protein 584
  ENSP ID: ENSP00000471105
MLENFALVSSLGLAPSRSPVFTQLEDDEQSWVPSWVDVTPVSRAEARRGFGLDGLCRVEDERAHPEHLKSYRVIQHQDTHSEGKPRRHTEHGAAFPPGSSCGQQQEVHVAEKLFKCSDCGKVFLKAFALLDHLITHSEERPFRCPTGRSAFKKSAHINPRKIHTGETAHVCNECGKAFSYPSKLRKHQKVHTGIKPFKCSDCGKTFNRKDALVLHQRIHTGERPYECSKCGKTFSVLSTLIRHRKVHIGERPYECTECGKFFKYNNSFILHQRVHTGERPFECKQCGKGYVTRSGLYQHWKVHTGERPYECSLCGKTFTTRSYRNRHQQFHTEERSYECTECGKAFKHSSTLLQHKKVHTPERRQEDRAHGKVVSC

SEQ ID NO: 100646 - protein, 32 aa, Homo sapiens
  Payload ID: 20049
  Gene Name: zinc finger protein 584
  ENSP ID: ENSP00000472853
MAGEAEDLHLRDPLCLPSWRMMNSRGCPAGWM

SEQ ID NO: 100647 - protein, 29 aa, Homo sapiens
  Payload ID: 20049
  Gene Name: zinc finger protein 584
  ENSP ID: ENSP00000473184
MAGEAEVSRGCLRGMRGPTRTCTFEIPCV

SEQ ID NO: 100648 - protein, 769 aa, Homo sapiens
  Payload ID: 20050
  Gene Name: zinc finger protein 585A
  Uniprot ID: Q6P3V2
  ENSP ID: ENSP00000292841
MPANWTSPQKSSALAPEDHGSSYEGSVSFRDVAIDFSREEWRHLDPSQRNLYRDVMLETYSHLLSVGYQVPEAEVVMLEQGKEPWALQGERPRQSCPGEKLWDHNQCRKILSYKQVSSQPQKMYPGEKAYECAKFEKIFTQKSQLKVHLKVLAGEKLYVCIECGKAFVQKPEFIIHQKTHMREKPFKCNECGKSFFQVSSLFRHQRIHTGEKLYECSQCGKGFSYNSDLSIHEKIHTGERHHECTDCGKAFTQKSTLKMHQKIHTGERSYICIECGQAFIQKTHLIAHRRIHTGEKPYECSNCGKSFISKSQLQVHQRVHTRVKPYICTEYGKVFSNNSNLVTHKKVQSREKSSICTECGKAFTYRSELIIHQRIHTGEKPYECSDCGKAFTQKSALTVHQRIHTGEKSYICMKCGLAFIQKAHLIAHQIIHTGEKPHKCGHCGKLFTSKSQLHVHKRIHTGEKPYMCNKCGKAFTNRSNLITHQKTHTGEKSYICSKCGKAFTQRSDLITHQRIHTGEKPYECNTCGKAFTQKSHLNIHQKIHTGERQYECHECGKAFNQKSILIVHQKIHTGEKPYVCTECGRAFIRKSNFITHQRIHTGEKPYECSDCGKSFTSKSQLLVHQPVHTGEKPYVCAECGKAFSGRSNLSKHQKTHTGEKPYICSECGKTFRQKSELITHHRIHTGEKPYECSDCGKSFTKKSQLQVHQRIHTGEKPYVCAECGKAFTDRSNLNKHQTTHTGDKPYKCGICGKGFVQKSVFSVHQSSHA

SEQ ID NO: 100649 - protein, 714 aa, Homo sapiens
  Payload ID: 20050
  Gene Name: zinc finger protein 585A
  ENSP ID: ENSP00000349440
MLETYSHLLSVGYQVPEAEVVMLEQGKEPWALQGERPRQSCPGEKLWDHNQCRKILSYKQVSSQPQKMYPGEKAYECAKFEKIFTQKSQLKVHLKVLAGEKLYVCIECGKAFVQKPEFIIHQKTHMREKPFKCNECGKSFFQVSSLFRHQRIHTGEKLYECSQCGKGFSYNSDLSIHEKIHTGERHHECTDCGKAFTQKSTLKMHQKIHTGERSYICIECGQAFIQKTHLIAHRRIHTGEKPYECSNCGKSFISKSQLQVHQRVHTRVKPYICTEYGKVFSNNSNLVTHKKVQSREKSSICTECGKAFTYRSELIIHQRIHTGEKPYECSDCGKAFTQKSALTVHQRIHTGEKSYICMKCGLAFIQKAHLIAHQIIHTGEKPHKCGHCGKLFTSKSQLHVHKRIHTGEKPYMCNKCGKAFTNRSNLITHQKTHTGEKSYICSKCGKAFTQRSDLITHQRIHTGEKPYECNTCGKAFTQKSHLNIHQKIHTGERQYECHECGKAFNQKSILIVHQKIHTGEKPYVCTECGRAFIRKSNFITHQRIHTGEKPYECSDCGKSFTSKSQLLVHQPVHTGEKPYVCAECGKAFSGRSNLSKHQKTHTGEKPYICSECGKTFRQKSELITHHRIHTGEKPYECSDCGKSFTKKSQLQVHQRIHTGEKPYVCAECGKAFTDRSNLNKHQTTHTGDKPYKCGICGKGFVQKSVFSVHQSSHA

SEQ ID NO: 100650 - protein, 714 aa, Homo sapiens; identical to SEQ ID NO: 100649
  Payload ID: 20050
  Gene Name: zinc finger protein 585A
  ENSP ID: ENSP00000375998

SEQ ID NO: 100651 - protein, 25 aa, Homo sapiens
  Payload ID: 20050
  Gene Name: zinc finger protein 585A
  ENSP ID: ENSP00000466185
MPANWTSPQKSSALAPEDHGSSYEC

SEQ ID NO: 100652 - protein, 113 aa, Homo sapiens
  Payload ID: 20050
  Gene Name: zinc finger protein 585A
  ENSP ID: ENSP00000466825
MPANWTSPQKSSALAPEDHGSSYEGSVSFRDVAIDFSREEWRHLDPSQRNLYRDVMLETYSHLLSVGYQVPEAEVVMLEQGKEPWALQGERPRQSCPAPCLVNSHHLQESFRG

SEQ ID NO: 100653 - protein, 56 aa, Homo sapiens; identical to SEQ ID NO: 20359
  Payload ID: 20051
  Gene Name: zinc finger protein 585B
  ENSP ID: ENSP00000432760

SEQ ID NO: 100654 - protein, 769 aa, Homo sapiens
  Payload ID: 20051
  Gene Name: zinc finger protein 585B
  Uniprot ID: Q52M93
  ENSP ID: ENSP00000433773
MPASWTSPQKSSALAPEDHGSSYEGSVSFRDVAIDFSREEWRHLDLSQRNLYRDVMLETYSHLLSVGYQVPKPEVVMLEQGKEPWALQGERPRHSCPGEKLWDHNQHRKIIGYKPASSQDQKIYSGEKSYECAEFGKSFTWKSQFKVHLKVPTGEKLYVCIECGRAFVQKPEFITHQKTHMREKPYKCNECGKSFFQVSSLFRHHRIHTGEKLYECSECGKGFPYNSDLSIHEKIHTGERHHECTDCGKAFTQKSTLKIHQKIHTGERSYICIECGQAFIQKTQLIAHRRIHSGEKPYECNNCGKSFISKSQLQVHQRVHTRVKPYICTEYGKVFSNNSNLITHEKIQSREKSSICTECGKAFTYRSELIIHQRIHTGEKPYECSDCGRAFTQKSALTVHQRIHTGEKSYICMKCGLAFIRKAHLITHQIIHTGEKPYKCGHCGKLFTSKSQLHVHKRIHTGEKPYVCNKCGKAFTNRSNLITHQKTHTGEKSYICSKCGKAFTQRSDLITHQRIHTGEKPYECNTCGKAFTQKSNLNIHQKIHTGERQYECHECGKAFNQKSILIVHQKIHTGEKPYVCTECGRAFIRKSNFITHQRIHTGEKPYECSDCGKSFTSKSQLLVHQPVHTGEKPYVCAECGKAFSGRSNLSKHQKTHTGEKPYICSECGKTFRQKSELITHHRIHTGEKPYECSDCGKSFTKKSQLQVHQRIHTGEKPYVCAECGKAFSNRSNLNKHQTTHTGDKPYKCGICGKGFVQKSVFSVHQSSHA

SEQ ID NO: 100655 - protein, 35 aa, Homo sapiens
  Payload ID: 20051
  Gene Name: zinc finger protein 585B
  ENSP ID: ENSP00000434541
MPASWTSPQKSSALAPEDHGSSYEAGVLWCNHGSL

SEQ ID NO: 100656 - protein, 157 aa, Homo sapiens
  Payload ID: 20051
  Gene Name: zinc finger protein 585B
  ENSP ID: ENSP00000435268
MPASWTSPQKSSALAPEDHGSSYEGSVSFRDVAIDFSREEWRHLDLSQRNLYRDVMLETYSHLLSVGYQVPKPEVVMLEQGKEPWALQGERPRHSCPGEKLWDHNQHRKIIGYKPASSQDQKIYSGEKSYECAEFGKSFTWKSQFKASQNSYRRKTI

SEQ ID NO: 100657 - protein, 714 aa, Homo sapiens
  Payload ID: 20051
  Gene Name: zinc finger protein 585B
  ENSP ID: ENSP00000436774
MLETYSHLLSVGYQVPKPEVVMLEQGKEPWALQGERPRHSCPGEKLWDHNQHRKIIGYKPASSQDQKIYSGEKSYECAEFGKSFTWKSQFKVHLKVPTGEKLYVCIECGRAFVQKPEFITHQKTHMREKPYKCNECGKSFFQVSSLFRHHRIHTGEKLYECSECGKGFPYNSDLSIHEKIHTGERHHECTDCGKAFTQKSTLKIHQKIHTGERSYICIECGQAFIQKTQLIAHRRIHSGEKPYECNNCGKSFISKSQLQVHQRVHTRVKPYICTEYGKVFSNNSNLITHEKIQSREKSSICTECGKAFTYRSELIIHQRIHTGEKPYECSDCGRAFTQKSALTVHQRIHTGEKSYICMKCGLAFIRKAHLITHQIIHTGEKPYKCGHCGKLFTSKSQLHVHKRIHTGEKPYVCNKCGKAFTNRSNLITHQKTHTGEKSYICSKCGKAFTQRSDLITHQRIHTGEKPYECNTCGKAFTQKSNLNIHQKIHTGERQYECHECGKAFNQKSILIVHQKIHTGEKPYVCTECGRAFIRKSNFITHQRIHTGEKPYECSDCGKSFTSKSQLLVHQPVHTGEKPYVCAECGKAFSGRSNLSKHQKTHTGEKPYICSECGKTFRQKSELITHHRIHTGEKPYECSDCGKSFTKKSQLQVHQRIHTGEKPYVCAECGKAFSNRSNLNKHQTTHTGDKPYKCGICGKGFVQKSVFSVHQSSHA

SEQ ID NO: 100658 - protein, 137 aa, Homo sapiens
  Payload ID: 20051
  Gene Name: zinc finger protein 585B
  ENSP ID: ENSP00000465871
MQLNEEINKGSVSFRDVAIDFSREEWRHLDLSQRNLYRDVMLETYSHLLSVGYQVPKPEVVMLEQGKEPWALQGERPRHSCPGEKLWDHNQHRKIIGYKPASSQDQKIYSGEKSYECAEFGKSFTWKSQFKVHLKVP

SEQ ID NO: 100659 - protein, 60 aa, Homo sapiens
  Payload ID: 20051
  Gene Name: zinc finger protein 585B
  ENSP ID: ENSP00000467283
MPASWTSPQKSSALAPEDHGSSYESFALVAQAGVQWHNLGSPQPLPPGFKRFSCLSLPSS

SEQ ID NO: 100660 - protein, 84 aa, Homo sapiens
  Payload ID: 20051
  Gene Name: zinc finger protein 585B
  ENSP ID: ENSP00000467380
MQLNEEINKGSVSFRDVAIDFSREEWRHLDLSQRNLYRDVMLETYSHLLSVGYQVPKPEVVMLEQGKEPWALQGERPRHSCPGE

SEQ ID NO: 100661 - protein, 359 aa, Homo sapiens
  Payload ID: 20052
  Gene Name: zinc finger protein 586
  Uniprot ID: Q9NXT0
  ENSP ID: ENSP00000375583
MLETLTLISSLGCWHGGEDEAAPSKQSTCIHIYKDQGGHSGERPYECGEYRKLFKNKSCLTEPRRDHKHRNVRTGERPYECSKYGKLFHQKPTLHIHERFHTGQKTYECSECGKSFHQSSSLLQRQTLHTRERPYECIECGKAFAEKSSLINHRKVHSGAKRYECNECGKSFAYTSSLIKHRRIHTGERPYECSECGRSFAENSSLIKHLRVHTGERPYECVECGKSFRRSSSLLQHQRVHTRERPYECSECGKSFSLRSNLIHHQRVHTGERHECGQCGKSFSRKSSLIIHLRVHTGERPYECSDCGKSFAENSSLIKHLRVHTGERPYECIDCGKSFRHSSSFRRHQRVHTGMRPYK

SEQ ID NO: 100662 - protein, 210 aa, Homo sapiens
  Payload ID: 20052
  Gene Name: zinc finger protein 586
  Uniprot ID: Q9NXT0
  ENSP ID: ENSP00000379454
MAAAAALRAPAQVVGMEGKMRQHLLSRARVYIYTKTREVIVEKGLMSVGNIGNYLRTSPASLNPEEITNTGMFALEKGLMSAANMGNYFTKSLHSIFMRDFILGKRPMSAVSVENHFTKALHSCSVRHFTLEKGLMSVLNVGKPLLKSPVSLTTGKFTLEQSVMNAMNVGSPLLIHLVSLNTGGFTLERGLMSAVNVGDPLLKTPVLLNT

SEQ ID NO: 100663 - protein, 402 aa, Homo sapiens
  Payload ID: 20052
  Gene Name: zinc finger protein 586
  Uniprot ID: Q9NXT0
  ENSP ID: ENSP00000379458
MAAAAALRAPAQSSVTFEDVAVNFSLEEWSLLNEAQRCLYRDVMLETLTLISSLGCWHGGEDEAAPSKQSTCIHIYKDQGGHSGERPYECGEYRKLFKNKSCLTEPRRDHKHRNVRTGERPYECSKYGKLFHQKPTLHIHERFHTGQKTYECSECGKSFHQSSSLLQRQTLHTRERPYECIECGKAFAEKSSLINHRKVHSGAKRYECNECGKSFAYTSSLIKHRRIHTGERPYECSECGRSFAENSSLIKHLRVHTGERPYECVECGKSFRRSSSLLQHQRVHTRERPYECSECGKSFSLRSNLIHHQRVHTGERHECGQCGKSFSRKSSLIIHLRVHTGERPYECSDCGKSFAENSSLIKHLRVHTGERPYECIDCGKSFRHSSSFRRHQRVHTGMRPYK

SEQ ID NO: 100664 - protein, 101 aa, Homo sapiens
  Payload ID: 20052
  Gene Name: zinc finger protein 586
  ENSP ID: ENSP00000470397
MAAAAALRAPAQSSVTFEDVAVNFSLEEWSLLNEAQGCLYHDVMLETLTLISSLGGVPPHRLFPTGACGPQVPSSRIRPSPGHCPRPSLYLSLSPPHPTGV

SEQ ID NO: 100665 - protein, 76 aa, Homo sapiens
  Payload ID: 20052
  Gene Name: zinc finger protein 586
  ENSP ID: ENSP00000471663
MAAAAALRAPAQSSVTFEDVAVNFSLEEWSLLNEAQGCLYHDVMLETLTLISSLERVHSPAVLQQEHTEQRRQGHL

SEQ ID NO: 100666 - protein, 23 aa, Homo sapiens
  Payload ID: 20052
  Gene Name: zinc finger protein 586
  ENSP ID: ENSP00000472972
MAAAAALRAPAQMHLWVAPSLQP

SEQ ID NO: 100667 - protein, 575 aa, Homo sapiens
  Payload ID: 20053
  Gene Name: zinc finger protein 587
  Uniprot ID: Q96SQ5
  ENSP ID: ENSP00000345479
MAAAVPRRPTQQGTVTFEDVAVNFSQEEWCLLSEAQRCLYRDVMLENLALISSLGCWCGSKDEEAPCKQRISVQRESQSRTPRAGVSPKKAHPCEMCGLILEDVFHFADHQETHHKQKLNRSGACGKNLDDTAYLHQHQKQHIGEKFYRKSVREASFVKKRKLRVSQEPFVFREFGKDVLPSSGLCQEEAAVEKTDSETMHGPPFQEGKTNYSCGKRTKAFSTKHSVIPHQKLFTRDGCYVCSDCGKSFSRYVSFSNHQRDHTAKGPYDCGECGKSYSRKSSLIQHQRVHTGQTAYPCEECGKSFSQKGSLISHQLVHTGEGPYECRECGKSFGQKGNLIQHQQGHTGERAYHCGECGKSFRQKFCFINHQRVHTGERPYKCGECGKSFGQKGNLVHHQRGHTGERPYECKECGKSFRYRSHLTEHQRLHTGERPYNCRECGKLFNRKYHLLVHERVHTGERPYACEVCGKLFGNKHSVTIHQRIHTGERPYECSECGKSFLSSSALHVHKRVHSGQKPYKCSECGKSFSECSSLIKHRRIHTGERPYECTKCGKTFQRSSTLLHHQSSHRRKAL

SEQ ID NO: 100668 - protein, 574 aa, Homo sapiens
  Payload ID: 20053
  Gene Name: zinc finger protein 587
  Uniprot ID: Q96SQ5
  ENSP ID: ENSP00000393865
MAAAVPRRPTQGTVTFEDVAVNFSQEEWCLLSEAQRCLYRDVMLENLALISSLGCWCGSKDEEAPCKQRISVQRESQSRTPRAGVSPKKAHPCEMCGLILEDVFHFADHQETHHKQKLNRSGACGKNLDDTAYLHQHQKQHIGEKFYRKSVREASFVKKRKLRVSQEPFVFREFGKDVLPSSGLCQEEAAVEKTDSETMHGPPFQEGKTNYSCGKRTKAFSTKHSVIPHQKLFTRDGCYVCSDCGKSFSRYVSFSNHQRDHTAKGPYDCGECGKSYSRKSSLIQHQRVHTGQTAYPCEECGKSFSQKGSLISHQLVHTGEGPYECRECGKSFGQKGNLIQHQQGHTGERAYHCGECGKSFRQKFCFINHQRVHTGERPYKCGECGKSFGQKGNLVHHQRGHTGERPYECKECGKSFRYRSHLTEHQRLHTGERPYNCRECGKLFNRKYHLLVHERVHTGERPYACEVCGKLFGNKHSVTIHQRIHTGERPYECSECGKSFLSSSALHVHKRVHSGQKPYKCSECGKSFSECSSLIKHRRIHTGERPYECTKCGKTFQRSSTLLHHQSSHRRKAL

SEQ ID NO: 100669 - protein, 532 aa, Homo sapiens
  Payload ID: 20053
  Gene Name: zinc finger protein 587
  ENSP ID: ENSP00000406999
MLENLALISSLGCWCGSKDEEAPCKQRISVQRESQSRTPRAGVSPKKAHPCEMCGLILEDVFHFADHQETHHKQKLNRSGACGKNLDDTAYLHQHQKQHIGEKFYRKSVREASFVKKRKLRVSQEPFVFREFGKDVLPSSGLCQEEAAVEKTDSETMHGPPFQEGKTNYSCGKRTKAFSTKHSVIPHQKLFTRDGCYVCSDCGKSFSRYVSFSNHQRDHTAKGPYDCGECGKSYSRKSSLIQHQRVHTGQTAYPCEECGKSFSQKGSLISHQLVHTGEGPYECRECGKSFGQKGNLIQHQQGHTGERAYHCGECGKSFRQKFCFINHQRVHTGERPYKCGECGKSFGQKGNLVHHQRGHTGERPYECKECGKSFRYRSHLTEHQRLHTGERPYNCRECGKLFNRKYHLLVHERVHTGERPYACEVCGKLFGNKHSVTIHQRIHTGERPYECSECGKSFLSSSALHVHKRVHSGQKPYKCSECGKSFSECSSLIKHRRIHTGERPYECTKCGKTFQRSSTLLHHQSSHRRKAL

SEQ ID NO: 100670 - protein, 402 aa, Homo sapiens
  Payload ID: 20054
  Gene Name: zinc finger protein 587B
  Uniprot ID: E7ETH6
  ENSP ID: ENSP00000392410
MAVVATLRLSAQGTVTFEDVAVKFTQEEWNLLSEAQRCLYRDVTLENLALMSSLGCWCGVEDEAAPSKQSIYIQRETQVRTPVTGVSPKKAHPCEMCGPILGDILHVADHQGTHHKQKLHRCEAWGNKLYDSGNFHQHQNEHIGEKPYRGSVEEALFVKRCKLHVSGESSVFSESGKDFLPRSGLLQQEASHTGEKSNSKTECVSPFQCGGAHYSHGDSMKHFSTKHILSQHQRLLPREECYVCCECGKSFSKYVSFSNHQRVHSGKRPYECGECEKSFSQKSSLIQHQQFHTGGKPYGCEECGKYFSLEGYLRRHQKVHAGKGPYECGECGKSFSSNVNLKSHQRIHTGERPYKCGECEKSFSRKPSLSYHQRFGRPRWVDHKDRKEFKTSLGNIVKSCLF

SEQ ID NO: 100671 - protein, 633 aa, Homo sapiens
  Payload ID: 20054
  Gene Name: zinc finger protein 587B
  ENSP ID: ENSP00000469623
MAVVATLRLSAQGTVTFEDVAVKFTQEEWNLLSEAQRCLYRDVTLENLALMSSLGCWCGVEDEAAPSKQSIYIQRETQVRTPVTGVSPKKAHPCEMCGPILGDILHVADHQGTHHKQKLHRCEAWGNKLYDSGNFHQHQNEHIGEKPYRGSVEEALFVKRCKLHVSGESSVFSESGKDFLPRSGLLQQEASHTGEKSNSKTECVSPFQCGGAHYSHGDSMKHFSTKHILSQHQRLLPREECYVCCECGKSFSKYVSFSNHQRVHSGKRPYECGECEKSFSQKSSLIQHQQFHTGGKPYGCEECGKYFSLEGYLRRHQKVHAGKGPYECGECGKSFSSNVNLKSHQRIHTGERPYKCGECEKSFSRKPSLSYHQRIHTEVRPYKCGECGKSYISKGHLRIHQRMHTGERPYKCGDCGKSFNEKGHLRSHQRVHTTERPYKCGECGKCFSHKGNLILHQHGHTRKRPYMCWECGKLFKKKSHLLVHQRIHSGEKPYACEACQKFFRHKCHLTAHQRVHTGERPYECSDCGKSFTHSCAFIVHKRVHTGQKPYECSECGKSFAASSYLTSHRRVHTGQKPYECSECGKSFAGISSLTNHRRVHTGEKPYGCSECEKKFRKSSSLRYHQRVHERKAL

SEQ ID NO: 100672 - protein, 431 aa, Homo sapiens
  Payload ID: 20054
  Gene Name: zinc finger protein 587B
  ENSP ID: ENSP00000472004
MSSLGCWCGVEDEAAPSKQSIYIQRETQVRTPVTGVSPKKAHPCEMCGPILGDILHVADHQGTHHKQKLHRCEAWGNKLYDSGNFHQHQNEHIGEKPYRGSVEEALFVKRCKLHVSGESSVFSESGKDFLPRSGLLQQEASHTGEKSNSKTECVSPFQCGGAHYSHGDSMKHFSTKHILSQHQRLLPREECYVCCECGKSFSKYVSFSNHQRVHSGKRPYECGECEKSFSQKSSLIQHQQFHTGGKPYGCEECGKYFSLEGYLRRHQKVHAGKGPYECGECGKSFSSNVNLKSHQRIHTGERPYKCGECEKSFSRKPSLSYHQRIHTEVRPYKCGECGKSYISKGHLRIHQRMHTGERPYKCGDCGKSFNEKGHLRSHQRVHTTERPYKCGECGKCFSHKGNLILHQHGHTRKRPYMCWECGKLFKKKSHL

SEQ ID NO: 100673 - protein, 364 aa, Homo sapiens
  Payload ID: 20055
  Gene Name: zinc finger protein 589
  Uniprot ID: Q86UQ0
  ENSP ID: ENSP00000346729
MWAPREQLLGWTAEALPAKDSAWPWEEKPRYLGPVTFEDVAVLFTEAEWKRLSLEQRNLYKEVMLENLRNLVSLAESKPEVHTCPSCPLAFGSQQFLSQDELHNHPIPGFHAGNQLHPGNPCPEDQPQSQHPSDKNHRGAEAEDQRVEGGVRPLFWSTNERGALVGFSSLFQRPPISSWGGNRILEIQLSPAQNASSEEVDRISKRAETPGFGAVTFGECALAFNQKSNLFRQKAVTAEKSSDKRQSQVCRECGRGFSRKSQLIIHQRTHTGEKPYVCGECGRGFIVESVLRNHLSTHSGEKPYVCSHCGRGFSCKPYLIRHQRTHTREKSFMCTVCGRGFREKSELIKHQRIHTGDKPYVCRD

SEQ ID NO: 100674 - protein, 96 aa, Homo sapiens
  Payload ID: 20055
  Gene Name: zinc finger protein 589
  ENSP ID: ENSP00000392719
MWAPREQLLGWTAEALPAKDSAWPWEEKPRYLGPVTFEDVAVLFTEAEWKRLSLEQRNLYKEVMLENLRNLVSLVLELGSPRSGLLPLDLNLDLWL

SEQ ID NO: 100675 - protein, 89 aa, Homo sapiens
  Payload ID: 20055
  Gene Name: zinc finger protein 589
  ENSP ID: ENSP00000401106
MWAPREQLLGWTAEALPAKDSAWPWEEKPRYLVPVADGALARGVRRIWTLLGSRCDTAFNYSCLSFLDFHHFPETTSWKLRPAGHCWAC

SEQ ID NO: 100676 - protein, 80 aa, Homo sapiens
  Payload ID: 20055
  Gene Name: zinc finger protein 589
  ENSP ID: ENSP00000404398
MWAPREQLLGWTAEALPAKDSAWPWEEKPRYLGPVTFEDVAVLFTEAEWKRLSLEQRNLYKEVMLENLRNLVSLVLSYQI

SEQ ID NO: 100677 - protein, 364 aa, Homo sapiens; identical to SEQ ID NO: 100673
  Payload ID: 20055
  Gene Name: zinc finger protein 589
  Uniprot ID: Q86UQ0
  ENSP ID: ENSP00000404592

SEQ ID NO: 100678 - protein, 177 aa, Homo sapiens
  Payload ID: 20055
  Gene Name: zinc finger protein 589
  ENSP ID: ENSP00000408719
MWAPREQLLGWTAEALPAKDSAWPWEEKPRYLGPVTFEDVAVLFTEAEWKRLSLEQRNLYKEVMLENLRNLVSLESKPEVHTCPSCPLAFGSQQFLSQDELHNHPIPGFHAGNQLHPGNPCPEDQPQSQHPSDKNHRGAEAEDQRVEGGVRPLFWILELGSPRSGLLPLDLNLDLWL

SEQ ID NO: 100679 - protein, 1267 aa, Homo sapiens
  Payload ID: 20056
  Gene Name: zinc finger protein 592
  Uniprot ID: Q92610
  ENSP ID: ENSP00000299927
MGDMKTPDFDDLLAAFDIPDPTSLDAKEAIQTPSEENESPLKPPGICMDESVSLSHSGSAPDVPAVSVIVKNTSRQESFEAEKDHITPSLLHNGFRGSDLPPDPHNCGKFDSTFMNGDSARSFPGKLEPPKSEPLPTFNQFSPISSPEPEDPIKDNGFGIKPKHSDSYFPPPLGCGAVGGPVLEALAKFPVPELHMFDHFCKKEPKPEPLPLGSQQEHEQSGQNTVEPHKDPDATRFFGEALEFNSHPSNSIGESKGLARELGTCSSVPPRQRLKPAHSKLSSCVAALVALQAKRVASVTKEDQPGHTKDLSGPTKESSKGSPKMPKSPKSPRSPLEATRKSIKPSDSPRSICSDSSSKGSPSVAASSPPAIPKVRIKTIKTSSGEIKRTVTRILPDPDDPSKSPVGSPLGSAIAEAPSEMPGDEVPVEEHFPEAGTNSGSPQGARKGDESMTKASDSSSPSCSSGPRVPKGAAPGSQTGKKQQSTALQASTLAPANLLPKAVHLANLNLVPHSVAASVTAKSSVQRRSQPQLTQMSVPLVHQVKKAAPLIVEVFNKVLHSSNPVPLYAPNLSPPADSRIHVPASGYCCLECGDAFALEKSLSQHYGRRSVHIEVLCTLCSKTLLFFNKCSLLRHARDHKSKGLVMQCSQLLVKPISADQMFVSAPVNSTAPAAPAPSSSPKHGLTSGSASPPPPALPLYPDPVRLIRYSIKCLECHKQMRDYMVLAAHFQRTTEETEGLTCQVCQMLLPNQCSFCAHQRIHAHKSPYCCPECGVLCRSAYFQTHVKENCLHYARKVGYRCIHCGVVHLTLALLKSHIQERHCQVFHKCAFCPMAFKTASSTADHSATQHPTQPHRPSQLIYKCSCEMVFNKKRHIQQHFYQNVSKTQVGVFKCPECPLLFVQKPELMQHVKSTHGVPRNVDELSSLQSSADTSSSRPGSRVPTEPPATSVAARSSSLPSGRWGRPEAHRRVEARPRLRNTGWTCQECQEWVPDRESYVSHMKKSHGRTLKRYPCRQCEQSFHTPNSLRKHIRNNHDTVKKFYTCGYCTEDSPSFPRPSLLESHISLMHGIRNPDLSQTSKVKPPGGHSPQVNHLKRPVSGVGDAPGTSNGATVSSTKRHKSLFQCAKCSFATDSGLEFQSHIPQHQVDSSTAQCLLCGLCYTSASSLSRHLFIVHKVRDQEEEEEEEAAAAEMAVEVAEPEEGSGEEVPMETRENGLEECAGEPLSADPEARRLLGPAPEDDGGHNDHSQPQASQDQDSHTLSPQV

SEQ ID NO: 100680 - protein, 1267 aa, Homo sapiens; identical to SEQ ID NO: 100679
  Payload ID: 20056
  Gene Name: zinc finger protein 592
  Uniprot ID: Q92610
  ENSP ID: ENSP00000452877

SEQ ID NO: 100681 - protein, 858 aa, Homo sapiens
  Payload ID: 20056
  Gene Name: zinc finger protein 592
  ENSP ID: ENSP00000453491
MGDMKTPDFDDLLAAFDIPDPTSLDAKEAIQTPSEENESPLKPPGICMDESVSLSHSGSAPDVPAVSVIVKNTSRQESFEAEKDHITPSLLHNGFRGSDLPPDPHNCGKFDSTFMNGDSARSFPGKLEPPKSEPLPTFNQFSPISSPEPEDPIKDNGFGIKPKHSDSYFPPPLGCGAVGGPVLEALAKFPVPELHMFDHFCKKEPKPEPLPLGSQQEHEQSGQNTVEPHKDPDATRFFGEALEFNSHPSNSIGESKGLARELGTCSSVPPRQRLKPAHSKLSSCVAALVALQAKRVASVTKEDQPGHTKDLSGPTKESSKGSPKMPKSPKSPRSPLEATRKSIKPSDSPRSICSDSSSKGSPSVAASSPPAIPKVRIKTIKTSSGEIKRTVTRILPDPDDPSKSPVGSPLGSAIAEAPSEMPGDEVPVEEHFPEAGTNSGSPQGARKGDESMTKASDSSSPSCSSGPRVPKGAAPGSQTGKKQQSTALQASTLAPANLLPKAVHLANLNLVPHSVAASVTAKSSVQRRSQPQLTQMSVPLVHQVKKAAPLIVEVFNKVLHSSNPVPLYAPNLSPPADSRIHVPASGYCCLECGDAFALEKSLSQHYGRRSVHIEVLCTLCSKTLLFFNKCSLLRHARDHKSKGLVMQCSQLLVKPISADQMFVSAPVNSTAPAAPAPSSSPKHGLTSGSASPPPPALPLYPDPVRLIRYSIKCLECHKQMRDYMVLAAHFQRTTEETEGLTCQVCQMLLPNQCSFCAHQRIHAHKSPYCCPECGVLCRSAYFQTHVKENCLHYARKVHPLWCRPPDLGLAEKPHPGATLPGFPQMCILPHGLQDCQQHCRPQCHPAPHPAPQTLPAHL

SEQ ID NO: 100682 - protein, 156 aa, Homo sapiens
  Payload ID: 20057
  Gene Name: zinc finger protein 593
  ENSP ID: ENSP00000270812
MGRSRRTGAHRAHSLARQMKAKRRRPDLDEIHRELRPQGSARPQPDPNAEFDPDLPGGGLHRCLACARYFIDSTNLKTHFRSKDHKKRYEGVRRGLMDGCSADRALTWSAPNSCFSFSQAEAAERRALQSGRGGEGSGYGILCAPQAAGSAHGSVH

SEQ ID NO: 100683 - protein, 134 aa, Homo sapiens
  Payload ID: 20057
  Gene Name: zinc finger protein 593
  Uniprot ID: O00488
  ENSP ID: ENSP00000363384
MGRSRRTGAHRAHSLARQMKAKRRRPDLDEIHRELRPQGSARPQPDPNAEFDPDLPGGGLHRCLACARYFIDSTNLKTHFRSKDHKKRLKQLSVEPYSQEEAERAAGMGSYVPPRRLAVPTEVSTEVPEMDTST

SEQ ID NO: 100684 - protein, 807 aa, Homo sapiens
  Payload ID: 20058
  Gene Name: zinc finger protein 594
  Uniprot ID: Q96JF6
  ENSP ID: ENSP00000382513
MKEWKSKMEISEEKKSARAASEKLQRQITQECELVETSNSEDRLLKHWVSPLKDAMRHLPSQESGIREMHIIPQKAIVGEIGHGCNEGEKILSAGESSHRYEVSGQNFKQKSGLTEHQKIHNINKTYECKECEKTFNRSSNLIIHQRIHTGNKPYVCNECGKDSNQSSNLIIHQRIHTGKKPYICHECGKDFNQSSNLVRHKQIHSGGNPYECKECGKAFKGSSNLVLHQRIHSRGKPYLCNKCGKAFSQSTDLIIHHRIHTGEKPYECYDCGQMFSQSSHLVPHQRIHTGEKPLKCNECEKAFRQHSHLTEHQRLHSGEKPYECHRCGKTFSGRTAFLKHQRLHAGEKIEECEKTFSKDEELREEQRIHQEEKAYWCNQCGRNFQGTSDLIRHQVTHTGEKPYECKECGKTFNQSSDLLRHHRIHSGEKPCVCSKCGKSFRGSSDLIRHHRVHTGEKPYECSECGKAFSQRSHLVTHQKIHTGEKPYQCTECGKAFRRRSLLIQHRRIHSGEKPYECKECGKLFIWRTAFLKHQSLHTGEKLECEKTFSQDEELRGEQKIHQEAKAYWCNQCGRAFQGSSDLIRHQVTHTREKPYECKECGKTFNQSSDLLRHHRIHSGEKPYVCNKCGKSFRGSSDLIKHHRIHTGEKPYECSECGKAFSQRSHLATHQKIHTGEKPYQCSECGNAFRRRSLLIQHRRLHSGEKPYECKECGKLFMWHTAFLKHQRLHAGEKLEECEKTFSKDEELRKEQRTHQEKKVYWCNQCSRTFQGSSDLIRHQVTHTREKPYECKECGKTQSELRPSETS

SEQ ID NO: 100685 - protein, 807 aa, Homo sapiens; identical to SEQ ID NO: 100684
  Payload ID: 20058
  Gene Name: zinc finger protein 594
  Uniprot ID: Q96JF6
  ENSP ID: ENSP00000461032

SEQ ID NO: 100686 - protein, 102 aa, Homo sapiens
  Payload ID: 20058
  Gene Name: zinc finger protein 594
  ENSP ID: ENSP00000461696
MKEWKSKMEISEEKKSARAASEKLQRQITQECELVETSNSEDRLLKHWVSPLKDAMRHLPSQESGIREMHIIPQKAIVGEIGHGCNEGEKILSAGESSHRYE

SEQ ID NO: 100687 - protein, 85 aa, Homo sapiens
  Payload ID: 20059
  Gene Name: zinc finger protein 595
  ENSP ID: ENSP00000434858
MELVTFRDVAIEFSPEEWKCLDPAQQNLYRDVMLENYRNLVSLGFVISNPDLVTCLEQIKEPCNLKIHETAAKPPVVQHFWSLQF

SEQ ID NO: 100688 - protein, 465 aa, Homo sapiens
  Payload ID: 20059
  Gene Name: zinc finger protein 595
  ENSP ID: ENSP00000476367
MSHLTQHTGIHAGEKPYKCEKCGKAFNRSTSLSKHKRIHTGEKPYTCEECGKAFRRSTVLNEHKKIHTGEKPYKCEECGKAFTRSTTLNEHKKIHTGEKPYKCKECGKAFRWSTSLNEHKNIHTGEKPYKCKECGKAFRQSRSLNEHKNIHTGEKPYTCEKCGKAFNQSSSLIIHRSIHSEQKLYKCEECGKAFTWSSSLNKHKRIHTGEKPYTCEECGKAFYRSSHLAKHKRIHTGEKPYTCEECGKAFNQSSTLILHKRIHSGQKPYKCEECGKAFTRSTTLNEHKKIHTGEKPYKCEECGKAFIWSASLNEHKNIHTGEKPYKCKECGKAFNQSSGLIIHRSIHSEQKLYKCEECGKAFTRSTALNEHKKIHSGEKPYKCKECGKAYNLSSTLTKHKRIHTGEKPFTCEECGKAFNWSSSLTKHKIIHTGEKSYKCEECGKAFNRPSTLTVHKRIHTGKEHS

SEQ ID NO: 100689 - protein, 616 aa, Homo sapiens
  Payload ID: 20059
  Gene Name: zinc finger protein 595
  ENSP ID: ENSP00000476408
MELVTFRDVAIEFSPEEWKCLDPAQQNLYRDVMLENYRNLVSLAICSPFSQDLSPVQGIEDSFHKLILKRYEKCGHENLQLRKGCKRVNECKVQKGVNNGVYQCLSTTQSKIFQCNTCVKVFSKFSNSNKHKIRHTGEKPFKCTECGRSFYMSHLTQHTGIHAGEKPYKCEKCGKAFNRSTSLSKHKRIHTGEKPYTCEECGKAFRRSTVLNEHKKIHTGEKPYKCEECGKAFTRSTTLNEHKKIHTGEKPYKCKECGKAFRWSTSLNEHKNIHTGEKPYKCKECGKAFRQSRSLNEHKNIHTGEKPYTCEKCGKAFNQSSSLIIHRSIHSEQKLYKCEECGKAFTWSSSLNKHKRIHTGEKPYTCEECGKAFYRSSHLAKHKRIHTGEKPYTCEECGKAFNQSSTLILHKRIHSGQKPYKCEECGKAFTRSTTLNEHKKIHTGEKPYKCEECGKAFIWSASLNEHKNIHTGEKPYKCKECGKAFNQSSGLIIHRSIHSEQKLYKCEECGKAFTRSTALNEHKKIHSGEKPYKCKECGKAYNLSSTLTKHKRIHTGEKPFTCEECGKAFNWSSSLTKHKIIHTGEKSYKCEECGKAFNRPSTLTVHKRIHTGKEHS

SEQ ID NO: 100690 - protein, 648 aa, Homo sapiens
  Payload ID: 20059
  Gene Name: zinc finger protein 595
  ENSP ID: ENSP00000477392
MELVTFRDVAIEFSPEEWKCLDPAQQNLYRDVMLENYRNLVSLGFVISNPDLVTCLEQIKEPCNLKIHETAAKPPAICSPFSQDLSPVQGIEDSFHKLILKRYEKCGHENLQLRKGCKRVNECKVQKGVNNGVYQCLSTTQSKIFQCNTCVKVFSKFSNSNKHKIRHTGEKPFKCTECGRSFYMSHLTQHTGIHAGEKPYKCEKCGKAFNRSTSLSKHKRIHTGEKPYTCEECGKAFRRSTVLNEHKKIHTGEKPYKCEECGKAFTRSTTLNEHKKIHTGEKPYKCKECGKAFRWSTSLNEHKNIHTGEKPYKCKECGKAFRQSRSLNEHKNIHTGEKPYTCEKCGKAFNQSSSLIIHRSIHSEQKLYKCEECGKAFTWSSSLNKHKRIHTGEKPYTCEECGKAFYRSSHLAKHKRIHTGEKPYTCEECGKAFNQSSTLILHKRIHSGQKPYKCEECGKAFTRSTTLNEHKKIHTGEKPYKCEECGKAFIWSASLNEHKNIHTGEKPYKCKECGKAFNQSSGLIIHRSIHSEQKLYKCEECGKAFTRSTALNEHKKIHSGEKPYKCKECGKAYNLSSTLTKHKRIHTGEKPFTCEECGKAFNWSSSLTKHKIIHTGEKSYKCEECGKAFNRPSTLTVHKRIHTGKEHS

SEQ ID NO: 100691 - protein, 504 aa, Homo sapiens
  Payload ID: 20060
  Gene Name: zinc finger protein 596
  Uniprot ID: Q8TC21
  ENSP ID: ENSP00000310033
MPSPDSMTFEDIIVDFTQEEWALLDTSQRKLFQDVMLENISHLVSIGKQLCKSVVLSQLEQVEKLSTQRISLLQGREVGIKHQEIPFIQHIYQKGTSTISTMRSHTQEDPFLCNDLGEDFTQHIALTQNVITYMRTKHFVSKKFGKIFSDWLSFNQHKEIHTKCKSYGSHLFDYAFIQNSALRPHSVTHTREITLECRVCGKTFSKNSNLRRHEMIHTGEKPHGCHLCGKAFTHCSDLRKHERTHTGEKPYGCHLCGKAFSKSSNLRRHEMIHTREKAQICHLCGKAFTHCSDLRKHERTHLGDKPYGCLLCGKAFSKCSYLRQHERTHNGEKPYECHLCGKAFSHCSHLRQHERSHNGEKPHGCHLCGKAFTESSVLKRHERIHTGEKPYECHVCGKAFTESSDLRRHERTHTGEKPYECHLCGKAFNHSSVLRRHERTHTGEKPYECNICGKAFNRSYNFRLHRRVHTGEKPYVCPLCGKAFSKFFNLRQHERTHTKKAMNM

SEQ ID NO: 100692 - protein, 504 aa, Homo sapiens; identical to SEQ ID NO: 100691
  Payload ID: 20060
  Gene Name: zinc finger protein 596
  Uniprot ID: Q8TC21
  ENSP ID: ENSP00000318719

SEQ ID NO: 100693 - protein, 504 aa, Homo sapiens; identical to SEQ ID NO: 100691
  Payload ID: 20060
  Gene Name: zinc finger protein 596
  Uniprot ID: Q8TC21
  ENSP ID: ENSP00000381613

SEQ ID NO: 100694 - protein, 43 aa, Homo sapiens
  Payload ID: 20060
  Gene Name: zinc finger protein 596
  ENSP ID: ENSP00000429386
MPSPDSMTFEDIIVDFTQEEWALLDTSQRKLFQDVMLENISHL

SEQ ID NO: 100695 - protein, 146 aa, Homo sapiens
  Payload ID: 20060
  Gene Name: zinc finger protein 596
  ENSP ID: ENSP00000429671
MPSPDSMTFEDIIVDFTQEEWALLDTSQRKLFQDVMLENISHLVSIGKQLCKSVVLSQLEQVEKLSTQRISLLQGREVGIKHQEIPFIQHIYQKGTSTISTMRSHTQEDPFLCNDLGEDFTQHIALTQNVITYMRTKHFVSKKFGK

SEQ ID NO: 100696 - protein, 73 aa, Homo sapiens
  Payload ID: 20060
  Gene Name: zinc finger protein 596
  ENSP ID: ENSP00000430552
MPSPDSMTFEDIIVDFTQEEWALLDTSQRKLFQDVMLENISHLVSIGKQLCKSVVLSQLEQVEKLSTQRISLL

SEQ ID NO: 100697 - protein, 77 aa, Homo sapiens
  Payload ID: 20060
  Gene Name: zinc finger protein 596
  ENSP ID: ENSP00000430650
MPSPDSMTFEDIIVDFTQEEWALLDTSQRKLFQDVMLENISHLVSIGKQLCKSVVLSQLEQVEKLSTQRISLLQGEL

SEQ ID NO: 100698 - protein, 69 aa, Homo sapiens
  Payload ID: 20060
  Gene Name: zinc finger protein 596
  ENSP ID: ENSP00000476799
MLENISHLVSIGKQLCKSVVLSQLEQVEKLSTQRISLLQGREVGIKHQEIPFIQHIYQKGTSTISTMRS

SEQ ID NO: 100699 - protein, 133 aa, Homo sapiens
  Payload ID: 20060
  Gene Name: zinc finger protein 596
  ENSP ID: ENSP00000477126
MPSPDSMTFEDIIVDFTQEEWALLDTSQRKLFQDVMLENISHLVSIGKQLCKSVVLSQLEQVEKLSTQRISLLQGREVGIKHQEIPFIQHIYQKGTSTISTMRSHTQEDPFLCNDLGEDFTQHIALTQNVITY

SEQ ID NO: 100700 - protein, 424 aa, Homo sapiens
  Payload ID: 20061
  Gene Name: zinc finger protein 597
  Uniprot ID: Q96LX8
  ENSP ID: ENSP00000301744
MASMPPTPEAQGPILFEDLAVYFSQEECVTLHPAQRSLSKDGTKESLEDAALMGEEGKPEINQQLSLESMELDELALEKYPIAAPLVPYPEKSSEDGVGNPEAKILSGTPTYKRRVISLLVTIENHTPLVELSEYLGTNTLSEILDSPWEGAKNVYKCPECDQNFSDHSYLVLHQKIHSGEKKHKCGDCGKIFNHRANLRTHRRIHTGEKPYKCAKCSASFRQHSHLSRHMNSHVKEKPYTCSICGRGFMWLPGLAQHQKSHSAENTYESTNCDKHFNEKPNLALPEETFVSGPQYQHTKCMKSFRQSLYPALSEKSHDEDSERCSDDGDNFFSFSKFKPLQCPDCDMTFPCFSELISHQNIHTEERPHKCKTCEESFALDSELACHQKSHMLAEPFKCTVCGKTFKSNLHLITHKRTHIKNTT

SEQ ID NO: 100701 - protein, 904 aa, Homo sapiens
  Payload ID: 20062
  Gene Name: zinc finger protein 598
  Uniprot ID: Q86UK7
  ENSP ID: ENSP00000411409
MAAAGGAEGRRADMEAEAAAAPERGGGSCVLCCGDLEATALGRCDHPVCYRCSTKMRVLCEQRYCAVCREELRQVVFGKKLPAFATIPIHQLQHEKKYDIYFADGKVYALYRQLLQHECPRCPELPPFSLFGDLEQHMRRQHELFCCRLCLQHLQIFTYERKWYSRKDLARHRMQGDPDDTSHRGHPLCKFCDERYLDNDELLKHLRRDHYFCHFCDSDGAQDYYSDYAYLREHFREKHFLCEEGRCSTEQFTHAFRTEIDLKAHRTACHSRSRAEARQNRHIDLQFSYAPRHSRRNEGVVGGEDYEEVDRYSRQGRVARAGTRGAQQSRRGSWRYKREEEDREVAAAVRASVAAQQQEEARRSEDQEEGGRPKKEEAAARGPEDPRGPRRSPRTQGEGPGPKETSTNGPVSQEAFSVTGPAAPGCVGVPGALPPPSPKLKDEDFPSLSASTSSSCSTAATPGPVGLALPYAIPARGRSAFQEEDFPALVSSVPKPGTAPTSLVSAWNSSSSSKKVAQPPLSAQATGSGQPTRKAGKGSRGGRKGGPPFTQEEEEDGGPALQELLSTRPTGSVSSTLGLASIQPSKVGKKKKVGSEKPGTTLPQPPPATCPPGALQAPEAPASRAEGPVAVVVNGHMEGPAPARSAPKEPPGLPRPLGSFPCPTPQEDFPALGGPCPPRMPPPPGFSAVVLLKGTPPPPPPGLVPPISKPPPGFSGLLPSPHPACVPSPATTTTTKAPRLLPAPRAYLVPENFRERNLQLIQSIRDFLQSDEARFSEFKSHSGEFRQGLISAAQYYKSCRDLLGENFQKVFNELLVLLPDTAKQQELLSAHTDFCNREKPLSTKSKKNKKSAWQATTQQAGLDCRVCPTCQQVLAHGDASSHQALHAARDDDFPSLQAIARIIT

SEQ ID NO: 100702 - protein, 90 aa, Homo sapiens
  Payload ID: 20062
  Gene Name: zinc finger protein 598
  ENSP ID: ENSP00000455292
  MOD_RES (1)..(1): Any amino acid
XPTPSAPRSTSRPTGRPATVAAAPRHARTATSTCSSATRHGTRAGTRGSLVAKTTRRWTGTAARAEWPGLALAEPSRAAEEAGGKKRTEK

SEQ ID NO: 100703 - protein, 849 aa, Homo sapiens
  Payload ID: 20062
  Gene Name: zinc finger protein 598
  ENSP ID: ENSP00000455308
MRVLCEQRYCAVCREELRQVVFGKKLPAFATIPIHQLQHEKKYDIYFADGKVYALYRQLLQHECPRCPELPPFSLFGDLEQHMRRQHELFCCRLCLQHLQIFTYERKWYSRKDLARHRMQGDPDDTSHRGHPLCKFCDERYLDNDELLKHLRRDHYFCHFCDSDGAQDYYSDYAYLREHFREKHFLCEEGRCSTEQFTHAFRTEIDLKAHRTACHSRSRAEARQNRHIDLQFSYAPRHSRRNEGVVGGEDYEEVDRYSRQGRVARAGTRGAQQSRRGSWRYKREEEDREVAAAVRASVAAQQQEEARRSEDQEEGGRPKKEEAAARGPEDPRGPRRSPRTQGEGPGPKETSTNGPVSQEAFSVTGPAAPGCVGVPGALPPPSPKLKDEDFPSLSASTSSSCSTAATPGPVGLALPYAIPARGRSAFQEEDFPALVSSVPKPGTAPTSLVSAWNSSSSSKKVAQPPLSAQATGSGQPTRKAGKGSRGGRKGGPPFTQEEEEDGGPALQELLSTRPTGSVSSTLGLASIQPSKVGKKKKVGSEKPGTTLPQPPPATCPPGALQAPEAPASRAEGPVAVVVNGHMEGPAPARSAPKEPPGLPRPLGSFPCPTPQEDFPALGGPCPPRMPPPPGFSAVVLLKGTPPPPPPGLVPPISKPPPGFSGLLPSPHPACVPSPATTTTTKAPRLLPAPRAYLVPENFRERNLQLIQSIRDFLQSDEARFSEFKSHSGEFRQGLISAAQYYKSCRDLLGENFQKVFNELLVLLPDTAKQQELLSAHTDFCNREKPLSTKSKKNKKSAWQATTQQAGLDCRVCPTCQQVLAHGDASSHQALHAARDDDFPSLQAIARIIT

SEQ ID NO: 100704 - protein, 849 aa, Homo sapiens; identical to SEQ ID NO: 100703
  Payload ID: 20062
  Gene Name: zinc finger protein 598
  ENSP ID: ENSP00000455882

SEQ ID NO: 100705 - protein, 203 aa, Homo sapiens
  Payload ID: 20062
  Gene Name: zinc finger protein 598
  ENSP ID: ENSP00000456128
  MOD_RES (1)..(1): Any amino acid
XPKPGTAPTSLVSAWNSSSSSKKVAQPPLSAQATGSGQPTRKAGKGSRGGRKGGPPFTQEEEEDGGPALQELLSTRPTGSVSSTLGLASIQPSKVGKKKKVGSEKPGTTLPQPPPATCPPGALQAPEAPASRAEGPVAVVVNGHMEGPAPARSAPKEPPGLPRPLGSFPCPTPQEDFPALGGPCPPRMPPPPDPGCCLPHGRT

SEQ ID NO: 100706 - protein, 588 aa, Homo sapiens
  Payload ID: 20063
  Gene Name: zinc finger protein 599
  Uniprot ID: Q96NL3
  ENSP ID: ENSP00000333802
MAAPALALVSFEDVVVTFTGEEWGHLDLAQRTLYQEVMLETCRLLVSLGHPVPKPELIYLLEHGQELWTVKRGLSQSTCAGEKAKPKITEPTASQLAFSEESSFQELLAQRSSRDSRLGQARDEEKLIKIQEGNLRPGTNPHKEICPEKLSYKHDDLEPDDSLGLRVLQERVTPQDALHECDSQGPGKDPMTDARNNPYTCTECGKGFSKKWALVRHQQIHAGVKPYECNECGKACRYMADVIRHMRLHTGEKPYKCIECGKAFKRRFHLTEHQRIHTGDKPYECKECGKAFTHRSSFIQHNMTHTREKPFLCKECGKAFYYSSSFAQHMRIHTGKKLYECGECGKAFTHRSTFIQHNVTHTGEKPFLCKECGKTFCLNSSFTQHMRIHTGEKPYECGECGKAFTHRSTFIRHKRTHTGEKPFECKECGKAFCDSSSLIQHMRIHTGEKPYECSECGKAFTHHSVFIRHNRTHSGQKPLECKECAKAFYYSSSFTRHMRIHTGEKPYVCRECGKAFTQPANFVRHNRIHTGEKPFECKECEKAFCDNFALTQHMRTHTGEKPFECNECGKTFSHSSSFTHHRKIHTRV

SEQ ID NO: 100707 - protein, 82 aa, Homo sapiens
  Payload ID: 20063
  Gene Name: zinc finger protein 599
  ENSP ID: ENSP00000465262
MAAPALALVSFEDVVVTFTGEEWGHLDLAQRTLYQEVMLETCRLLVSLGHPVPKPELIYLLEHGQELWTVKRGLSQSTCAGW

SEQ ID NO: 100708 - protein, 95 aa, Homo sapiens
  Payload ID: 20063
  Gene Name: zinc finger protein 599
  Uniprot ID: Q96NL3
  ENSP ID: ENSP00000468446
MAAPALALVSFEDVVVTFTGEEWGHLDLAQRTLYQEVMLETCRLLVSLGHPVPKPELIYLLEHGQELWTVKRGLSQSTCAASFSLLWKSYHPGHG

SEQ ID NO: 100709 - protein, 722 aa, Homo sapiens
  Payload ID: 20064
  Gene Name: zinc finger protein 600
  Uniprot ID: Q6ZNG1
  ENSP ID: ENSP00000344791
MMKEVLSTGQGNTEVIHTGTLQRYQSYHIGDFCFQEIEKEIHDIEFQCQEDERNGHEAPMTKIKKLTGSTDQHDHRHAGNKPIKDQLGSSFYSHLPELHIIQIKGKIGNQFEKSTSDAPSVSTSQRISPRPQIHISNNYGNNSPNSSLLPQKQEVYMREKSFQCNESGKAFNCSSLLRKHQIPHLGDKQYKCDVCGKLFNHKQYLTCHCRCHTGEKPYKCNECGKSFSQVSSLTCHRRLHTAVKSHKCNECGKIFGQNSALVIHKAIHTGEKPYKCNECDKAFNQQSNLARHRRIHTGEKPYKCEECDKVFSRKSTLESHKRIHTGEKPYKCKVCDTAFTWNSQLARHKRIHTGEKTYKCNECGKTFSHKSSLVCHHRLHGGEKSYKCKVCDKAFAWNSHLVRHTRIHSGGKPYKCNECGKTFGQNSDLLIHKSIHTGEQPYKYEECEKVFSCGSTLETHKIIHTGEKPYKCKVCDKAFACHSYLAKHTRIHSGEKPYKCNECSKTFRLRSYLASHRRVHSGEKPYKCNECSKTFSQRSYLHCHRRLHSGEKPYKCNECGKTFSHKPSLVHHRRLHTGEKSYKCTVCDKAFVRNSYLARHTRIHTAEKPYKCNECGKAFNQQSQLSLHHRIHAGEKLYKCETCDKVFSRKSHLKRHRRIHPGKKPYKCKVCDKTFGSDSHLKQHTGLHTGEKPYKCNECGKAFSKQSTLIHHQAVHGVGKLD

SEQ ID NO: 100710 - protein, 508 aa, Homo sapiens
  Payload ID: 20064
  Gene Name: zinc finger protein 600
  ENSP ID: ENSP00000353410
MALPQGLLTFRDVAIEFSQEEWKCLDPAQRTLYRDVMLENYRNLVSLDISSKCMMKTFFSTGQGNTEAFHTGTLQRQASHHIGDFCFQKIEKDIHGFQFQWKEDETNDHAAPMTEIKELTGSTGQHDQRHAGNKHIKDQLGLSFHSHLPKHTIIHTGEKPYKCEECEKVFSRKSHLERHKRIHTGEKPYKCKVCDKAFAYNSYLAKHSIIHTGEKPYKCNECGKVFNQQANLACHHRVHTGEKPYKCNECGKTFSQMSNLVYHHRLHTGEKPYKCNECGKIFGQNSALVIHKAIHTGEKPYKCNECDKAFNQQSNLARHRRIHTGEKPYKCEECDKVFSRKSTLESHKRIHTGEKPYKCKVCDKAFVRNSYLARHTRIHTAEKPYKCNECGKAFNQQSQLSLHHRIHAGEKLYKCETCDKVFSRKSHLKRHRRIHTGEKPHMCDDCGKAFTSCSHLIRHQRIPTGQKSYKCQKCGKVLSPRSLLAEHQKIHFDNCSQCSEYSKPSSIN

SEQ ID NO: 100711 - protein, 641 aa, Homo sapiens
  Payload ID: 20065
  Gene Name: zinc finger protein 605
  Uniprot ID: Q86T29
  ENSP ID: ENSP00000353314
MIQSQISFEDVAVDFTLEEWQLLNPTQKNLYRDVMLENYSNLVFLEVWLDNPKMWLRDNQDNLKSMERGHKYDVFGKIFNSSINIVHVGLRSHKCGTGEKSLKCPFDLLIPKNNCERKKIDELNKKLLFCIKPGRTHGGIKYCDCSTCRKSSNEEPWLTANHITHTGVYLCMECGRFFNKKSQLVIHQRTHTGEKPYQCSECGKAFSQKSLLTVHQRTHSGEKPHGCSECQKAFSRKSLLILHQRIHTGEKPYGCSECGKAFSRKSQLKRHQITHTIEKPYSCSECGKAFSQKLKLITHQRAHTGEKPYPCSHCGKAFFWKSQLITHQRTHTGKKPYGCGECQKAFSRNSLLIRHQRIHTGEKPYECNECGEAFIRKPQLIKHQITHTGEKNYRCSDCEEAFFKKSELIRHQKIHLGEKPYGCIQCGKTFFGKSQLLTHHRTHTGEKPYECSECGKAFTQKSSLISHQRTHTGEKPYECSECRKTFSEKSSLIHHQRTHTGEKPFECSECRKAFAWKPQLLRHQRIHTGEKPYECSECGKAFVQKVQLIKHQRNHTGEKTYGCSDCAKAFFEKAQLIIHQRIHTGERPYKCGECGKSFTRKSHLMRHQRIHTGDKYYGCNECGTTFNRKSQLMIHQRNHII

SEQ ID NO: 100712 - protein, 672 aa, Homo sapiens
  Payload ID: 20065
  Gene Name: zinc finger protein 605
  Uniprot ID: Q86T29
  ENSP ID: ENSP00000376135
MIQSQISFEDVAVDFTLEEWQLLNPTQKNLYRDVMLENYSNLVFLGFQILKPDAMFKLEQQDPWIIGQEILNQNFSEVWLDNPKMWLRDNQDNLKSMERGHKYDVFGKIFNSSINIVHVGLRSHKCGTGEKSLKCPFDLLIPKNNCERKKIDELNKKLLFCIKPGRTHGGIKYCDCSTCRKSSNEEPWLTANHITHTGVYLCMECGRFFNKKSQLVIHQRTHTGEKPYQCSECGKAFSQKSLLTVHQRTHSGEKPHGCSECQKAFSRKSLLILHQRIHTGEKPYGCSECGKAFSRKSQLKRHQITHTIEKPYSCSECGKAFSQKLKLITHQRAHTGEKPYPCSHCGKAFFWKSQLITHQRTHTGKKPYGCGECQKAFSRNSLLIRHQRIHTGEKPYECNECGEAFIRKPQLIKHQITHTGEKNYRCSDCEEAFFKKSELIRHQKIHLGEKPYGCIQCGKTFFGKSQLLTHHRTHTGEKPYECSECGKAFTQKSSLISHQRTHTGEKPYECSECRKTFSEKSSLIHHQRTHTGEKPFECSECRKAFAWKPQLLRHQRIHTGEKPYECSECGKAFVQKVQLIKHQRNHTGEKTYGCSDCAKAFFEKAQLIIHQRIHTGERPYKCGECGKSFTRKSHLMRHQRIHTGDKYYGCNECGTTFNRKSQLMIHQRNHII

SEQ ID NO: 100713 - protein, 792 aa, Homo sapiens
  Payload ID: 20066
  Gene Name: zinc finger protein 606
  Uniprot ID: Q8WXB4
  ENSP ID: ENSP00000343617
MAAINPWASWGALTDQSWGMTAVDPWASWALCPQYPAWHVEGSLEEGRRATGLPAAQVQEPVTFKDVAVDFTQEEWGQLDLVQRTLYRDVMLETYGHLLSVGNQIAKPEVISLLEQGEEPWSVEQACPQRTCPEWVRNLESKALIPAQSIFEEEQSHGMKLERYIWDDPWFSRLEVLGCKDQLEMYHMNQSTAMRQMVFMQKQVLSQRSSEFCGLGAEFSQNLNFVPSQRVSQIEHFYKPDTHAQSWRCDSAIMYADKVTCENNDYDKTVYQSIQPIYPARIQTGDNLFKCTDAVKSFNHIIHFGDHKGIHTGEKLYEYKECHQIFNQSPSFNEHPRLHVGENQYNYKEYENIFYFSSFMEHQKIGTVEKAYKYNEWEKVFGYDSFLTQHTSTYTAEKPYDYNECGTSFIWSSYLIQHKKTHTGEKPYECDKCGKVFRNRSALTKHERTHTGIKPYECNKCGKAFSWNSHLIVHKRIHTGEKPYVCNECGKSFNWNSHLIGHQRTHTGEKPFECTECGKSFSWSSHLIAHMRMHTGEKPFKCDECEKAFRDYSALSKHERTHSGAKPYKCTECGKSFSWSSHLIAHQRTHTGEKPYNCQECGKAFRERSALTKHEIIHSGIKPYECNKCGKSCSQMAHLVRHQRTHTGEKPYECNKCGKSFSQSCHLVAHRRIHTGEKPYKCNQCERSFNCSSHLIAHRRTHTGEKPYRCNECGKAFNESSSLIVHLRNHTGEKPYKCNHCEKAFCKNSSLIIHQRMHSGEKRFICSECGKAFSGHSALLQHQRNHSEEKLN

SEQ ID NO: 100714 - protein, 69 aa, Homo sapiens
  Payload ID: 20066
  Gene Name: zinc finger protein 606
  ENSP ID: ENSP00000446487
MAAINPWASWGALTDQSWGMTAVDPWASWALCPQYPAWHVEGSLEEGRRATGLPAAQVQVRWGCPVPRG

SEQ ID NO: 100715 - protein, 58 aa, Homo sapiens
  Payload ID: 20066
  Gene Name: zinc finger protein 606
  ENSP ID: ENSP00000446845
MAAINPWASWGALTDQSWGMTAVDPWASWGTSDLQGRGRGLHPRRVGAAGPCSEDPVP

SEQ ID NO: 100716 - protein, 508 aa, Homo sapiens
  Payload ID: 20066
  Gene Name: zinc finger protein 606
  ENSP ID: ENSP00000446972
MAAINPWASWGALTDQSWGMTAVDPWASWALCPQYPAWHVEGSLEEGRRATGLPAAQVQEPVTFKDVAVDFTQEEWGQLDLVQRTLYRDVMLETYGHLLSVGNQIAKPEVISLLEQGEEPWSVEQACPQRTCPEWVRNLESKALIPAQSIFEEEQSHGMKLERYIWDDPWFSRLEVLGCKDQLEMYHMNQSTAMRQMVFMQKQVLSQRSSEFCGLGAEFSQNLNFVPSQRVSQIEHFYKPDTHAQSWRCDSAIMYADKVTCENNDYDKTVYQSIQPIYPARIQTGDNLFKCTDAVKSFNHIIHFGDHKGIHTGEKLYEYKECHQIFNQSPSFNEHPRLHVGENQYNYKEYENIFYFSSFMEHQKIGTVEKAYKYNEWEKVFGYDSFLTQHTSTYTAEKPYDYNECGTSFIWSSYLIQHKKTHTGEKPYECDKCGKVFRNRSALTKHERTHTGIKPYECNKCGKAFSWNSHLIVHKRIHTGEKPYVCNECGKSFNWNSHLIGHQRTHTG

SEQ ID NO: 100717 - protein, 66 aa, Homo sapiens
  Payload ID: 20066
  Gene Name: zinc finger protein 606
  ENSP ID: ENSP00000447075
MAAINPWASWGALTDQSWGMTAVDPWASWGESRAWSAVGCHIVASGCSALPQLGNRMGTRWGFRAG

SEQ ID NO: 100718 - protein, 88 aa, Homo sapiens
  Payload ID: 20066
  Gene Name: zinc finger protein 606
  ENSP ID: ENSP00000447726
MAAINPWASWGALTDQSWGMTAVDPWASWGESRAWSAVGCHIVASGCSALPQLGNRMGTRWGFRAGGPDLSLCRAGTRRNQKTSGQAW

SEQ ID NO: 100719 - protein, 69 aa, Homo sapiens; identical to SEQ ID NO: 100714
  Payload ID: 20066
  Gene Name: zinc finger protein 606
  ENSP ID: ENSP00000449865

SEQ ID NO: 100720 - protein, 696 aa, Homo sapiens
  Payload ID: 20067
  Gene Name: zinc finger protein 607
  Uniprot ID: Q96SK3
  ENSP ID: ENSP00000347338
MSYGSITFGDVAIDFSHQEWEYLSLVQKTLYQEVMMENYDNLVSLAGHSVSKPDLITLLEQGKEPWMIVREETRGECTDLDSRCEIISDGKMQLYRKHSCVTLHQRIHNGQKPYECKQCQKSFSHLTELMVHQTIHTSEEPDQCEKFRKAFSHLTDLRKHQKINAREKPYECEECGKVFSYPANLAQHGKVHVEKPYECKECGEAFRTSRQLTVHHRFHYGEKPYECKECGKAFSVYGRLSRHQSIHTGEKPFECNKCGKSFRLKAGLKVHQSIHTGEKPHECKECGKAFRQFSHLVGHKRIHTGEKPYECKECGKGFTCRYQLTMHQRIYSGEKHYECKENGEAFSSGHQLTAPHTFESVEKPYKCEECGKAFSVHGRLTRHQGIHSGKKPYECNKCGKSFRLNSSLKIHQNIHTGEKPYKCKECGKAFSQRAHLAHHNRIHTGYKPFECKECGKSFRCASYLVIHERIHTGEKPYVCQECGKGFSYSHKLTIHRRVHTGEKPYECKECGKAFSVSGQLTQHLSIHSGKKPFECNKCGKSFRFISVLKAHQNIHSAEKPYECKECGKAFRHATSLIYHDRTHAGEKSYECKECGETFSHASHLIIHERIHTSDKPYECKRCGKAFHCASYLVRHESVHADGNPYMCEECGKAFNSSHELSIHHRVHTGEKPFKCNKCRRSFRLRSILEVHQRIHI

SEQ ID NO: 100721 - protein, 695 aa, Homo sapiens
  Payload ID: 20067
  Gene Name: zinc finger protein 607
  Uniprot ID: Q96SK3
  ENSP ID: ENSP00000438015
MSYGSITFGDVAIDFSHQEWEYLSLVQKTLYQEVMMENYDNLVSLGHSVSKPDLITLLEQGKEPWMIVREETRGECTDLDSRCEIISDGKMQLYRKHSCVTLHQRIHNGQKPYECKQCQKSFSHLTELMVHQTIHTSEEPDQCEKFRKAFSHLTDLRKHQKINAREKPYECEECGKVFSYPANLAQHGKVHVEKPYECKECGEAFRTSRQLTVHHRFHYGEKPYECKECGKAFSVYGRLSRHQSIHTGEKPFECNKCGKSFRLKAGLKVHQSIHTGEKPHECKECGKAFRQFSHLVGHKRIHTGEKPYECKECGKGFTCRYQLTMHQRIYSGEKHYECKENGEAFSSGHQLTAPHTFESVEKPYKCEECGKAFSVHGRLTRHQGIHSGKKPYECNKCGKSFRLNSSLKIHQNIHTGEKPYKCKECGKAFSQRAHLAHHNRIHTGYKPFECKECGKSFRCASYLVIHERIHTGEKPYVCQECGKGFSYSHKLTIHRRVHTGEKPYECKECGKAFSVSGQLTQHLSIHSGKKPFECNKCGKSFRFISVLKAHQNIHSAEKPYECKECGKAFRHATSLIYHDRTHAGEKSYECKECGETFSHASHLIIHERIHTSDKPYECKRCGKAFHCASYLVRHESVHADGNPYMCEECGKAFNSSHELSIHHRVHTGEKPFKCNKCRRSFRLRSILEVHQRIHI

SEQ ID NO: 100722 - protein, 102 aa, Homo sapiens
  Payload ID: 20067
  Gene Name: zinc finger protein 607
  ENSP ID: ENSP00000466265
MSYGSITFGDVAIDFSHQEWEYLSLVQKTLYQEVMMENYDNLVSLGHSVSKPDLITLLEQGKEPWMIVREETRGECTAELQSKNCGFQLRDLQDSLHLRKNC

SEQ ID NO: 100723 - protein, 112 aa, Homo sapiens
  Payload ID: 20067
  Gene Name: zinc finger protein 607
  ENSP ID: ENSP00000466785
MQLYRKHSCVTLHQRIHNGQKPYECKQCQKSFSHLTELMVHQTIHTSEEPDQCEKFRKAFSHLTDLRKHQKINAREKPYECEECGKVFSYPANLAQHGKVHVEKPYECKECG

SEQ ID NO: 100724 - protein, 70 aa, Homo sapiens
  Payload ID: 20067
  Gene Name: zinc finger protein 607
  ENSP ID: ENSP00000468817
MSYGSITFGDVAIDFSHQEWEYLSLVQKTLYQEVMMENYDNLVSLDLDSRCEIISDGKMQLYRKHSCVTL

SEQ ID NO: 100725 - protein, 1512 aa, Homo sapiens
  Payload ID: 20068
  Gene Name: zinc finger protein 608
  Uniprot ID: Q9ULD9
  ENSP ID: ENSP00000307746
MSVNISTAGKGVDPNTVDTYDSGDDWEIGVGNLIIDLDADLEKDRQKFEMNNSTTTTSSSNSKDCGGPASSGAGATAALADGLKFASVQASAPQGNSHKETSKSKVKRSKTSKDANKSLPSAALYGIPEISSTGKRQEVQGRPGEATGMNSALGQSVSSGGSGNPNSNSTSTSTSAATAGAGSCGKSKEEKPGKSQSSRGAKRDKDAGKSRKDKHDLLQGHQNGSGSQAPSGGHLYGFGAKSNGGGASPFHCGGTGSGSVAAAGEVSKSAPDSGLMGNSMLVKKEEEEEESHRRIKKLKTEKVDPLFTVPAPPPPISSSLTPQILPSYFSPSSSNIAAPVEQLLVRTRSVGVNTCEVGVVTEPECLGPCEPGTSVNLEGIVWHETEEGVLVVNVTWRNKTYVGTLLDCTKHDWAPPRFCESPTSDLEMRGGRGRGKRARSAAAAPGSEASFTESRGLQNKNRGGANGKGRRGSLNASGRRTPPNCAAEDIKASPSSTNKRKNKPPMELDLNSSSEDNKPGKRVRTNSRSTPTTPQGKPETTFLDQGCSSPVLIDCPHPNCNKKYKHINGLRYHQAHAHLDPENKLEFEPDSEDKISDCEEGLSNVALECSEPSTSVSAYDQLKAPASPGAGNPPGTPKGKRELMSNGPGSIIGAKAGKNSGKKKGLNNELNNLPVISNMTAALDSCSAADGSLAAEMPKLEAEGLIDKKNLGDKEKGKKATNCKTDKNLSKLKSARPIAPAPAPTPPQLIAIPTATFTTTTTGTIPGLPSLTTTVVQATPKSPPLKPIQPKPTIMGEPITVNPALVSLKDKKKKEKRKLKDKEGKETGSPKMDAKLGKLEDSKGASKDLPGHFLKDHLNKNEGLANGLSESQESRMASIKAEADKVYTFTDNAPSPSIGSASRLECSTLVNGQAPMAPLHVLTQNGAESSAAKTSSPAYSDISDAADDGGSDSRSEGMRSKASSPSDIISSKDSVVKGHSSTTAQSSQLKESHSPYYHSYDPYYSPSYMHPGQVGAPAAGNSGSTQGMKIKKESEEDAEKKDKAEQLDSKKVDHNSASLQPQHQSVITQRHPALAQSLYYGQYAYGLYMDQKSLMATSPAYRQQYEKYYEDQRLAEQKMAQTGRGDCERKSELPLKELGKEETKQKNMPSATISKAPSTPEPNKNHSKLGPSVPNKTEETGKSQLLSNHQQQLQADSFKAKQMENHQLIKEAVEMKSVMDSMKQTGVDPTSRFKQDPDSRTWHHYVYQPKYLDQQKSEELDREKKLKEDSPRKTPNKESGVPSLPVSLTSIKEEPKEAKHPDSQSMEESKLKNDDRKTPVNWKDSRGTRVAVSSPMSQHQSYIQYLHAYPYPQMYDPSHPAYRAVSPVLMHSYPGAYLSPGFHYPVYGKMSGREETEKVNTSPSVNTKTTTESKALDLLQQHANQYRSKSPAPVEKATAEREREAERERDRHSPFGQRHLHTHHHTHVGMGYPLIPGQYDPFQGLTSAALVASQQVAAQASASGMFPGQRRE

SEQ ID NO: 100726 - protein, 707 aa, Homo sapiens
  Payload ID: 20068
  Gene Name: zinc finger protein 608
  ENSP ID: ENSP00000421899
MSVNISTAGKGVDPNTVDTYDSGDDWEIGVGNLIIDLDADLEKDRQKFEMNNSTTTTSSSNSKDCGGPASSGAGATAALADGLKFASVQASAPQGNSHKETSKSKVKRSKTSKDANKSLPSAALYGIPEISSTGKRQEVQGRPGEATGMNSALGQSVSSGGSGNPNSNSTSTSTSAATAGAGSCGKSKEEKPGKSQSSRGAKRDKDAGKSRKDKHDLLQGHQNGSGSQAPSGGHLYGFGAKSNGGGASPFHCGGTGSGSVAAAGEVSKSAPDSGLMGNSMLVKKEEEEEESHRRIKKLKTEKVDPLFTVPAPPPPISSSLTPQILPSYFSPSSSNIAAPVEQLLVRTRSVGVNTCEVGVVTEPECLGPCEPGTSVNLEGIVWHETEEGVLVVNVTWRNKTYVGTLLDCTKHDWAPPRFCESPTSDLEMRGGRGRGKRARSAAAAPGSEASFTESRGLQNKNRGGANGKGRRGSLNASGRRTPPNCAAEDIKASPSSTNKRKNKPPMELDLNSSSEDNKPGKRVRTNSRSTPTTPQGKPETTFLDQGCSSPVLIDCPHPNCNKKYKHINGLRYHQAHAHLDPENKLEFEPDSEDKISDCEEGLSNVALECSEPSTSVSAYDQLKAPASPGAGNPPGTPKGKRELMSNGPGSIIGAKAGKNSGKKKGLNNELNNLPVISNMTAALDSCSAADGSLAAEMPKLEAEGLID

SEQ ID NO: 100727 - protein, 715 aa, Homo sapiens
  Payload ID: 20068
  Gene Name: zinc finger protein 608
  ENSP ID: ENSP00000423279
MSVNISTAGKGVDPNTVDTYDSGDDWEIGVGNLIIDLDADLEKDRQKFEMNNSTTTTSSSNSKDCGGPASSGAGATAALADGLKFASVQASAPQGNSHKETSKSKVKRSKTSKDANKSLPSAALYGIPEISSTGKRQEVQGRPGEATGMNSALGQSVSSGGSGNPNSNSTSTSTSAATAGAGSCGKSKEEKPGKSQSSRGAKRDKDAGKSRKDKHDLLQGHQNGSGSQAPSGGHLYGFGAKSNGGGASPFHCGGTGSGSVAAAGEVSKSAPDSGLMGNSMLVKKEEEEEESHRRIKKLKTEKVDPLFTVPAPPPPISSSLTPQILPSYFSPSSSNIAAPVEQLLVRTRSVGVNTCEVGVVTEPECLGPCEPGTSVNLEGIVWHETEEGVLVVNVTWRNKTYVGTLLDCTKHDWAPPRFCESPTSDLEMRGGRGRGKRARSAAAAPGSEASFTESRGLQNKNRGGANGKGRRGSLNASGRRTPPNCAAEDIKASPSSTNKRKNKPPMELDLNSSSEDNKPGKRVRTNSRSTPTTPQGKPETTFLDQGCSSPVLIDCPHPNCNKKYKHINGLRYHQAHAHLDPENKLEFEPDSEDKISDCEEGLSNVALECSEPSTSVSAYDQLKAPASPGAGNPPGTPKGKRELMSNGPGSIIGAKAGKNSGKKKGLNNELNNLPVISNMTAALDSCSAADGSLAAEMPKLEAEGLIDKKNLGDKE

SEQ ID NO: 100728 - protein, 447 aa, Homo sapiens
  Payload ID: 20068
  Gene Name: zinc finger protein 608
  ENSP ID: ENSP00000424086
MSVNISTAGKGVDPNTVDTYDSGDDWEIGVGNLIIDLDADLEKDRQKFEMNNSTTTTSSSNSKDCGGPASSGAGATAALADGLKFASVQASAPQGNSHKETSKSKVKRSKTSKDANKSLPSAALYGIPEISSTGKRQEVQGRPGEATGMNSALGQSVSSGGSGNPNSNSTSTSTSAATAGAGSCGKSKEEKPGKSQSSRGAKRDKDAGKSRKDKHDLLQGHQNGSGSQAPSGGHLYGFGAKSNGGGASPFHCGGTGSGSVAAAGEVSKSAPDSGLMGNSMLVKKEEEEEESHRRIKKLKTEKVDPLFTVPAPPPPISSSLTPQILPSYFSPSSSNIAAPVEQLLVRTRSVGVNTCEVGVVTEPECLGPCEPGTSVNLEGIVWHETEEGVLVVNVTWRNKTYVGTLLDCTKHDWAPPRTQIQEHGIIMYTSPNIWISKSQKNLIERRN

SEQ ID NO: 100729 - protein, 1085 aa, Homo sapiens
  Payload ID: 20068
  Gene Name: zinc finger protein 608
  Uniprot ID: Q9ULD9
  ENSP ID: ENSP00000427657
MRGGRGRGKRARSAAAAPGSEASFTESRGLQNKNRGGANGKGRRGSLNASGRRTPPNCAAEDIKASPSSTNKRKNKPPMELDLNSSSEDNKPGKRVRTNSRSTPTTPQGKPETTFLDQGCSSPVLIDCPHPNCNKKYKHINGLRYHQAHAHLDPENKLEFEPDSEDKISDCEEGLSNVALECSEPSTSVSAYDQLKAPASPGAGNPPGTPKGKRELMSNGPGSIIGAKAGKNSGKKKGLNNELNNLPVISNMTAALDSCSAADGSLAAEMPKLEAEGLIDKKNLGDKEKGKKATNCKTDKNLSKLKSARPIAPAPAPTPPQLIAIPTATFTTTTTGTIPGLPSLTTTVVQATPKSPPLKPIQPKPTIMGEPITVNPALVSLKDKKKKEKRKLKDKEGKETGSPKMDAKLGKLEDSKGASKDLPGHFLKDHLNKNEGLANGLSESQESRMASIKAEADKVYTFTDNAPSPSIGSASRLECSTLVNGQAPMAPLHVLTQNGAESSAAKTSSPAYSDISDAADDGGSDSRSEGMRSKASSPSDIISSKDSVVKGHSSTTAQSSQLKESHSPYYHSYDPYYSPSYMHPGQVGAPAAGNSGSTQGMKIKKESEEDAEKKDKAEQLDSKKVDHNSASLQPQHQSVITQRHPALAQSLYYGQYAYGLYMDQKSLMATSPAYRQQYEKYYEDQRLAEQKMAQTGRGDCERKSELPLKELGKEETKQKNMPSATISKAPSTPEPNKNHSKLGPSVPNKTEETGKSQLLSNHQQQLQADSFKAKQMENHQLIKEAVEMKSVMDSMKQTGVDPTSRFKQDPDSRTWHHYVYQPKYLDQQKSEELDREKKLKEDSPRKTPNKESGVPSLPVSLTSIKEEPKEAKHPDSQSMEESKLKNDDRKTPVNWKDSRGTRVAVSSPMSQHQSYIQYLHAYPYPQMYDPSHPAYRAVSPVLMHSYPGAYLSPGFHYPVYGKMSGREETEKVNTSPSVNTKTTTESKALDLLQQHANQYRSKSPAPVEKATAEREREAERERDRHSPFGQRHLHTHHHTHVGMGYPLIPGQYDPFQGLTSAALVASQQVAAQASASGMFPGQRRE

SEQ ID NO: 100730 - protein, 447 aa, Homo sapiens; identical to SEQ ID NO: 100728
  Payload ID: 20068
  Gene Name: zinc finger protein 608
  ENSP ID: ENSP00000477767

SEQ ID NO: 100731 - protein, 1411 aa, Homo sapiens
  Payload ID: 20069
  Gene Name: zinc finger protein 609
  Uniprot ID: O15014
  ENSP ID: ENSP00000316527
MSLSSGASGGKGVDANPVETYDSGDEWDIGVGNLIIDLDADLEKDQQKLEMSGSKEVGIPAPNAVATLPDNIKFVTPVPGPQGKEGKSKSKRSKSGKDTSKPTPGTSLFTPSEGAASKKEVQGRSGDGANAGGLVAAIAPKGSEKAAKASRSVAGSKKEKENSSSKSKKERSEGVGTCSEKDPGVLQPVPLGGRGGQYDGSAGVDTGAVEPLGSIAIEPGAALNPLGTKPEPEEGENECRLLKKVKSEKMESPVSTPAVLPIHLLVPVVNNDISSPCEQIMVRTRSVGVNTCDVALATEPECLGPCEPGTSVNLEGIVWQETEDGMLVVNVTWRNKTYVGTLLDCTRHDWAPPRFCDSPTSDLEMRNGRGRGKRMRPNSNTPVNETATASDSKGTSNSSKTRAGANSKGRRGSQNSSEHRPPASSTSEDVKASPSSANKRKNKPLSDMELNSSSEDSKGSKRVRTNSMGSATGPLPGTKVEPTVLDRNCPSPVLIDCPHPNCNKKYKHINGLKYHQAHAHTDDDSKPEADGDSEYGEEPILHADLGSCNGASVSQKGSLSPARSATPKVRLVEPHSPSPSSKFSTKGLCKKKLSGEGDTDLGALSNDGSDDGPSVMDETSNDAFDSLERKCMEKEKCKKPSSLKPEKIPSKSLKSARPIAPAIPPQQIYTFQTATFTAASPGSSSGLTATVAQAMPNSPQLKPIQPKPTVMGEPFTVNPALTPAKDKKKKDKKKKESSKELESPLTPGKVCRAEEGKSPFRESSGDGMKMEGLLNGSSDPHQSRLASIKAEADKIYSFTDNAPSPSIGGSSRLENTTPTQPLTPLHVVTQNGAEASSVKTNSPAYSDISDAGEDGEGKVDSVKSKDAEQLVKEGAKKTLFPPQPQSKDSPYYQGFESYYSPSYAQSSPGALNPSSQAGVESQALKTKRDEEPESIEGKVKNDICEEKKPELSSSSQQPSVIQQRPNMYMQSLYYNQYAYVPPYGYSDQSYHTHLLSTNTAYRQQYEEQQKRQSLEQQQRGVDKKAEMGLKEREAALKEEWKQKPSIPPTLTKAPSLTDLVKSGPGKAKEPGADPAKSVIIPKLDDSSKLPGQAPEGLKVKLSDASHLSKEASEAKTGAECGRQAEMDPILWYRQEAEPRMWTYVYPAKYSDIKSEDERWKEERDRKLKEERSRSKDSVPKEDGKESTSSDCKLPTSEESRLGSKEPRPSVHVPVSSPLTQHQSYIPYMHGYSYSQSYDPNHPSYRSMPAVMMQNYPGSYLPSSYSFSPYGSKVSGGEDADKARASPSVTCKSSSESKALDILQQHASHYKSKSPTISDKTSQERDRGGCGVVGGGGSCSSVGGASGGERSVDRPRTSPSQRLMSTHHHHHHLGYSLLPAQYNLPYAAGLSSTAIVASQQGSTPSLYPPPRR

SEQ ID NO: 100732 - protein, 331 aa, Homo sapiens
  Payload ID: 20069
  Gene Name: zinc finger protein 609
  ENSP ID: ENSP00000388846
MSLSSGASGGKGVDANPVETYDSGDEWDIGVGNLIIDLDADLEKDQQKLEMSGSKEVGIPAPNAVATLPDNIKFVTPVPGPQGKEGKSKSKRSKSGKDTSKPTPGTSLFTPSEGAASKKEVQGRSGDGANAGGLVAAIAPKGSEKAAKASRSVAGSKKEKENSSSKSKKERSEGVGTCSEKDPGVLQPVPLGGRGGQYDGSAGVDTGAVEPLGSIAIEPGAALNPLGTKPEPEEGENECRLLKKVKSEKVRGGQIWLPTDCQSELPWTNCQILCVLCGRLISVWVMTNYKVRAAGNDNVVFFQIRGFPYRLIYSRPGHCGTGYLLLGAATL

SEQ ID NO: 100733 - protein, 462 aa, Homo sapiens
  Payload ID: 20070
  Gene Name: zinc finger protein 610
  Uniprot ID: Q8N9Z0
  ENSP ID: ENSP00000324441
MLCDEEAQKRKAKESGMALPQGRLTFMDVAIEFSQEEWKSLDPGQRALYRDVMLENYRNLVFLGICLPDLSIISMLKQRREPLILQSQVKIVKNTDGRECVRSVNTGRSCVLGSNAENKPIKNQLGLTLEAHLSELQLFQAGRKIYRSNQVEKFTNHRSSVSPLQKISSSFTTHIFNKYRNDLIDFPLLPQEEKAYIRGKSYEYECSEDGEVFRVRASLTNHQVIHTAEKPYKCTECGKVFSRNSHLVEHWRIHTGQKPYKCSECDKVFNRNSNLARHQRIHTGEKPHKCNECGKAFRECSGLTTHLVIHTGEKPYKCNECGKNFRHKFSLTNHQRSHTAEKPYKCNECGKVFSLLSYLARHQIIHSTEKPYKCNECGRAFHKRPGLMAHLLIHTGEKPYKCNECDKVFGRKLYLTNHQRIHTGERPYKCNACGKVFNQNPHLSRHRKIHAGENSLRTLQME

SEQ ID NO: 100734 - protein, 462 aa, Homo sapiens; identical to SEQ ID NO: 100733
  Payload ID: 20070
  Gene Name: zinc finger protein 610
  Uniprot ID: Q8N9Z0
  ENSP ID: ENSP00000327597

SEQ ID NO: 100735 - protein, 462 aa, Homo sapiens; identical to SEQ ID NO: 100733
  Payload ID: 20070
  Gene Name: zinc finger protein 610
  Uniprot ID: Q8N9Z0
  ENSP ID: ENSP00000383922

SEQ ID NO: 100736 - protein, 85 aa, Homo sapiens
  Payload ID: 20070
  Gene Name: zinc finger protein 610
  ENSP ID: ENSP00000469935
MLCDEEAQKRKAKESGMALPQGRLTFMDVAIEFSQEEWKSLDPGQRALYRDVMLENYRNLVFLGICLPDLSIISMLKQRREPLIL

SEQ ID NO: 100737 - protein, 419 aa, Homo sapiens
  Payload ID: 20070
  Gene Name: zinc finger protein 610
  Uniprot ID: Q8N9Z0
  ENSP ID: ENSP00000471021
MLCDEEAQKRKAKESGMALPQGRLTFMDVAIEFSQEEWKSLDPGQRALYRDVMLENYRNLVFLGRSCVLGSNAENKPIKNQLGLTLEAHLSELQLFQAGRKIYRSNQVEKFTNHRSSVSPLQKISSSFTTHIFNKYRNDLIDFPLLPQEEKAYIRGKSYEYECSEDGEVFRVRASLTNHQVIHTAEKPYKCTECGKVFSRNSHLVEHWRIHTGQKPYKCSECDKVFNRNSNLARHQRIHTGEKPHKCNECGKAFRECSGLTTHLVIHTGEKPYKCNECGKNFRHKFSLTNHQRSHTAEKPYKCNECGKVFSLLSYLARHQIIHSTEKPYKCNECGRAFHKRPGLMAHLLIHTGEKPYKCNECDKVFGRKLYLTNHQRIHTGERPYKCNACGKVFNQNPHLSRHRKIHAGENSLRTLQME

SEQ ID NO: 100738 - protein, 419 aa, Homo sapiens; identical to SEQ ID NO: 100737
  Payload ID: 20070
  Gene Name: zinc finger protein 610
  Uniprot ID: Q8N9Z0
  ENSP ID: ENSP00000477617

SEQ ID NO: 100739 - protein, 462 aa, Homo sapiens; identical to SEQ ID NO: 100733
  Payload ID: 20070
  Gene Name: zinc finger protein 610
  Uniprot ID: Q8N9Z0
  ENSP ID: ENSP00000485001

SEQ ID NO: 100740 - protein, 705 aa, Homo sapiens
  Payload ID: 20071
  Gene Name: zinc finger protein 611
  Uniprot ID: Q8N823
  ENSP ID: ENSP00000322427
MLREEAAQKRKGKEPGMALPQGRLTFRDVAIEFSLAEWKCLNPSQRALYREVMLENYRNLEAVDISSKCMMKEVLSTGQGNTEVIHTGTLQRHESHHIGDFCFQEIEKEIHDIEFQCQEDERNGLEAPMTKIKKLTGSTDQHDHRHAGNKPIKDQLGSSFYSHLPELHIFQIKGEIGNQLEKSTNDAPSVSTFQRISCRPQTQISNNYGNNPLNSSLLPQKQEVHMREKSFQCNKSGKAFNCSSLLRKHQIPHLGDKQYKCDVCGKLFNHEQYLACHDRCHTVEKPYKCKECGKTFSQESSLTCHRRLHTGVKRYNCNECGKIFGQNSALLIDKAIDTGENPYKCNECDKAFNQQSQLSHHRIHTGEKPYKCEECDKVFSRKSTIETHKRIHTGEKPYRCKVCDTAFTWHSQLARHRRIHTAKKTYKCNECGKTFSHKSSLVCHHRLHGGEKSYKCKVCDKAFVWSSQLAKHTRIDCGEKPYKCNECGKTFGQNSDLLIHKSIHTGEQPYKCDECEKVFSRKSSLETHKIGHTGEKPYKCKVCDKAFACHSYLAKHTRIHSGEKPYKCNECSKTFSHRSYLVCHHRVHSGEKPYKCNECSKTFSRRSSLHCHRRLHSGEKPYKCNECGNTFRHCSSLIYHRRLHTGEKSYKCTICDKAFVRNSLLSRHTRIHTAEKPYKCNECGKAFNQQSHLSRHHRIHTGEKP

SEQ ID NO: 100741 - protein, 705 aa, Homo sapiens; identical to SEQ ID NO: 100740
  Payload ID: 20071
  Gene Name: zinc finger protein 611
  Uniprot ID: Q8N823
  ENSP ID: ENSP00000437616

SEQ ID NO: 100742 - protein, 705 aa, Homo sapiens; identical to SEQ ID NO: 100740
  Payload ID: 20071
  Gene Name: zinc finger protein 611
  Uniprot ID: Q8N823
  ENSP ID: ENSP00000439211

SEQ ID NO: 100743 - protein, 636 aa, Homo sapiens
  Payload ID: 20071
  Gene Name: zinc finger protein 611
  Uniprot ID: Q8N823
  ENSP ID: ENSP00000443505
MMKEVLSTGQGNTEVIHTGTLQRHESHHIGDFCFQEIEKEIHDIEFQCQEDERNGLEAPMTKIKKLTGSTDQHDHRHAGNKPIKDQLGSSFYSHLPELHIFQIKGEIGNQLEKSTNDAPSVSTFQRISCRPQTQISNNYGNNPLNSSLLPQKQEVHMREKSFQCNKSGKAFNCSSLLRKHQIPHLGDKQYKCDVCGKLFNHEQYLACHDRCHTVEKPYKCKECGKTFSQESSLTCHRRLHTGVKRYNCNECGKIFGQNSALLIDKAIDTGENPYKCNECDKAFNQQSQLSHHRIHTGEKPYKCEECDKVFSRKSTIETHKRIHTGEKPYRCKVCDTAFTWHSQLARHRRIHTAKKTYKCNECGKTFSHKSSLVCHHRLHGGEKSYKCKVCDKAFVWSSQLAKHTRIDCGEKPYKCNECGKTFGQNSDLLIHKSIHTGEQPYKCDECEKVFSRKSSLETHKIGHTGEKPYKCKVCDKAFACHSYLAKHTRIHSGEKPYKCNECSKTFSHRSYLVCHHRVHSGEKPYKCNECSKTFSRRSSLHCHRRLHSGEKPYKCNECGNTFRHCSSLIYHRRLHTGEKSYKCTICDKAFVRNSLLSRHTRIHTAEKPYKCNECGKAFNQQSHLSRHHRIHTGEKP

SEQ ID NO: 100744 - protein, 48 aa, Homo sapiens
  Payload ID: 20071
  Gene Name: zinc finger protein 611
  ENSP ID: ENSP00000469110
MLREEAAQKRKGKEPGMALPQVESHFVTQAGVQWCDPGSLQPLPPRFK

SEQ ID NO: 100745 - protein, 75 aa, Homo sapiens
  Payload ID: 20071
  Gene Name: zinc finger protein 611
  ENSP ID: ENSP00000469314
MLREEAAQKRKGKEPGMALPQVESHFVTQAGVQWCDPGSLQPLPPRYLFQMHDEGGLVNRARQYRSDPHRDIAKT

SEQ ID NO: 100746 - protein, 636 aa, Homo sapiens; identical to SEQ ID NO: 100743
  Payload ID: 20071
  Gene Name: zinc finger protein 611
  Uniprot ID: Q8N823
  ENSP ID: ENSP00000469376

SEQ ID NO: 100747 - protein, 129 aa, Homo sapiens
  Payload ID: 20071
  Gene Name: zinc finger protein 611
  ENSP ID: ENSP00000470022
MMKEVLSTGQGNTEVIHTGTLQRHESHHIGDFCFQEIEKEIHDIEFQCQEDERNGLEAPMTKIKKLTGSTDQHDHRHAGNKPIKDQLGSSFYSHLPELHIFQIKGEIGNQLEKSTNDAPSVSTFQRISC

SEQ ID NO: 100748 - protein, 64 aa, Homo sapiens
  Payload ID: 20071
  Gene Name: zinc finger protein 611
  ENSP ID: ENSP00000470182
MLREEAAQKRKGKEPGMALPQGRLTFRDVAIEFSLAEWKCLNPSQRALYREVMLENYRNLEAVG

SEQ ID NO: 100749 - protein, 64 aa, Homo sapiens; identical to SEQ ID NO: 100748
  Payload ID: 20071
  Gene Name: zinc finger protein 611
  ENSP ID: ENSP00000471243

SEQ ID NO: 100750 - protein, 89 aa, Homo sapiens
  Payload ID: 20071
  Gene Name: zinc finger protein 611
  ENSP ID: ENSP00000472093
MLREEAAQKRKGKEPGMALPQGRLTFRDVAIEFSLAEWKCLNPSQRALYREVMLENYRNLEAVESHFVTQAGVQWCDPGSLQPLPPRFK

SEQ ID NO: 100751 - protein, 636 aa, Homo sapiens; identical to SEQ ID NO: 100743
  Payload ID: 20071
  Gene Name: zinc finger protein 611
  Uniprot ID: Q8N823
  ENSP ID: ENSP00000472648

SEQ ID NO: 100752 - protein, 80 aa, Homo sapiens
  Payload ID: 20071
  Gene Name: zinc finger protein 611
  ENSP ID: ENSP00000472849
MLREEAAQKRKGKEPGMALPQGRLTFRDVAIEFSLAEWKCLNPSQRALYREVMLENYRNLEAVETGFHCVSQDGLNLLTS

SEQ ID NO: 100753 - protein, 64 aa, Homo sapiens; identical to SEQ ID NO: 100748
  Payload ID: 20071
  Gene Name: zinc finger protein 611
  ENSP ID: ENSP00000472910

SEQ ID NO: 100754 - protein, 617 aa, Homo sapiens
  Payload ID: 20072
  Gene Name: zinc finger protein 613
  Uniprot ID: Q6PF04
  ENSP ID: ENSP00000293471
MIKSQESLTLEDVAVEFTWEEWQLLGPAQKDLYRDVMLENYSNLVSVGYQASKPDALFKLEQGEPWTVENEIHSQICPEIKKVDNHLQMHSQKQRCLKRVEQCHKHNAFGNIIHQRKSDFPLRQNHDTFDLHGKILKSNLSLVNQNKRYEIKNSVGVNGDGKSFLHAKHEQFHNEMNFPEGGNSVNTNSQFIKHQRTQNIDKPHVCTECGKAFLKKSRLIYHQRVHTGEKPHGCSICGKAFSRKSGLTEHQRNHTGEKPYECTECDKAFRWKSQLNAHQKIHTGEKSYICSDCGKGFIKKSRLINHQRVHTGEKPHGCSLCGKAFSKRSRLTEHQRTHTGEKPYECTECDKAFRWKSQLNAHQKAHTGEKSYICRDCGKGFIQKGNLIVHQRIHTGEKPYICNECGKGFIQKGNLLIHRRTHTGEKPYVCNECGKGFSQKTCLISHQRFHTGKTPFVCTECGKSCSHKSGLINHQRIHTGEKPYTCSDCGKAFRDKSCLNRHRRTHTGERPYGCSDCGKAFSHLSCLVYHKGMLHAREKCVGSVKLENPCSESHSLSHTRDLIQDKDSVNMVTLQMPSVAAQTSLTNSAFQAESKVAIVSQPVARSSVSADSRICTE

SEQ ID NO: 100755 - protein, 581 aa, Homo sapiens
  Payload ID: 20072
  Gene Name: zinc finger protein 613
  Uniprot ID: Q6PF04
  ENSP ID: ENSP00000375671
MLENYSNLVSVGYQASKPDALFKLEQGEPWTVENEIHSQICPEIKKVDNHLQMHSQKQRCLKRVEQCHKHNAFGNIIHQRKSDFPLRQNHDTFDLHGKILKSNLSLVNQNKRYEIKNSVGVNGDGKSFLHAKHEQFHNEMNFPEGGNSVNTNSQFIKHQRTQNIDKPHVCTECGKAFLKKSRLIYHQRVHTGEKPHGCSICGKAFSRKSGLTEHQRNHTGEKPYECTECDKAFRWKSQLNAHQKIHTGEKSYICSDCGKGFIKKSRLINHQRVHTGEKPHGCSLCGKAFSKRSRLTEHQRTHTGEKPYECTECDKAFRWKSQLNAHQKAHTGEKSYICRDCGKGFIQKGNLIVHQRIHTGEKPYICNECGKGFIQKGNLLIHRRTHTGEKPYVCNECGKGFSQKTCLISHQRFHTGKTPFVCTECGKSCSHKSGLINHQRIHTGEKPYTCSDCGKAFRDKSCLNRHRRTHTGERPYGCSDCGKAFSHLSCLVYHKGMLHAREKCVGSVKLENPCSESHSLSHTRDLIQDKDSVNMVTLQMPSVAAQTSLTNSAFQAESKVAIVSQPVARSSVSADSRICTE

SEQ ID NO: 100756 - protein, 94 aa, Homo sapiens
  Payload ID: 20072
  Gene Name: zinc finger protein 613
  ENSP ID: ENSP00000468850
MIKSQESLTLEDVAVEFTWEEWQLLGPAQKDLYRDVMLENYSNLVSVGYQASKPDALFKLEQGEPWTVENEIHSQICPEIKKVDNHLQMHSQKQ

SEQ ID NO: 100757 - protein, 85 aa, Homo sapiens
  Payload ID: 20072
  Gene Name: zinc finger protein 613
  ENSP ID: ENSP00000472455
MLENYSNLVSVGYQASKPDALFKLEQGEPWTVENEIHSQICPEIKKVDNHLQMHSQKQRCLKRVEQCHKHNAFGNIIHQRKSDFP

SEQ ID NO: 100758 - protein, 617 aa, Homo sapiens; identical to SEQ ID NO: 100754
  Payload ID: 20072
  Gene Name: zinc finger protein 613
  Uniprot ID: Q6PF04
  ENSP ID: ENSP00000478924

SEQ ID NO: 100759 - protein, 585 aa, Homo sapiens
  Payload ID: 20073
  Gene Name: zinc finger protein 614
  Uniprot ID: Q8N883
  ENSP ID: ENSP00000270649
MIKTQESLTLEDVAVEFSWEEWQLLDTAQKNLYRDVMVENYNHLVSLGYQTSKPDVLSKLAHGQEPWTTDAKIQNKNCPGIGKVDSHLQEHSPNQRLLKSVQQCNGQNTLRNIVHLSKTHFPIVQNHDTFDLYRKNLKSSLSLINQKRRHGINNPVEFIGGEKTLLHGKHERTHTKTRFSENAKCIHTKFQVFKHQRTQKIEKPHACIECEQTFLRKSQLIYHENICIQENPGSGQCEKLSRSVLFTKHLKTNTTDKICIPNEYRKGSTVKSSLITHQQTHTEEKSYMCSECGKGFTMKRYLIAHQRTHSGEKPYVCKECGKGFTVKSNLIVHQRTHTGEKPYICSECGKGFTMKRYLVVHQRTHTGEKPYMCSECGKGFTVKSNLIVHQRSHTGEKSYICSECGKGFTVKRTLVIHQRTHTGEKSYICNECGKGFTTKRTLIIHQRTHTGEKPYECNECGKAFSQKICLIQHERCHTGKTPFVCTECGKSYSHKYGLITHQRIHTGEKPYECNECGKAFTTKSVLNVHQRTHTGERPYGCSDCEKAFSHLSNLVKHKKMHTREMGRISQVENSCNGESQLLPYK

SEQ ID NO: 100760 - protein, 198 aa, Homo sapiens
  Payload ID: 20073
  Gene Name: zinc finger protein 614
  Uniprot ID: Q8N883
  ENSP ID: ENSP00000348674
MIKTQESLTLEDVAVEFSWEEWQLLDTAQKNLYRDVMVENYNHLVSLGYQTSKPDVLSKLAHGQEPWTTDAKIQNKNCPGIGKVDSHLQEHSPNQRLLKSVQQCNGQNTLRNIVHLSKTHFPIVQNHDTFDLYRKNLKSSLSLINQKRRHGINNPVEFIGETGSLERPRQADHLRSEVQDQPGQRGETLCLLKIHTKN

SEQ ID NO: 100761 - protein, 39 aa, Homo sapiens
  Payload ID: 20073
  Gene Name: zinc finger protein 614
  ENSP ID: ENSP00000469809
MIKTQESLTLEDVAVEFSWEEWQLLDTAQKNLYRDVMVE

SEQ ID NO: 100762 - protein, 80 aa, Homo sapiens
  Payload ID: 20073
  Gene Name: zinc finger protein 614
  ENSP ID: ENSP00000471869
MIKTQESLTLEDVAVEFSWEEWQLLDTAQKNLYRDVMVENYNHLVSLGYQTSKPDVLSKLAHGQEPWTTDAKIQNKNCPD

SEQ ID NO: 100763 - protein, 731 aa, Homo sapiens
  Payload ID: 20074
  Gene Name: zinc finger protein 615
  Uniprot ID: Q8N8J6
  ENSP ID: ENSP00000365906
MMQAQESLTLEDVAVDFTWEEWQFLSPAQKDLYRDVMLENYSNLVAVGYQASKPDALSKLERGEETCTTEDEIYSRICSEIRKIDDPLQHHLQNQSIQKSVKQCHEQNMFGNIVNQNKGHFLLKQDCDTFDLHEKPLKSNLSFENQKRSSGLKNSAEFNRDGKSLFHANHKQFYTEMKFPAIAKPINKSQFIKQQRTHNIENAHVCSECGKAFLKLSQFIDHQRVHTGEKPHVCSMCGKAFSRKSRLMDHQRTHTELKHYECTECDKTFLKKSQLNIHQKTHMGGKPYTCSQCGKAFIKKCRLIYHQRTHTGEKPHGCSVCGKAFSTKFSLTTHQKTHTGEKPYICSECGKGFIEKRRLTAHHRTHTGEKPFICNKCGKGFTLKNSLITHQQTHTGEKLYTCSECGKGFSMKHCLMVHQRTHTGEKPYKCNECGKGFALKSPLIRHQRTHTGEKPYVCTECRKGFTMKSDLIVHQRTHTAEKPYICNDCGKGFTVKSRLIVHQRTHTGEKPYVCGECGKGFPAKIRLMGHQRTHTGEKPYICNECGKGFTEKSHLNVHRRTHTGEKPYVCSECGKGLTGKSMLIAHQRTHTGEKPYICNECGKGFTMKSTLSIHQQTHTGEKPYKCNECDKTFRKKTCLIQHQRFHTGKTSFACTECGKFSLRKNDLITHQRIHTGEKPYKCSDCGKAFTTKSGLNVHQRKHTGERPYGCSDCGKAFAHLSILVKHRRIHR

SEQ ID NO: 100764 - protein, 736 aa, Homo sapiens
  Payload ID: 20074
  Gene Name: zinc finger protein 615
  ENSP ID: ENSP00000375672
MRPEPTKFWEESLTLEDVAVDFTWEEWQFLSPAQKDLYRDVMLENYSNLVAVGYQASKPDALSKLERGEETCTTEDEIYSRICSEIRKIDDPLQHHLQNQSIQKSVKQCHEQNMFGNIVNQNKGHFLLKQDCDTFDLHEKPLKSNLSFENQKRSSGLKNSAEFNRDGKSLFHANHKQFYTEMKFPAIAKPINKSQFIKQQRTHNIENAHVCSECGKAFLKLSQFIDHQRVHTGEKPHVCSMCGKAFSRKSRLMDHQRTHTELKHYECTECDKTFLKKSQLNIHQKTHMGGKPYTCSQCGKAFIKKCRLIYHQRTHTGEKPHGCSVCGKAFSTKFSLTTHQKTHTGEKPYICSECGKGFIEKRRLTAHHRTHTGEKPFICNKCGKGFTLKNSLITHQQTHTGEKLYTCSECGKGFSMKHCLMVHQRTHTGEKPYKCNECGKGFALKSPLIRHQRTHTGEKPYVCTECRKGFTMKSDLIVHQRTHTAEKPYICNDCGKGFTVKSRLIVHQRTHTGEKPYVCGECGKGFPAKIRLMGHQRTHTGEKPYICNECGKGFTEKSHLNVHRRTHTGEKPYVCSECGKGLTGKSMLIAHQRTHTGEKPYICNECGKGFTMKSTLSIHQQTHTGEKPYKCNECDKTFRKKTCLIQHQRFHTGKTSFACTECGKFSLRKNDLITHQRIHTGEKPYKCSDCGKAFTTKSGLNVHQRKHTGERPYGCSDCGKAFAHLSILVKHRRIHR

SEQ ID NO: 100765 - protein, 98 aa, Homo sapiens
  Payload ID: 20074
  Gene Name: zinc finger protein 615
  ENSP ID: ENSP00000470475
MMQAQESLTLEDVAVDFTWEEWQFLSPAQKDLYRDVMLENYSNLVAVGYQASKPDALSKLERGEETCTTEDEIYSRICSDSGGASGGAYAGLSHGYIA

SEQ ID NO: 100766 - protein, 98 aa, Homo sapiens; identical to SEQ ID NO: 100765
  Payload ID: 20074
  Gene Name: zinc finger protein 615
  ENSP ID: ENSP00000470709

SEQ ID NO: 100767 - protein, 103 aa, Homo sapiens
  Payload ID: 20074
  Gene Name: zinc finger protein 615
  ENSP ID: ENSP00000470880
MRPEPTKFWEESLTLEDVAVDFTWEEWQFLSPAQKDLYRDVMLENYSNLVAVGYQASKPDALSKLERGEETCTTEDEIYSRICSDSGGASGGAYAGLSHGYIA

SEQ ID NO: 100768 - protein, 742 aa, Homo sapiens
  Payload ID: 20074
  Gene Name: zinc finger protein 615
  Uniprot ID: Q8N8J6
  ENSP ID: ENSP00000471041
MMQAQESLTLEDVAVDFTWEEWQFLSPAQKDLYRDVMLENYSNLVAVGYQASKPDALSKLERGEETCTTEDEIYSRICSDSGGASGGAYAEIRKIDDPLQHHLQNQSIQKSVKQCHEQNMFGNIVNQNKGHFLLKQDCDTFDLHEKPLKSNLSFENQKRSSGLKNSAEFNRDGKSLFHANHKQFYTEMKFPAIAKPINKSQFIKQQRTHNIENAHVCSECGKAFLKLSQFIDHQRVHTGEKPHVCSMCGKAFSRKSRLMDHQRTHTELKHYECTECDKTFLKKSQLNIHQKTHMGGKPYTCSQCGKAFIKKCRLIYHQRTHTGEKPHGCSVCGKAFSTKFSLTTHQKTHTGEKPYICSECGKGFIEKRRLTAHHRTHTGEKPFICNKCGKGFTLKNSLITHQQTHTGEKLYTCSECGKGFSMKHCLMVHQRTHTGEKPYKCNECGKGFALKSPLIRHQRTHTGEKPYVCTECRKGFTMKSDLIVHQRTHTAEKPYICNDCGKGFTVKSRLIVHQRTHTGEKPYVCGECGKGFPAKIRLMGHQRTHTGEKPYICNECGKGFTEKSHLNVHRRTHTGEKPYVCSECGKGLTGKSMLIAHQRTHTGEKPYICNECGKGFTMKSTLSIHQQTHTGEKPYKCNECDKTFRKKTCLIQHQRFHTGKTSFACTECGKFSLRKNDLITHQRIHTGEKPYKCSDCGKAFTTKSGLNVHQRKHTGERPYGCSDCGKAFAHLSILVKHRRIHR

SEQ ID NO: 100769 - protein, 160 aa, Homo sapiens
  Payload ID: 20074
  Gene Name: zinc finger protein 615
  ENSP ID: ENSP00000471202
MESLTLEDVAVDFTWEEWQFLSPAQKDLYRDVMLENYSNLVAVGYQASKPDALSKLERGEETCTTEDEIYSRICSDSGGASGGAYAEIRKIDDPLQHHLQNQSIQKSVKQCHEQNMFGNIVNQNKGHFLLKQDCDTFDLHEKPLKSNLSFENQKRSSGLK

SEQ ID NO: 100770 - protein, 742 aa, Homo sapiens; identical to SEQ ID NO: 100768
  Payload ID: 20074
  Gene Name: zinc finger protein 615
  Uniprot ID: Q8N8J6
  ENSP ID: ENSP00000471549

SEQ ID NO: 100771 - protein, 96 aa, Homo sapiens
  Payload ID: 20074
  Gene Name: zinc finger protein 615
  ENSP ID: ENSP00000471608
MMQAQESLTLEDVAVDFTWEEWQFLSPAQKDLYRDVMLENYSNLVAVGYQASKPDALSKLERGEETCTTEDEIYSRICSDSGGASGEIRKIDDPLQ

SEQ ID NO: 100772 - protein, 8 aa, Homo sapiens
  Payload ID: 20074
  Gene Name: zinc finger protein 615
  ENSP ID: ENSP00000472341
MMQAQESL

SEQ ID NO: 100773 - protein, 731 aa, Homo sapiens; identical to SEQ ID NO: 100763
  Payload ID: 20074
  Gene Name: zinc finger protein 615
  Uniprot ID: Q8N8J6
  ENSP ID: ENSP00000473089

SEQ ID NO: 100774 - protein, 742 aa, Homo sapiens; identical to SEQ ID NO: 100768
  Payload ID: 20074
  Gene Name: zinc finger protein 615
  Uniprot ID: Q8N8J6
  ENSP ID: ENSP00000483676

SEQ ID NO: 100775 - protein, 740 aa, Homo sapiens [sequence omitted]

SEQ ID NO: 100776 - protein, 74 aa, Homo sapiens
  Payload ID: 20075
  Gene Name: zinc finger protein 616
  ENSP ID: ENSP00000328722
MATQGHLTFKDVAIEFSQEEWKCLEPVQKALYKDVMLENYRNLVFLGWRIMARSHLTATSVSQVQAILLPQPPE

SEQ ID NO: 100777 - protein, 39 aa, Homo sapiens
  Payload ID: 20075
  Gene Name: zinc finger protein 616
  ENSP ID: ENSP00000469126
MATQGHLTFKDVAIEFSQEEWKCLEPVQKALYKDVMLEN

SEQ ID NO: 100778 - protein, 69 aa, Homo sapiens
  Payload ID: 20075
  Gene Name: zinc finger protein 616
  ENSP ID: ENSP00000470077
MATQGHLTFKDVAIEFSQEEWKCLEPVQKALYKDVMLENYRNLVFLGWRIMARSHLTATSVSQVSLLNV

SEQ ID NO: 100779 - protein, 781 aa, Homo sapiens
  Payload ID: 20075
  Gene Name: zinc finger protein 616
  Uniprot ID: Q08AN1
  ENSP ID: ENSP00000471000
MATQGHLTFKDVAIEFSQEEWKCLEPVQKALYKDVMLENYRNLVFLGISPKCVIKELPPTENSNTGERFQTVALERHQSYDIENLYFREIQKHLHDLEFQWKDGETNDKEVPVPHENNLTGKRDQHSQGDVENNHIENQLTSNFESRLAELQKVQTEGRLYECNETEKTGNNGCLVSPHIREKTYVCNECGKAFKASSSLINHQRIHTTEKPYKCNECGKAFHRASLLTVHKVVHTRGKSYQCDVCGKIFRKNSYFVRHQRSHTGQKPYICNECGKSFSKSSHLAVHQRIHTGEKPYKCNLCGKSFSQRVHLRLHQTVHTGERPFKCNECGKTFKRSSNLTVHQVIHAGKKPYKCDVCGKAFRHRSNLVCHRRIHSGEKQYKCNECGKVFSKRSSLAVHRRIHTVEKPCKCNECGKVFSKRSSLAVHQRIHTGQKTYKCNKCGKVYSKHSHLAVHWRIHTGEKAYKCNECGKVFSIHSRLAAHQRIHTGEKPYKCNECGKVFSQHSRLAVHRRIHTGEKPYKCKECGKVFSDRSAFARHRRIHTGEKPYKCKECGKVFSQCSRLTVHRRIHSGEKPYKCNECGKVYSQYSHLVGHRRVHTGEKPYKCHECGKAFNQGSTLNRHQRIHTGEKPYKCNQCGNSFSQRVHLRLHQTVHTGDRPYKCNECGKTFKRSSNLTAHQIIHAGKKPYKCDECGKVFRHSSHLVSHQRIHTGEKRYKCIECGKAFGRLFSLSKHQRIHSGKKPYKCNECGKSFICRSGLTKHRIRHTGESLTTKLNVTRP

SEQ ID NO: 100780 - protein, 74 aa, Homo sapiens; identical to SEQ ID NO: 100776
  Payload ID: 20075
  Gene Name: zinc finger protein 616
  ENSP ID: ENSP00000471140

SEQ ID NO: 100781 - protein, 861 aa, Homo sapiens
  Payload ID: 20076
  Gene Name: zinc finger protein 618
  Uniprot ID: Q5T7W0
  ENSP ID: ENSP00000288466
MNQPGGAAAPQADGASAAGRKSTASRERLKRSQKSTKVEGPEPVPAEASLSAEQGTMTEVKVKTELPDDYIQEVIWQGEAKEEKKAVSKDGTSDVPAEICVVIGGVRNQQTLGSYECGICGKKYKYYNCFQTHVRAHRDTEATSGEGASQSNNFRYTCDICGKKYKYYSCFQEHRDLHAVDVFSVEGAPENRADPFDQGVVATDEVKEEPPEPFQKIGPMNNITSDIFKKKEVRQCQKRETGNYTCEFCGKQYKYYTPYQEHVALHAPIKSAFSRRVEGKAQNHFEETNSSSQNSSEPYTCGACGIQFQFYNNLLEHMQSHAADNENNIASNQSRSPPAVVEEKWKPQAQRNSANNTTTSGLTPNSMIPEKERQNIAERLLRVMCADLGALSVVSGKEFLKLAQTLVDSGARYGAFSVTEILGNFNTLALKHLPRMYNQVKVKVTCALGSNACLGIGVTCHSQSVGPDSCYILTAYQAEGNHIKSYVLGVKGADIRDSGDLVHHWVQNVLSEFVMSEIRTVYVTDCRVSTSAFSKAGMCLRCSACALNSVVQSVLSKRTLQARSMHEVIELLNVCEDLAGSTGLAKETFGSLEETSPPPCWNSVTDSLLLVHERYEQICEFYSRAKKMNLIQSLNKHLLSNLAAILTPVKQAVIELSNESQPTLQLVLPTYVRLEKLFTAKANDAGTVSKLCHLFLEALKENFKVHPAHKVAMILDPQQKLRPVPPYQHEEIIGKVCELINEVKESWAEEADFEPAAKKPRSAAVENPAAQEDDRLGKNEVYDYLQEPLFQATPDLFQYWSCVTQKHTKLAKLAFWLLAVPAVGARSGCVNMCEQALLIKRRRLLSPEDMNKLMFLKSNML

SEQ ID NO: 100782 - protein, 375 aa, Homo sapiens
  Payload ID: 20076
  Gene Name: zinc finger protein 618
  ENSP ID: ENSP00000363239
MNQPGGAAAPQADGASAAGRKSTASRERLKRSQKSTKVEGPEPVPAEASLSAEQGTMTEVKVKTELPDDYIQEVIWQGEAKEEKKAVSKDGTSDVPAEICVVIGGVRNQQTLGSYECGICGKKYKYYNCFQTHVRAHRDTEATSGEGASQSNNFRYTCDICGKKYKYYSCFQEHRDLHAVDVFSVEGAPENRADPFDQGVVATDEVKEEPPEPFQKIGPMNNITSDIFKKKEVRQCQKRETGNYTCEFCGKQYKYYTPYQEHVALHAPISTAPGWEPPDDPDTGSECSHPEVSPSPRFVAAKTQTNQSGKKAPASVVRCATLLHRTPPATQTQTFRTPNSGSPASKATAESAFSRRVEGKAQNHFEETNSSSQNS

SEQ ID NO: 100783 - protein, 954 aa, Homo sapiens
  Payload ID: 20076
  Gene Name: zinc finger protein 618
  Uniprot ID: Q5T7W0
  ENSP ID: ENSP00000363241
MNQPGGAAAPQADGASAAGRKSTASRERLKRSQKSTKVEGPEPVPAEASLSAEQGTMTEVKVKTELPDDYIQEVIWQGEAKEEKKAVSKDGTSDVPAEICVVIGGVRNQQTLDGKAPEGSPHGGSVRSRYSGTWIFDQALRYASGSYECGICGKKYKYYNCFQTHVRAHRDTEATSGEGASQSNNFRYTCDICGKKYKYYSCFQEHRDLHAVDVFSVEGAPENRADPFDQGVVATDEVKEEPPEPFQKIGPKTGNYTCEFCGKQYKYYTPYQEHVALHAPISTAPGWEPPDDPDTGSECSHPEVSPSPRFVAAKTQTNQSGKKAPASVVRCATLLHRTPPATQTQTFRTPNSGSPASKATAAESAFSRRVEGKAQNHFEETNSSSQNSSEPYTCGACGIQFQFYNNLLEHMQSHAADNENNIASNQSRSPPAVVEEKWKPQAQRNSANNTTTSGLTPNSMIPEKERQNIAERLLRVMCADLGALSVVSGKEFLKLAQTLVDSGARYGAFSVTEILGNFNTLALKHLPRMYNQVKVKVTCALGSNACLGIGVTCHSQSVGPDSCYILTAYQAEGNHIKSYVLGVKGADIRDSGDLVHHWVQNVLSEFVMSEIRTVYVTDCRVSTSAFSKAGMCLRCSACALNSVVQSVLSKRTLQARSMHEVIELLNVCEDLAGSTGLAKETFGSLEETSPPPCWNSVTDSLLLVHERYEQICEFYSRAKKMNLIQSLNKHLLSNLAAILTPVKQAVIELSNESQPTLQLVLPTYVRLEKLFTAKANDAGTVSKLCHLFLEALKENFKVHPAHKVAMILDPQQKLRPVPPYQHEEIIGKVCELINEVKESWAEEADFEPAAKKPRSAAVENPAAQEDDRLGKNEVYDYLQEPLFQATPDLFQYWSCVTQKHTKLAKLAFWLLAVPAVGARSGCVNMCEQALLIKRRRLLSPEDMNKLMFLKSNML

SEQ ID NO: 100784 - protein, 303 aa, Homo sapiens
  Payload ID: 20076
  Gene Name: zinc finger protein 618
  ENSP ID: ENSP00000395400
MNQPGGAAAPQADGASAAGRKSTASRERLKRSQKSTKVEGPEPVPAEASLSAEQGTMTEVKVKTELPDDYIQEVIWQGEAKEEKKAVSKDGTSDVPAEICVVIGGVRNQQTLGSYECGICGKKYKYYNCFQTHVRAHRDTEATSGEGASQSNNFRYTCDICGKKYKYYSCFQEHRDLHAVDDPFDQGVVATDEVKEEPPEPFQKIGPMNNITSDIFKKKEVRQCQKRETGNYTCEFCGKQYKYYTPYQEHVALHAPITTQTQTFRTPNSGSPASKATAESAFSRRVEGKAQNHFEETNSSSQN

SEQ ID NO: 100785 - protein, 921 aa, Homo sapiens
  Payload ID: 20076
  Gene Name: zinc finger protein 618
  Uniprot ID: Q5T7W0
  ENSP ID: ENSP00000483198
MNQPGGAAAPQADGASAAGRKSTASRERLKRSQKSTKVEGPEPVPAEASLSAEQGTMTEVKVKTELPDDYIQEVIWQGEAKEEKKAVSKDGTSDVPAEICVVIGGVRNQQTLGSYECGICGKKYKYYNCFQTHVRAHRDTEATSGEGASQSNNFRYTCDICGKKYKYYSCFQEHRDLHAVDVFSVEGAPENRADPFDQGVVATDEVKEEPPEPFQKIGPKTGNYTCEFCGKQYKYYTPYQEHVALHAPISTAPGWEPPDDPDTGSECSHPEVSPSPRFVAAKTQTNQSGKKAPASVVRCATLLHRTPPATQTQTFRTPNSGSPASKATAESAFSRRVEGKAQNHFEETNSSSQNSSEPYTCGACGIQFQFYNNLLEHMQSHAADNENNIASNQSRSPPAVVEEKWKPQAQRNSANNTTTSGLTPNSMIPEKERQNIAERLLRVMCADLGALSVVSGKEFLKLAQTLVDSGARYGAFSVTEILGNFNTLALKHLPRMYNQVKVKVTCALGSNACLGIGVTCHSQSVGPDSCYILTAYQAEGNHIKSYVLGVKGADIRDSGDLVHHWVQNVLSEFVMSEIRTVYVTDCRVSTSAFSKAGMCLRCSACALNSVVQSVLSKRTLQARSMHEVIELLNVCEDLAGSTGLAKETFGSLEETSPPPCWNSVTDSLLLVHERYEQICEFYSRAKKMNLIQSLNKHLLSNLAAILTPVKQAVIELSNESQPTLQLVLPTYVRLEKLFTAKANDAGTVSKLCHLFLEALKENFKVHPAHKVAMILDPQQKLRPVPPYQHEEIIGKVCELINEVKESWAEEADFEPAAKKPRSAAVENPAAQEDDRLGKNEVYDYLQEPLFQATPDLFQYWSCVTQKHTKLAKLAFWLLAVPAVGARSGCVNMCEQALLIKRRRLLSPEDMNKLMFLKSNML

SEQ ID NO: 100786 - protein, 560 aa, Homo sapiens
  Payload ID: 20077
  Gene Name: zinc finger protein 619
  Uniprot ID: Q8N2I2
  ENSP ID: ENSP00000322529
MGQPAPYAEGPIQGGDAGELCKCDFLVSISIPQTRSDIPAGARRSSMGPRSLDTCWGRGPERHVHRLECNGVIFTHRNLCLPGGKTKTENEEKTAQLNISKESESHRLIVEGLLMDVPQHPDFKDRLEKSQLHDTGNKTKIGDCTDLTVQDHESSTTEREEIARKLEESSVSTHLITKQGFAKEQVFYKCGECGSYYNPHSDFHLHQRVHTNEKPYTCKECGKTFRYNSKLSRHQKIHTGEKPYSCEECGQAFSQNSHLLQHQKLHGGQRPYECTDCGKTFSYNSKLIRHQRIHTGEKPFKCKECGKAFSCSYDCIIHERIHNGEKPYECKECGKSLSSNSVLIQHQRIHTGEKPYECKECGKAFHRSSVFLQHQRFHTGEQLYKCNECWKTFSCSSRFIVHQRIHNGEKPYECQECGKTFSQKITLVQHQRVHTGEKPYECKECGKAFRWNASFIQHQKWHTRKKLINGTGLSAVKPYCPCAILSPLPPQHTCSALAPPGPPLSSSHAVVLPPSVPFFLLLPSSEKANPSPVQIAHFFQDLAFPGKSSLQSPNPLSHSL

SEQ ID NO: 100787 - protein, 576 aa, Homo sapiens
  Payload ID: 20077
  Gene Name: zinc finger protein 619
  Uniprot ID: Q8N2I2
  ENSP ID: ENSP00000388710
MLQTVWFQGLGRNLLFQEPVTFEDVAVYFTQNEWASLHPTQRALYREVMLENYANVTSLSAFPFPKPDLIFQLEQGEAAWGPDPWTLAGGEALRGMCTGGKTKTENEEKTAQLNISKESESHRLIVEGLLMDVPQHPDFKDRLEKSQLHDTGNKTKIGDCTDLTVQDHESSTTEREEIARKLEESSVSTHLITKQGFAKEQVFYKCGECGSYYNPHSDFHLHQRVHTNEKPYTCKECGKTFRYNSKLSRHQKIHTGEKPYSCEECGQAFSQNSHLLQHQKLHGGQRPYECTDCGKTFSYNSKLIRHQRIHTGEKPFKCKECGKAFSCSYDCIIHERIHNGEKPYECKECGKSLSSNSVLIQHQRIHTGEKPYECKECGKAFHRSSVFLQHQRFHTGEQLYKCNECWKTFSCSSRFIVHQRIHNGEKPYECQECGKTFSQKITLVQHQRVHTGEKPYECKECGKAFRWNASFIQHQKWHTRKKLINGTGLSAVKPYCPCAILSPLPPQHTCSALAPPGPPLSSSHAVVLPPSVPFFLLLPSSEKANPSPVQIAHFFQDLAFPGKSSLQSPNPLSHSL

SEQ ID NO: 100788 - protein, 532 aa, Homo sapiens
  Payload ID: 20077
  Gene Name: zinc finger protein 619
  Uniprot ID: Q8N2I2
  ENSP ID: ENSP00000397232
MKPGVISHAPDSVVPAAFPFPKPDLIFQLEQGEAAWGPDPWTLAGGEALRGMCTGGKTKTENEEKTAQLNISKESESHRLIVEGLLMDVPQHPDFKDRLEKSQLHDTGNKTKIGDCTDLTVQDHESSTTEREEIARKLEESSVSTHLITKQGFAKEQVFYKCGECGSYYNPHSDFHLHQRVHTNEKPYTCKECGKTFRYNSKLSRHQKIHTGEKPYSCEECGQAFSQNSHLLQHQKLHGGQRPYECTDCGKTFSYNSKLIRHQRIHTGEKPFKCKECGKAFSCSYDCIIHERIHNGEKPYECKECGKSLSSNSVLIQHQRIHTGEKPYECKECGKAFHRSSVFLQHQRFHTGEQLYKCNECWKTFSCSSRFIVHQRIHNGEKPYECQECGKTFSQKITLVQHQRVHTGEKPYECKECGKAFRWNASFIQHQKWHTRKKLINGTGLSAVKPYCPCAILSPLPPQHTCSALAPPGPPLSSSHAVVLPPSVPFFLLLPSSEKANPSPVQIAHFFQDLAFPGKSSLQSPNPLSHSL

SEQ ID NO: 100789 - protein, 567 aa, Homo sapiens
  Payload ID: 20077
  Gene Name: zinc finger protein 619
  ENSP ID: ENSP00000398024
MGQPAPYAEGPIQGGDAGELCKCDFLVSISIPQTRSDIPAGARRSSMGPRSLDTCWGRGPERHVHRVSLLLPRLECNGVIFTHRNLCLPGGKTKTENEEKTAQLNISKESESHRLIVEGLLMDVPQHPDFKDRLEKSQLHDTGNKTKIGDCTDLTVQDHESSTTEREEIARKLEESSVSTHLITKQGFAKEQVFYKCGECGSYYNPHSDFHLHQRVHTNEKPYTCKECGKTFRYNSKLSRHQKIHTGEKPYSCEECGQAFSQNSHLLQHQKLHGGQRPYECTDCGKTFSYNSKLIRHQRIHTGEKPFKCKECGKAFSCSYDCIIHERIHNGEKPYECKECGKSLSSNSVLIQHQRIHTGEKPYECKECGKAFHRSSVFLQHQRFHTGEQLYKCNECWKTFSCSSRFIVHQRIHNGEKPYECQECGKTFSQKITLVQHQRVHTGEKPYECKECGKAFRWNASFIQHQKWHTRKKLINGTGLSAVKPYCPCAILSPLPPQHTCSALAPPGPPLSSSHAVVLPPSVPFFLLLPSSEKANPSPVQIAHFFQDLAFPGKSSLQSPNPLSHSL

SEQ ID NO: 100790 - protein, 616 aa, Homo sapiens
  Payload ID: 20077
  Gene Name: zinc finger protein 619
  Uniprot ID: Q8N2I2
  ENSP ID: ENSP00000411132
MLQTVWFQGLGRNLLFQEPVTFEDVAVYFTQNEWASLHPTQRALYREVMLENYANVTSLYPTAGGFPLDTERTEKVPGALSSFLPSSSSLELILALLPMSAFPFPKPDLIFQLEQGEAAWGPDPWTLAGGEALRGMCTGGKTKTENEEKTAQLNISKESESHRLIVEGLLMDVPQHPDFKDRLEKSQLHDTGNKTKIGDCTDLTVQDHESSTTEREEIARKLEESSVSTHLITKQGFAKEQVFYKCGECGSYYNPHSDFHLHQRVHTNEKPYTCKECGKTFRYNSKLSRHQKIHTGEKPYSCEECGQAFSQNSHLLQHQKLHGGQRPYECTDCGKTFSYNSKLIRHQRIHTGEKPFKCKECGKAFSCSYDCIIHERIHNGEKPYECKECGKSLSSNSVLIQHQRIHTGEKPYECKECGKAFHRSSVFLQHQRFHTGEQLYKCNECWKTFSCSSRFIVHQRIHNGEKPYECQECGKTFSQKITLVQHQRVHTGEKPYECKECGKAFRWNASFIQHQKWHTRKKLINGTGLSAVKPYCPCAILSPLPPQHTCSALAPPGPPLSSSHAVVLPPSVPFFLLLPSSEKANPSPVQIAHFFQDLAFPGKSSLQSPNPLSHSL

SEQ ID NO: 100791 - protein, 567 aa, Homo sapiens; identical to SEQ ID NO: 100789
  Payload ID: 20077
  Gene Name: zinc finger protein 619
  ENSP ID: ENSP00000428004

SEQ ID NO: 100792 - protein, 59 aa, Homo sapiens
  Payload ID: 20077
  Gene Name: zinc finger protein 619
  ENSP ID: ENSP00000430574
MLQTVWFQGLGRNLLFQEPVTFEDVAVYFTQNEWASLHPTQRALYREVMLENYANVTSL

SEQ ID NO: 100793 - protein, 616 aa, Homo sapiens; identical to SEQ ID NO: 100790
  Payload ID: 20077
  Gene Name: zinc finger protein 619
  Uniprot ID: Q8N2I2
  ENSP ID: ENSP00000430705

SEQ ID NO: 100794 - protein, 422 aa, Homo sapiens
  Payload ID: 20078
  Gene Name: zinc finger protein 620
  Uniprot ID: Q6ZNG0
  ENSP ID: ENSP00000322265
MFQTAWRQEPVTFEDVAVYFTQNEWASLDSVQRALYREVMLENYANVASLAFPFTTPVLVSQLEQGELPWGLDPWEPMGREALRGICPGDEARTEKEGLTPKDHVSKETESFRLMVGGLPGNVSQHLDFGSSLEQPQGHWIIKTKSKRRHFTDTSARHHEAYEVKNGEKFEKLGKNISVSTQLTTNQTNPSGQISYECGQCGRYFIQMADFHRHEKCHTGEKSFECKECGKYFRYNSLLIRHQIIHTGKKPFKCKECGKGLSSDTALIQHQRIHTGEKPYECKECGKAFSSSSVFLQHQRFHTGEKLYECNECWKTFSCSSSFTVHQRMHTGEKPYECKECGKRLSSNTALTQHQRIHTGEKPFECKECGKAFNQKITLIQHQRVHTGEKPYECKVCGKTFSWCGRFILHQKLHTQKTPVQA

SEQ ID NO: 100795 - protein, 308 aa, Homo sapiens
  Payload ID: 20078
  Gene Name: zinc finger protein 620
  Uniprot ID: Q6ZNG0
  ENSP ID: ENSP00000391472
MVGGLPGNVSQHLDFGSSLEQPQGHWIIKTKSKRRHFTDTSARHHEAYEVKNGEKFEKLGKNISVSTQLTTNQTNPSGQISYECGQCGRYFIQMADFHRHEKCHTGEKSFECKECGKYFRYNSLLIRHQIIHTGKKPFKCKECGKGLSSDTALIQHQRIHTGEKPYECKECGKAFSSSSVFLQHQRFHTGEKLYECNECWKTFSCSSSFTVHQRMHTGEKPYECKECGKRLSSNTALTQHQRIHTGEKPFECKECGKAFNQKITLIQHQRVHTGEKPYECKVCGKTFSWCGRFILHQKLHTQKTPVQA

SEQ ID NO: 100796 - protein, 116 aa, Homo sapiens
  Payload ID: 20078
  Gene Name: zinc finger protein 620
  ENSP ID: ENSP00000406156
MFQTAWRQEPVTFEDVAVYFTQNEWASLDSVQRALYREVMLENYANVASLAFPFTTPVLVSQLEQGELPWGLDPWEPMGREALRGICPGDEARTEKEGLTPKDHVSKETESFRLMV

SEQ ID NO: 100797 - protein, 44 aa, Homo sapiens
  Payload ID: 20078
  Gene Name: zinc finger protein 620
  ENSP ID: ENSP00000406967
MFQTAWRQRQSYSVSQAECSGAITAHCSLHLPGLSDPPKELRLS

SEQ ID NO: 100798 - protein, 157 aa, Homo sapiens
  Payload ID: 20079
  Gene Name: zinc finger protein 621
  Uniprot ID: Q6ZSS3
  ENSP ID: ENSP00000312144
MLQTTWPQESVTFEDVAVYFTQNQWASLDPAQRALYGEVMLENYANVASLVAFPFPKPALISHLERGEAPWGPDPWDTEILRGISQGGESWIKNEGLVIKQEASEETELHRMPVGGLLRNVSQHFDFKRKALKQTFNLNPNLILRGGSVEVRSLRPA

SEQ ID NO: 100799 - protein, 439 aa, Homo sapiens
  Payload ID: 20079
  Gene Name: zinc finger protein 621
  Uniprot ID: Q6ZSS3
  ENSP ID: ENSP00000340841
MLQTTWPQESVTFEDVAVYFTQNQWASLDPAQRALYGEVMLENYANVASLVAFPFPKPALISHLERGEAPWGPDPWDTEILRGISQGGESWIKNEGLVIKQEASEETELHRMPVGGLLRNVSQHFDFKRKALKQTFNLNPNLILRGGMKFYECKECGKIFRYNSKLIRHQMSHTGEKPFKCKECGKAFKSSYDCIVHEKNHIGEGPYECKECGKGLSSNTALTQHQRIHTGEKPYECKECGKAFRRSAAYLQHQRLHTGEKLYKCKECWKAFGCRSLFIVHQRIHTGEKPYQCKECGKAFTQKIASIQHQRVHTGEKPYECKVCGKAFKWYGSFVQHQKLHPVEKKPVKVLGPSLVSPQCSSPAIPPVLLQGSCSASAVAVPSLTFPHAVLIPTSGNFFMLLPTSGIPSSSAQIVRVFQGLTPTVKPSPVILTPSSHSS

SEQ ID NO: 100800 - protein, 439 aa, Homo sapiens; identical to SEQ ID NO: 100799
  Payload ID: 20079
  Gene Name: zinc finger protein 621
  Uniprot ID: Q6ZSS3
  ENSP ID: ENSP00000386051

SEQ ID NO: 100801 - protein, 152 aa, Homo sapiens
  Payload ID: 20079
  Gene Name: zinc finger protein 621
  ENSP ID: ENSP00000408779
MLQTTWPQESVTFEDVAVYFTQNQWASLDPAQRALYGEVMLENYANVASLVAFPFPKPALISHLERGEAPWGPDPWDTEILRGISQGGESWIKNEGLVIKQEASEETELHRMPVGGLLRNVSQHFDFKRKALKQTFNLNPNLILRGGMKFYE

SEQ ID NO: 100802 - protein, 328 aa, Homo sapiens
  Payload ID: 20079
  Gene Name: zinc finger protein 621
  ENSP ID: ENSP00000413236
MPVGGLLRNVSQHFDFKRKALKQTFNLNPNLILRGGMKFYECKECGKIFRYNSKLIRHQMSHTGEKPFKCKECGKAFKSSYDCIVHEKNHIGEGPYECKECGKGLSSNTALTQHQRIHTGEKPYECKECGKAFRRSAAYLQHQRLHTGEKLYKCKECWKAFGCRSLFIVHQRIHTGEKPYQCKECGKAFTQKIASIQHQRVHTGEKPYECKVCGKAFKWYGSFVQHQKLHPVEKKPVKVLGPSLVSPQCSSPAIPPVLLQGSCSASAVAVPSLTFPHAVLIPTSGNFFMLLPTSGIPSSSAQIVRVFQGLTPTVKPSPVILTPSSHSS

SEQ ID NO: 100803 - protein, 477 aa, Homo sapiens
  Payload ID: 20080
  Gene Name: zinc finger protein 622
  Uniprot ID: Q969S3
  ENSP ID: ENSP00000310042
MATYTCITCRVAFRDADMQRAHYKTDWHRYNLRRKVASMAPVTAEGFQERVRAQRAVAEEESKGSATYCTVCSKKFASFNAYENHLKSRRHVELEKKAVQAVNRKVEMMNEKNLEKGLGVDSVDKDAMNAAIQQAIKAQPSMSPKKAPPAPAKEARNVVAVGTGGRGTHDRDPSEKPPRLQWFEQQAKKLAKQQEEDSEEEEEDLDGDDWEDIDSDEELECEDTEAMDDVVEQDAEEEEAEEGPPLGAIPITDCLFCSHHSSSLMKNVAHMTKDHSFFIPDIEYLSDIKGLIKYLGEKVGVGKICLWCNEKGKSFYSTEAVQAHMNDKSHCKLFTDGDAALEFADFYDFRSSYPDHKEGEDPNKAEELPSEKNLEYDDETMELILPSGARVGHRSLMRYYKQRFGLSRAVAVAKNRKAVGRVLQQYRALGWTGSTGAALMRERDMQYVQRMKSKWMLKTGMKNNATKQMHFRVQVRF

SEQ ID NO: 100804 - protein, 496 aa, Homo sapiens
  Payload ID: 20081
  Gene Name: zinc finger protein 623
  ENSP ID: ENSP00000411139
MELPSPESEEVHEPRLGELLGNPEGQSLGSSPSQDRGCKQVTVTHWKIQTGETAQVCTKSGRNHILNSDLLLLQRELIEGEANPCDICGKTFTFNSDLVRHRISHAGEKPYTCDQCGKGFGQSSHLMEHQRIHTGERLYVCNVCGKDFIHYSGLIEHQRVHSGEKPFKCAQCGKAFCHSSDLIRHQRVHTRERPFECKECGKGFSQSSLLIRHQRIHTGERPYECNECGKSFIRSSSLIRHYQIHTEVKQYECKECGKAFRHRSDLIEHQRIHTGERPFECNECGKAFIRSSKLIQHQRIHTGERPYVCNECGKRFSQTSNFTQHQRIHTGEKLYECNECGKAFFLSSYLIRHQKIHTGERVYECKECGKAFLQKAHLTEHQKIHSGDRPFECKDCGKAFIQSSKLLLHQIIHTGEKPYVCSYCGKGFIQRSNFLQHQKIHTEEKLYECSQYGRDFNSTTNVKNNQRVHQEGLSLSKAPIHLGERSVDKGEHTGNL

SEQ ID NO: 100805 - protein, 496 aa, Homo sapiens; identical to SEQ ID NO: 100804
  Payload ID: 20081
  Gene Name: zinc finger protein 623
  ENSP ID: ENSP00000435232

SEQ ID NO: 100806 - protein, 536 aa, Homo sapiens
  Payload ID: 20081
  Gene Name: zinc finger protein 623
  Uniprot ID: O75123
  ENSP ID: ENSP00000445979
MILLSFVSDSNVGTGEKKVTEAWISEDENSHRTTSDRLTVMELPSPESEEVHEPRLGELLGNPEGQSLGSSPSQDRGCKQVTVTHWKIQTGETAQVCTKSGRNHILNSDLLLLQRELIEGEANPCDICGKTFTFNSDLVRHRISHAGEKPYTCDQCGKGFGQSSHLMEHQRIHTGERLYVCNVCGKDFIHYSGLIEHQRVHSGEKPFKCAQCGKAFCHSSDLIRHQRVHTRERPFECKECGKGFSQSSLLIRHQRIHTGERPYECNECGKSFIRSSSLIRHYQIHTEVKQYECKECGKAFRHRSDLIEHQRIHTGERPFECNECGKAFIRSSKLIQHQRIHTGERPYVCNECGKRFSQTSNFTQHQRIHTGEKLYECNECGKAFFLSSYLIRHQKIHTGERVYECKECGKAFLQKAHLTEHQKIHSGDRPFECKDCGKAFIQSSKLLLHQIIHTGEKPYVCSYCGKGFIQRSNFLQHQKIHTEEKLYECSQYGRDFNSTTNVKNNQRVHQEGLSLSKAPIHLGERSVDKGEHTGNL

SEQ ID NO: 100807 - protein, 496 aa, Homo sapiens; identical to SEQ ID NO: 100804
  Payload ID: 20081
  Gene Name: zinc finger protein 623
  ENSP ID: ENSP00000481049

SEQ ID NO: 100808 - protein, 496 aa, Homo sapiens; identical to SEQ ID NO: 100804
  Payload ID: 20081
  Gene Name: zinc finger protein 623
  ENSP ID: ENSP00000484164

SEQ ID NO: 100809 - protein, 536 aa, Homo sapiens; identical to SEQ ID NO: 100806
  Payload ID: 20081
  Gene Name: zinc finger protein 623
  ENSP ID: ENSP00000487869

SEQ ID NO: 100810 - protein, 865 aa, Homo sapiens
  Payload ID: 20082
  Gene Name: zinc finger protein 624
  Uniprot ID: Q9P2J8
  ENSP ID: ENSP00000310472
MSLQDSTLSREGKPEGEIMAAVFFSVGRLSPEVTQPDEDLHLQAEETQLVKESVTFKDVAIDFTLEEWRLMDPTQRNLHKDVMLENYRNLVSLGLAVSKPDMISHLENGKGPWVTVREISRIPYPDMEPKPATKKATRTKAISEDLSQEAILEKLTENGLWDSRMEGLWKWNDRILRLQNNQENHLSQRIIPLKKTPTSQRGFRFESILIPEPGIATEELHSRCQTQEENFTENLNLITDTHLGKIICKEMKGSKAIRQTSELTLGKKSNNKEKPYKCSTCEKAFHYRSLLIQHQRTHTKEKPYECNECGKTFSQPSYLSQHKKIHTGEKPYKCNECGKAFIASSSLMVHQRIHTKEKPYQCNVCGKSFSQCARLNQHQRIQTGEKPYKCSECGKAFSDKSKLARHQETHNGEKPYKCDDCGKAFRNKSYLSVHQKTHTEEKPYQCNECGKSFKNTTIFNVHQRIHTGEKPFRCNECGKAYRSNSSLIVHIRTHTGEKPYECNECGKAFNRIANFTEHQRIHTGEKPYKCNECGKAFINYSCLTVHHRMHTGEKPYKCTECGKAFMRSSSLIIHQRIHTEEKPYLCNECGESFRIKSHLTVHQRIHTGEKPYKCTDCERAFTKMVNLKEHQKIHTGVKPYKCYDCGKSFRTKSYLIVHQRTHTGEKPYKCNECEKAFTNTSQLTVHQRRHTGEKPYKCNECGKVFTSNSGFNTHQRTHTGEKPFKCNDCGKAFSQMVHVTEHQKIHSGEKPYKCDVCGKAFRRGSYLTVHWRTHTGEKPYTCKECGKGCITLSQLTLHQRIHTGERPYKCEECGKAFRTNSDFTVHLRMHTGEKPYKCNECGKAFRSSSSLTVHQRIHQRETQLI

SEQ ID NO: 100811 - protein, 110 aa, Homo sapiens
  Payload ID: 20082
  Gene Name: zinc finger protein 624
  ENSP ID: ENSP00000406525
MSLQDSTLSREGKPEGEIMAAVFFSVGRLSPEVTQPDEDLHLQAEETQLVKESVTFKDVAIDFTLEEWRLMDPTQRNLHKDVMLENYRNLVSLGLAVSKPDMISHLENGK

SEQ ID NO: 100812 - protein, 125 aa, Homo sapiens
  Payload ID: 20082
  Gene Name: zinc finger protein 624
  ENSP ID: ENSP00000463295
MSLQDSTLSREGKPEGEIMAAVFFSVGRLSPEVTQPDEDLHLQAEETQLVKESVTFKDVAIDFTLEEWRLMDPTQRNLHKDVMLENYRNLVSLGLAVSKPDMISHLENGKGPWVTVREISRIPYP

SEQ ID NO: 100813 - protein, 372 aa, Homo sapiens
  Payload ID: 20083
  Gene Name: zinc finger protein 625
  Uniprot ID: Q96I27
  ENSP ID: ENSP00000394380
MDSVVFEDVDVNFTQEEWALLDPSQKNLYRDVMQETFRNLASVGKKWKDQKIEDEYKNPRRNLRGLMGERLLESKKDHQHGEILTQVPDDMLKKKTPRVKSCGEVSVGHASLNRHHRADTGHKPYEYQEYGQKPYKCTYCKKAFSDLPYFRTHEWAHTGGKPYDCEECGKSFISRSSIRRHRIMHSGDGPYKCNFCGKALMCLSLYLIHKRTHTGEKPYECKQCGKAFSHSGSLRIHERTHTGEKPYECSECGKAFHSSTCLHAHKITHTGEKPYECKQCGKAFVSFNSVRYHERTHTGEKPYECKQCGKAFRSASHLRTHGRTHTGEKPYECKQCGKAFGCASSVKIHERTHTGEKPCSSNTSKGQGEKIA

SEQ ID NO: 100814 - protein, 61 aa, Homo sapiens
  Payload ID: 20083
  Gene Name: zinc finger protein 625
  ENSP ID: ENSP00000398518
MDSVVFEDVDVNFTQEEWALLDPSQKNLYRDVMQETFRNLASEKNGKIRKLKMSTKIPGET

SEQ ID NO: 100815 - protein, 104 aa, Homo sapiens
  Payload ID: 20083
  Gene Name: zinc finger protein 625
  ENSP ID: ENSP00000405156
DSVVFEDVDVNFTQEEWALLDPSQKNLYRDVMQETFRNLASVGKKWKDQKIEDEYKNPRRNLSLRKWSWSLYARQTLGLDSPSVAPKRTHGQMNPSTNSPATSR

SEQ ID NO: 100816 - protein, 92 aa, Homo sapiens
  Payload ID: 20084
  Gene Name: zinc finger protein 626
  Uniprot ID: Q68DY1
  ENSP ID: ENSP00000291750
MGPLQFRDVAIEFSLEEWHCLDTAQRNLYRNVMLENYSNLVFLGITVSKPDLITCLEQGRKPLTMKRNEMIAKPSVSFLQVHSESQSPLHDI

SEQ ID NO: 100817 - protein, 135 aa, Homo sapiens
  Payload ID: 20084
  Gene Name: zinc finger protein 626
  ENSP ID: ENSP00000469566
MCSHFAQDLWPEQSMKDSFQKVVLRRYEKCEHDNLQLKKGCISVDECKVHKEGYNELNQCLTTTPRKICQCDKYVKVLHQFPNSNGQKRGHTGKKPFKYIECGKAFKQFSTLTTHKKIHTGGKPYKCEECGKAFN

SEQ ID NO: 100818 - protein, 528 aa, Homo sapiens
  Payload ID: 20084
  Gene Name: zinc finger protein 626
  Uniprot ID: Q68DY1
  ENSP ID: ENSP00000469958
MGPLQFRDVAIEFSLEEWHCLDTAQRNLYRNVMLENYSNLVFLGITVSKPDLITCLEQGRKPLTMKRNEMIAKPSVMCSHFAQDLWPEQSMKDSFQKVVLRRYEKCEHDNLQLKKGCISVDECKVHKEGYNELNQCLTTTPRKICQCDKYVKVLHQFPNSNGQKRGHTGKKPFKYIECGKAFKQFSTLTTHKKIHTGGKPYKCEECGKAFNHSCSLTRHKKIHTGEKPYKCEECGKAFKHSSTLTTHKRNHTGEKPYKCDKCGKAFMSSSTLSKHEIIHTEKKPYKCEECGKAFNRSSTLTTHKIIHTGEKPYKCEECDKAFKYSYTLTTHKRIHTEDKPYKCEECGKAFKYSSTLTTHKRIHTGEKPYKCEECGKAFKRSSDLTTHKIIHTGEKPYKCEECGKAFKYSSNLTTHKKIHTGERPYKCEECGKAFNQSSILTTHRRIHTGEKFYKCEECGKAFKCSSNLTTHKKIHTGERPYKCEECGKAFNQSSILTTHERIILERNSTNVKNVAKPSSGPHTLLHIR

SEQ ID NO: 100819 - protein, 540 aa, Homo sapiens
  Payload ID: 20084
  Gene Name: zinc finger protein 626
  ENSP ID: ENSP00000484232
MGPLQFRDVAIEFSLEEWHCLDTAQRNLYRNVMLENYSNLVFLGITVSKPDLITCLEQGRKPLTMKRNEMIAKPSVMCSHFAQDLWPEQSMKDSFQKVVLRRYEKCEHDNLQLKKGCISVDECKVHKEGYNELNQCLTTTPRKICQCDKYVKVLHQFPNSNGQKRGHTGKKPFKYIECGKAFKQFSTLTTHKKIHTGGKPYKCEECGKAFNHSCSLTRHKKIHTGEKPYKCEECGKAFKHSSTLTTHKRNHTGEKPYKCDKCGKAFMSSSTLSKHEIIHTEKKPYKCEECGKAFNRSSTLTTHKIIHTGEKPYKCEECDKAFKYSYTLTTHKRIHTEDKPYKCEECGKAFKYSSTLTTHKRIHTGEKPYKCEECGKAFKRSSDLTTHKIIHTGEKPYKCEECGKAFKYSSNLTTHKKIHTGERPYKCEECGKAFNQSSILTTHRRIHTGEKFYKCEECGKAFKRSSHLTTHKIIHTGEKFYKCEECDKAFKHFSNLTTHKKIHTGKKPYRCEECGKAFKHSSKLTTHKRFHTGEKPYRCE

SEQ ID NO: 100820 - protein, 461 aa, Homo sapiens
  Payload ID: 20085
  Gene Name: zinc finger protein 627
  Uniprot ID: Q7L945
  ENSP ID: ENSP00000354414
MDSVAFEDVAVNFTLEEWALLDPSQKNLYRDVMRETFRNLASVGKQWEDQNIEDPFKIPRRNISHIPERLCESKEGGQGEETFSQIPDGILNKKTPGVKPCESSVCGEVGMGPSSLNRHIRDHTGREPNEYQEYGKKSYTRNQCGRALSYHRSFPVRERTHPGGKPYDCKECGETFISLVSIRRHMLTHRGGVPYKCKVCGKAFDYPSLFRIHERSHTGEKPYECKQCGKAFSCSSYIRIHERTHTGDKPYECKQCGKAFSCSKYIRIHERTHTGEKPYECKQCGKAFRCASSVRSHERTHTGEKLFECKECGKALTCLASVRRHMIKHTGNGPYKCKVCGKAFDFPSSFRIHERTHTGEKPYDCKQCGKAFSCSSSFRKHERIHTGEKPYKCTKCGKAFSRSSYFRIHERTHTGEKPYECKQCGKAFSRSTYFRVHEKIHTGEKPYENPNPNASVVPVLS

SEQ ID NO: 100821 - protein, 17 aa, Homo sapiens
  Payload ID: 20085
  Gene Name: zinc finger protein 627
  ENSP ID: ENSP00000464997
MRETFRNLASVGKQWED

SEQ ID NO: 100822 - protein, 67 aa, Homo sapiens
  Payload ID: 20085
  Gene Name: zinc finger protein 627
  ENSP ID: ENSP00000465841
MDSVAFEDVAVNFTLEEWALLDPSQKNLYRDVMRETFRNLASVGKQWEDQNIEDPFKIPRRNIRETL

SEQ ID NO: 100823 - protein, 58 aa, Homo sapiens
  Payload ID: 20085
  Gene Name: zinc finger protein 627
  ENSP ID: ENSP00000466068
MRETFRNLASVGKQWEDQNIEDPFKIPRRNISHIPERLCESKEGGQGEETFSQIPDGI

SEQ ID NO: 100824 - protein, 1058 aa, Homo sapiens [sequence omitted]

SEQ ID NO: 100825 - protein, 101 aa, Homo sapiens
  Payload ID: 20086
  Gene Name: zinc finger protein 628
  ENSP ID: ENSP00000465905
MVGSHADMAPASTAEGAGEKPGPAAPAPAAQYECGECGKSFRWSSRLLHHQRTHTGERPYKCPDCPKAFKGSSALLYHQRGHTGERPYQCPDCPKAFKRSS

SEQ ID NO: 100826 - protein, 1059 aa, Homo sapiens
  Payload ID: 20086
  Gene Name: zinc finger protein 628
  Uniprot ID: Q5EBL2
  ENSP ID: ENSP00000469591
MSGVMVGSHADMAPASTAEGAGEKPGPAAPAPAAQYECGECGKSFRWSSRLLHHQRTHTGERPYKCPDCPKAFKGSSALLYHQRGHTGERPYQCPDCPKAFKRSSLLQIHRSVHTGLRAFICGQCGLAFKWSSHYQYHLRQHTGERPYPCPDCPKAFKNSSSLRRHRHVHTGERPYTCGVCGKSFTQSTNLRQHQRVHTGERPFRCPLCPKTFTHSSNLLLHQRTHGAAPAPGTASAAPPPQSREPGKVFVCDAYLQRHLQPHSPPAPPAPPPPPPPVVPELFLAAAETTVELVYRCDGCEQGFSSEELLLEHQPCPGPDAAPQPQEAPAEAPKADQPPSPLPQPPPPAAAPAPGFACLPCGKSFRTVAGLSRHQHSHGAAGGQAFRCGSCDGSFPQLASLLAHQQCHVEEAAAGRPPPQAEAAEVTCPQEPLAPAAPVPPPPPSAPASAERPYKCAECGKSFKGSSGLRYHLRDHTGERPYQCGECGKAFKRSSLLAIHQRVHTGLRAFTCGQCGLTFKWSSHYQYHLRLHSGERPYACGECGKAFRNTSCLRRHRHVHTGERPHACGVCGKSFAQTSNLRQHQRVHTGERPFRCPLCPKTFTHSSNLLLHQRTHSAERPFTCPICGRGFVMAAYLQRHLRTHAPANTPPSTTAPAAGPQPPAPLAAARAPPATQDVHVLPHLQATLSLEVAGGTAQAPSLGPAAPNSQTFLLVQTAQGLQLIPSSVQPPTPPPPPAPPKLILLPSSSAGAGGGRARQGPRAVGKAGQGAGVVWLPGPGGLGVQGAASAGASGTGQSLIVLQNVGGGEAGPQEMSGVQLQPLRPAPEVTTVQLQPAQEVTTVQLQPAQEVTTVQLQPAQEVTTVQLQPVAGQLSNSSGGAVATEAPNLLVVQSGAAEELLTGPGPGEAGDGEASTGVVQDVLFETLQTDEGLQSVLVLSGADGEQTRLCVQEVETLPPGLTEPPATGPPGQKLLIIRSAPATELLDSSNTGGGTATLQLLAPPPSGPASGPAGLPGAPASQMVQVVPAGAGPGVMTPQGLPSIQIVQTLPAVQLVHTF

SEQ ID NO: 100827 - protein, 869 aa, Homo sapiens
  Payload ID: 20087
  Gene Name: zinc finger protein 629
  Uniprot ID: Q9UEG4
  ENSP ID: ENSP00000262525
MEPETALWGPDLQGPEQSPNDAHRGAESENEEESPRQESSGEEIIMGDPAQSPESKDSTEMSLERSSQDPSVPQNPPTPLGHSNPLDHQIPLDPPAPEVVPTPSDWTKACEASWQWGALTTWNSPPVVPANEPSLRELVQGRPAGAEKPYICNECGKSFSQWSKLLRHQRIHTGERPNTCSECGKSFTQSSHLVQHQRTHTGEKPYKCPDCGKCFSWSSNLVQHQRTHTGEKPYKCTECEKAFTQSTNLIKHQRSHTGEKPYKCGECRRAFYRSSDLIQHQATHTGEKPYKCPECGKRFGQNHNLLKHQKIHAGEKPYRCTECGKSFIQSSELTQHQRTHTGEKPYECLECGKSFGHSSTLIKHQRTHLREDPFKCPVCGKTFTLSATLLRHQRTHTGERPYKCPECGKSFSVSSNLINHQRIHRGERPYICADCGKSFIMSSTLIRHQRIHTGEKPYKCSDCGKSFIRSSHLIQHRRTHTGEKPYKCPECGKSFSQSSNLITHVRTHMDENLFVCSDCGKAFLEAHELEQHRVIHERGKTPARRAQGDSLLGLGDPSLLTPPPGAKPHKCLVCGKGFNDEGIFMQHQRIHIGENPYKNADGLIAHAAPKPPQLRSPRLPFRGNSYPGAAEGRAEAPGQPLKPPEGQEGFSQRRGLLSSKTYICSHCGESFLDRSVLLQHQLTHGNEKPFLFPDYRIGLGEGAGPSPFLSGKPFKCPECKQSFGLSSELLLHQKVHAGGKSSQKSPELGKSSSVLLEHLRSPLGARPYRCSDCRASFLDRVALTRHQETHTQEKPPNPEDPPPEAVTLSTDQEGEGETPTPTESSSHGEGQNPKTLVEEKPYLCPECGAGFTEVAALLLHRSCHPGVSL

SEQ ID NO: 100828 - protein, 533 aa, Homo sapiens
  Payload ID: 20088
  Gene Name: zinc finger protein 630
  ENSP ID: ENSP00000354683
MDRYQGNQDRVLRQVTVISRETLTDEMGSKYSAFGKMFNRCTDLAPLSQKFHKFDSCENSLKSNSDLLNYNRSYARKNPTKRFRCGRPPKYNASCSVPEKEGFIHTGMEPYGDSQCEKVLSHKQAHVQYKKFQAREKPNVCSMCGKAFIKKSQLIIHQRIHTGEKPYVCGDCRKAFSEKSHLIVHQRIHTGEKPYECTKYGRAFSRKSPFTVHQRVHTGEKPYECFECPKAFSQKSHLIIHQRVHTREKPFECSECRKAFCEMSHLFIHQITHTGKKPYECTECGKTFPRKTQLIIHQRTHTGEKPYKCGECGKTFCQQSHLIGHQRIHTGEKPYVCTDCGKAFSQKSHLTGHQRLHTGEKPYMCTECGKSFSQKSPLIIHQRIHTGEKPYQCGECGKTFSQKSLLIIHLRVHTGEKPYECTECGRAFSLKSHLILHQRGHTGEKPYECSECGKAFCGKSPLIIHQKTHPREKTPECAESGMTFFWKSQMITYQRRHTGEKPSRCSDCGKAFCQHVYFTGHQNPYRKDTLYIC

SEQ ID NO: 100829 - protein, 657 aa, Homo sapiens
  Payload ID: 20088
  Gene Name: zinc finger protein 630
  Uniprot ID: Q2M218
  ENSP ID: ENSP00000386393
MIESQEPVTFEDVAVDFTQEEWQQLNPAQKTLHRDVMLETYNHLVSVGCSGIKPDVIFKLEHGKDPWIIESELSRWIYPDRVKGLESSQQIISGELLFQREILERAPKDNSLYSVLKIWHIDNQMDRYQGNQDRVLRQVTVISRETLTDEMGSKYSAFGKMFNRCTDLAPLSQKFHKFDSCENSLKSNSDLLNYNRSYARKNPTKRFRCGRPPKYNASCSVPEKEGFIHTGMEPYGDSQCEKVLSHKQAHVQYKKFQAREKPNVCSMCGKAFIKKSQLIIHQRIHTGEKPYVCGDCRKAFSEKSHLIVHQRIHTGEKPYECTKYGRAFSRKSPFTVHQRVHTGEKPYECFECPKAFSQKSHLIIHQRVHTREKPFECSECRKAFCEMSHLFIHQITHTGKKPYECTECGKTFPRKTQLIIHQRTHTGEKPYKCGECGKTFCQQSHLIGHQRIHTGEKPYVCTDCGKAFSQKSHLTGHQRLHTGEKPYMCTECGKSFSQKSPLIIHQRIHTGEKPYQCGECGKTFSQKSLLIIHLRVHTGEKPYECTECGRAFSLKSHLILHQRGHTGEKPYECSECGKAFCGKSPLIIHQKTHPREKTPECAESGMTFFWKSQMITYQRRHTGEKPSRCSDCGKAFCQHVYFTGHQNPYRKDTLYIC

SEQ ID NO: 100830 - protein, 657 aa, Homo sapiens; identical to SEQ ID NO: 100829
  Payload ID: 20088
  Gene Name: zinc finger protein 630
  Uniprot ID: Q2M218
  ENSP ID: ENSP00000393163

SEQ ID NO: 100831 - protein, 88 aa, Homo sapiens
  Payload ID: 20088
  Gene Name: zinc finger protein 630
  ENSP ID: ENSP00000400030
MIESQEPVTFEDVAVDFTQEEWQQLNPAQKTLHRDVMLETYNHLVSVGCSGIKPDVIFKLEHGKDPWIIESELSRWIYPGIFGLCILI

SEQ ID NO: 100832 - protein, 214 aa, Homo sapiens
  Payload ID: 20088
  Gene Name: zinc finger protein 630
  ENSP ID: ENSP00000407278
MIESQEPVTFEDVAVDFTQEEWQQLNPAQKTLHRDVMLETYNHLVSVGCSGIKPDVIFKLEHGKDPWIIESELSRWIYPDRVKGLESSQQIISGELLFQREILERAPKDNSLYSVLKIWHIDNQMDRYQGNQDRVLRQVTVISRETLTDEMGSKYSAFGKMFNRCTDLAPLSQKFHKFDSCENSLKSNSDLLNYNRSYARKNPTKRFRCGRPPK

SEQ ID NO: 100833 - protein, 40 aa, Homo sapiens
  Payload ID: 20088
  Gene Name: zinc finger protein 630
  ENSP ID: ENSP00000408054
MDRYQGNQDRVLRQVTVISRETLTDEMGSKYSAFGKMFNR

SEQ ID NO: 100834 - protein, 643 aa, Homo sapiens
  Payload ID: 20088
  Gene Name: zinc finger protein 630
  ENSP ID: ENSP00000480858
MVEGEEEWQQLNPAQKTLHRDVMLETYNHLVSVGCSGIKPDVIFKLEHGKDPWIIESELSRWIYPDRVKGLESSQQIISGELLFQREILERAPKDNSLYSVLKIWHIDNQMDRYQGNQDRVLRQVTVISRETLTDEMGSKYSAFGKMFNRCTDLAPLSQKFHKFDSCENSLKSNSDLLNYNRSYARKNPTKRFRCGRPPKYNASCSVPEKEGFIHTGMEPYGDSQCEKVLSHKQAHVQYKKFQAREKPNVCSMCGKAFIKKSQLIIHQRIHTGEKPYVCGDCRKAFSEKSHLIVHQRIHTGEKPYECTKYGRAFSRKSPFTVHQRVHTGEKPYECFECPKAFSQKSHLIIHQRVHTREKPFECSECRKAFCEMSHLFIHQITHTGKKPYECTECGKTFPRKTQLIIHQRTHTGEKPYKCGECGKTFCQQSHLIGHQRIHTGEKPYVCTDCGKAFSQKSHLTGHQRLHTGEKPYMCTECGKSFSQKSPLIIHQRIHTGEKPYQCGECGKTFSQKSLLIIHLRVHTGEKPYECTECGRAFSLKSHLILHQRGHTGEKPYECSECGKAFCGKSPLIIHQKTHPREKTPECAESGMTFFWKSQMITYQRRHTGEKPSRCSDCGKAFCQHVYFTGHQNPYRKDTLYIC

SEQ ID NO: 100835 - protein, 200 aa, Homo sapiens
  Payload ID: 20088
  Gene Name: zinc finger protein 630
  ENSP ID: ENSP00000485938
MIESQEEWQQLNPAQKTLHRDVMLETYNHLVSVGCSGIKPDVIFKLEHGKDPWIIESELSRWIYPDRVKGLESSQQIISGELLFQREILERAPKDNSLYSVLKIWHIDNQMDRYQGNQDRVLRQVTVISRETLTDEMGSKYSAFGKMFNRCTDLAPLSQKFHKFDSCENSLKSNSDLLNYNRSYARKNPTKRFRCGRPPK

SEQ ID NO: 100836 - protein, 1978 aa, Homo sapiens
  Payload ID: 20089
  Gene Name: zinc finger protein 638
  Uniprot ID: Q14966
  ENSP ID: ENSP00000264447
MSRPRFNPRGDFPLQRPRAPNPSGMRPPGPFMRPGSMGLPRFYPAGRARGIPHRFAGHESYQNMGPQRMNVQVTQHRTDPRLTKEKLDFHEAQQKKGKPHGSRWDDEPHISASVAVKQSSVTQVTEQSPKVQSRYTKESASSILASFGLSNEDLEELSRYPDEQLTPENMPLILRDIRMRKMGRRLPNLPSQSRNKETLGSEAVSSNVIDYGHASKYGYTEDPLEVRIYDPEIPTDEVENEFQSQQNISASVPNPNVICNSMFPVEDVFRQMDFPGESSNNRSFFSVESGTKMSGLHISGGQSVLEPIKSVNQSINQTVSQTMSQSLIPPSMNQQPFSSELISSVSQQERIPHEPVINSSNVHVGSRGSKKNYQSQADIPIRSPFGIVKASWLPKFSHADAQKMKRLPTPSMMNDYYAASPRIFPHLCSLCNVECSHLKDWIQHQNTSTHIESCRQLRQQYPDWNPEILPSRRNEGNRKENETPRRRSHSPSPRRSRRSSSSHRFRRSRSPMHYMYRPRSRSPRICHRFISRYRSRSRSRSPYRIRNPFRGSPKCFRSVSPERMSRRSVRSSDRKKALEDVVQRSGHGTEFNKQKHLEAADKGHSPAQKPKTSSGTKPSVKPTSATKSDSNLGGHSIRCKSKNLEDDTLSECKQVSDKAVSLQRKLRKEQSLHYGSVLLITELPEDGCTEEDVRKLFQPFGKVNDVLIVPYRKEAYLEMEFKEAITAIMKYIETTPLTIKGKSVKICVPGKKKAQNKEVKKKTLESKKVSASTLKRDADASKAVEIVTSTSAAKTGQAKASVAKVNKSTGKSASSVKSVVTVAVKGNKASIKTAKSGGKKSLEAKKTGNVKNKDSNKPVTIPENSEIKTSIEVKATENCAKEAISDAALEATENEPLNKETEEMCVMLVSNLPNKGYSVEEVYDLAKPFGGLKDILILSSHKKAYIEINRKAAESMVKFYTCFPVLMDGNQLSISMAPENMNIKDEEAIFITLVKENDPEANIDTIYDRFVHLDNLPEDGLQCVLCVGLQFGKVDHHVFISNRNKAILQLDSPESAQSMYSFLKQNPQNIGDHMLTCSLSPKIDLPEVQIEHDPELEKESPGLKNSPIDESEVQTATDSPSVKPNELEEESTPSIQTETLVQQEEPCEEEAEKATCDSDFAVETLELETQGEEVKEEIPLVASASVSIEQFTENAEECALNQQMFNSDLEKKGAEIINPKTALLPSDSVFAEERNLKGILEESPSEAEDFISGITQTMVEAVAEVEKNETVSEILPSTCIVTLVPGIPTGDEKTVDKKNISEKKGNMDEKEEKEFNTKETRMDLQIGTEKAEKNEGRMDAEKVEKMAAMKEKPAENTLFKAYPNKGVGQANKPDETSKTSILAVSDVSSSKPSIKAVIVSSPKAKATVSKTENQKSFPKSVPRDQINAEKKLSAKEFGLLKPTSARSGLAESSSKFKPTQSSLTRGGSGRISALQGKLSKLDYRDITKQSQETEARPSIMKRDDSNNKTLAEQNTKNPKSTTGRSSKSKEEPLFPFNLDEFVTVDEVIEEVNPSQAKQNPLKGKRKETLKNVPFSELNLKKKKGKTSTPRGVEGELSFVTLDEIGEEEDAAAHLAQALVTVDEVIDEEELNMEEMVKNSNSLFTLDELIDQDDCISHSEPKDVTVLSVAEEQDLLKQERLVTVDEIGEVEELPLNESADITFATLNTKGNEGDTVRDSIGFISSQVPEDPSTLVTVDEIQDDSSDLHLVTLDEVTEEDEDSLADFNNLKEELNFVTVDEVGEEEDGDNDLKVELAQSKNDHPTDKKGNRKKRAVDTKKTKLESLSQVGPVNENVMEEDLKTMIERHLTAKTPTKRVRIGKTLPSEKAVVTEPAKGEEAFQMSEVDEESGLKDSEPERKRKKTEDSSSGKSVASDVPEELDFLVPKAGFFCPICSLFYSGEKAMTNHCKSTRHKQNTEKFMAKQRKEKEQNEAEERSSR

SEQ ID NO: 100837 - protein, 1978 aa, Homo sapiens; identical to SEQ ID NO: 100836
  Payload ID: 20089
  Gene Name: zinc finger protein 638
  Uniprot ID: Q14966
  ENSP ID: ENSP00000386433

SEQ ID NO: 100838 - protein, 197 aa, Homo sapiens
  Payload ID: 20089
  Gene Name: zinc finger protein 638
  ENSP ID: ENSP00000388164
MSRPRFNPRGDFPLQRPRAPNPSGMRPPGPFMRPGSMGLPRFYPAGRARGIPHRFAGHESYQNMGPQRMNVQVTQHRTDPRLTKEKLDFHEAQQKKGKPHGSRWDDEPHISASVAVKQSSVTQVTEQSPKVQSRYTKESASSILASFGLSNEDLEELSRYPDEQLTPENMPLILRDIRMRKMGRRLPNLPSQSRNKE

SEQ ID NO: 100839 - protein, 29 aa, Homo sapiens
  Payload ID: 20089
  Gene Name: zinc finger protein 638
  ENSP ID: ENSP00000396909
MSRPRFNPRGDFPLQRPRAPNPSGMRPPG

SEQ ID NO: 100840 - protein, 62 aa, Homo sapiens
  Payload ID: 20089
  Gene Name: zinc finger protein 638
  ENSP ID: ENSP00000402875
MSRPRFNPRGDFPLQRPRAPNPSGMRPPGPFMRPGSMGLPRFYPAGRARGIPHRFAGHESYQ

SEQ ID NO: 100841 - protein, 62 aa, Homo sapiens; identical to SEQ ID NO: 100840
  Payload ID: 20089
  Gene Name: zinc finger protein 638
  ENSP ID: ENSP00000408557

SEQ ID NO: 100842 - protein, 36 aa, Homo sapiens
  Payload ID: 20089
  Gene Name: zinc finger protein 638
  ENSP ID: ENSP00000409647
MSRPRFNPRGDFPLQRPRAPNPSGMRPPGPFMRPGS

SEQ ID NO: 100843 - protein, 171 aa, Homo sapiens
  Payload ID: 20089
  Gene Name: zinc finger protein 638
  ENSP ID: ENSP00000485154
MPRDGVPAGNTTPAAAQAAAQSPDSATAGAPQVLDSLKRYPDWNPEILPSRRNEGNRKENETPRRRSHSPSPRRSRRSSSSHRFRRSRSPMHYMYRPRSRSPRICHRFISRYRSRSRSRSPYRIRNPFRGSPKCFRSVSPERMSRRSVRSSDRKKALEDVVQRSGHGTEFN

SEQ ID NO: 100844 - protein, 90 aa, Homo sapiens
  Payload ID: 20089
  Gene Name: zinc finger protein 638
  ENSP ID: ENSP00000485169
MHYMYRPRSRSPRICHRFISRYRSRSRSRSPYRIRNPFRGSPKCFRSVSPERMSRRSVRSSDRKKALEDVVQRSGHGTEFNKQKHLEAAD

SEQ ID NO: 100845 - protein, 158 aa, Homo sapiens
  Payload ID: 20089
  Gene Name: zinc finger protein 638
  ENSP ID: ENSP00000485192
  MOD_RES (1)..(1): Any amino acid
XKGNRKKRAVDTKKTKLESLSQVGPVNENVMEEDLKTMIERHLTAKTPTKRVRIGKTLPSEKAVVTEPAKGEEAFQMSEVDEESGLKDSEPERKRKKTEDSSSGKSVASDVPEELDFLVPKAGFFCPICSLFYSGEKAMTNHCKSTRHKQNTEQHLPE

SEQ ID NO: 100846 - protein, 98 aa, Homo sapiens
  Payload ID: 20089
  Gene Name: zinc finger protein 638
  ENSP ID: ENSP00000485266
MHYMYRPRSRSPRICHRFISRYRSRSRSRSPYRIRNPFRGSPKCFRSVSPERMSRRSVRSSDRKKALEDVVQRSGHGTEFNKQKHLEAADKGHSPAQK

SEQ ID NO: 100847 - protein, 184 aa, Homo sapiens
  Payload ID: 20089
  Gene Name: zinc finger protein 638
  ENSP ID: ENSP00000485494
MLQTIYLFSKYPDWNPEILPSRRNEGNRKENETPRRRSHSPSPRRSRRSSSSHRFRRSRSPMHYMYRPRSRSPRICHRFISRYRSRSRSRSPYRIRNPFRGSPKCFRSVSPERMSRRSVRSSDRKKALEDVVQRSGHGTEFNKQKHLEAADKGHSPAQKPKTSSGTKPSVKPTSATKSDSNLGG

SEQ ID NO: 100848 - protein, 918 aa, Homo sapiens
  Payload ID: 20089
  Gene Name: zinc finger protein 638
  ENSP ID: ENSP00000485608
MSRPRFNPRGDFPLQRPRAPNPSGMRPPGPFMRPGSMGLPRFYPAGRARGIPHRFAGHESYQNMGPQRMNVQVTQHRTDPRLTKEKLDFHEAQQKKGKPHGSRWDDEPHISASVAVKQSSVTQVTEQSPKVQSRYTKESASSILASFGLSNEDLEELSRYPDEQLTPENMPLILRDIRMRKMGRRLPNLPSQSRNKETLGSEAVSSNVIDYGHASKYGYTEDPLEVRIYDPEIPTDEVENEFQSQQNISASVPNPNVICNSMFPVEDVFRQMDFPGESSNNRSFFSVESGTKMSGLHISGGQSVLEPIKSVNQSINQTVSQTMSQSLIPPSMNQQPFSSELISSVSQQERIPHEPVINSSNVHVGSRGSKKNYQSQADIPIRSPFGIVKASWLPKFSHADAQKMKRLPTPSMMNDYYAASPRIFPHLCSLCNVECSHLKDWIQHQNTSTHIESCRQLRQQYPDWNPEILPSRRNEGNRKENETPRRRSHSPSPRRSRRSSSSHRFRRSRSPMHYMYRPRSRSPRICHRFISRYRSRSRSRSPYRIRNPFRGSPKCFRSVSPERMSRRSVRSSDRKKALEDVVQRSGHGTEFNKQKHLEAADKGHSPAQKPKTSSGTKPSVKPTSATKSDSNLGGHSIRCKSKNLEDDTLSECKQVSDKAVSLQRKLRKEQSLHYGSVLLITELPEDGCTEEDVRKLFQPFGKVNDVLIVPYRKEAYLEMEFKEAITAIMKYIETTPLTIKGKSVKICVPGKKKAQNKEVKKKTLESKKVSASTLKRDADASKAVEIVTSTSAESVDQTQQLVPLVRNTARDHDGTPENEGEETVQSALFGFQYDASDHTMAWLGPNTVPEVKEMILQDPQLQTTQLPQTTQAPDITWGMLKKTTYKAEQILLQTQKPFTPDNLFLALLSGDAKPEYEQ

SEQ ID NO: 100849 - protein, 153 aa, Homo sapiens
  Payload ID: 20089
  Gene Name: zinc finger protein 638
  ENSP ID: ENSP00000485618
MHYMYRPRSRSPRICHRFISRYRSRSRSRSPYRIRNPFRGSPKCFRSVSPERMSRRSVRSSDRKKALEDVVQRSGHGTEFNKQKHLEAADKGHSPAQKPKTSSGTKPSVKPTSATKSDSNLGGHSIRCKSKNLEDDTLSECKQVSDKAVSLQR

SEQ ID NO: 100850 - protein, 285 aa, Homo sapiens
  Payload ID: 20089
  Gene Name: zinc finger protein 638
  ENSP ID: ENSP00000485667
  MOD_RES (1)..(1): Any amino acid
XPKDVTVLSVAEEQDLLKQERLVTVDEIGEVEELPLNESADITFATLNTKGNEGDTVRDSIGFISSQVPEDPSTLVTVDEIQDDSSDLHLVTLDEVTEEDEDSLADFNNLKEELNFVTVDEVGEEEDGDNDLKVELAQSKNDHPTDKKGNRKKRAVDTKKTKLESLSQVGPVNENVMEEDLKTMIERHLTVDEESGLKDSEPERKRKKTEDSSSGKSVASDVPEELDFLVPKAGFFCPICSLFYSGEKAMTNHCKSTRHKQNTEKFMAKQRKEKEQNEAEERSSR

SEQ ID NO: 100851 - protein, 485 aa, Homo sapiens
  Payload ID: 20090
  Gene Name: zinc finger protein 639
  Uniprot ID: Q9UID6
  ENSP ID: ENSP00000325634
MNEYPKKRKRKTLHPSRYSDSSGISRIADGFNGIFSDHCYSVCSMRQPDLKYFDNKDDDSDTETSNDLPKFADGIKARNRNQNYLVPSPVLRILDHTAFSTEKSADIVICDEECDSPESVNQQTQEESPIEVHTAEDVPIAVEVHAISEDYDIETENNSSESLQDQTDEEPPAKLCKILDKSQALNVTAQQKWPLLRANSSGLYKCELCEFNSKYFSDLKQHMILKHKRTDSNVCRVCKESFSTNMLLIEHAKLHEEDPYICKYCDYKTVIFENLSQHIADTHFSDHLYWCEQCDVQFSSSSELYLHFQEHSCDEQYLCQFCEHETNDPEDLHSHVVNEHACKLIELSDKYNNGEHGQYSLLSKITFDKCKNFFVCQVCGFRSRLHTNVNRHVAIEHTKIFPHVCDDCGKGFSSMLEYCKHLNSHLSEGIYLCQYCEYSTGQIEDLKIHLDFKHSADLPHKCSDCLMRFGNERELISHLPVHETT

SEQ ID NO: 100852 - protein, 130 aa, Homo sapiens
  Payload ID: 20090
  Gene Name: zinc finger protein 639
  ENSP ID: ENSP00000417232
MNEYPKKRKRKTLHPSRYSDSSGISRIADGFNGIFSDHCYSVCSMRQPDLKYFDNKDDDSDTETSNDLPKFADGIKARNRNQNYLVPSPVLRILDHTAFSTEKSADIVICDEECDSPESVNQQTQEESPI

SEQ ID NO: 100853 - protein, 485 aa, Homo sapiens; identical to SEQ ID NO: 100851
  Payload ID: 20090
  Gene Name: zinc finger protein 639
  Uniprot ID: Q9UID6
  ENSP ID: ENSP00000417740

SEQ ID NO: 100854 - protein, 137 aa, Homo sapiens
  Payload ID: 20090
  Gene Name: zinc finger protein 639
  ENSP ID: ENSP00000418628
MNEYPKKRKRKTLHPSRYSDSSGISRIADGFNGIFSDHCYSVCSMRQPDLKYFDNKDDDSDTETSNDLPKFADGIKARNRNQNYLVPSPVLRILDHTAFSTEKSADIVICDEECDSPESVNQQTQEESPIEVHTAED

SEQ ID NO: 100855 - protein, 485 aa, Homo sapiens; identical to SEQ ID NO: 100851
  Payload ID: 20090
  Gene Name: zinc finger protein 639
  Uniprot ID: Q9UID6
  ENSP ID: ENSP00000418766

SEQ ID NO: 100856 - protein, 216 aa, Homo sapiens
  Payload ID: 20090
  Gene Name: zinc finger protein 639
  ENSP ID: ENSP00000418870
MNEYPKKRKRKTLHPSRYSDSSGISRIADGFNGIFSDHCYSVCSMRQPDLKYFDNKDDDSDTETSNDLPKFADGIKARNRNQNYLVPSPVLRILDHTAFSTEKSADIVICDEECDSPESVNQQTQEESPIEVHTAEDVPIAVEVHAISEDYDIETENNSSESLQDQTDEEPPAKLCKILDKSQALNVTAQQKWPLLRANSSGLYKCELCEFNSKYF

SEQ ID NO: 100857 - protein, 288 aa, Homo sapiens
  Payload ID: 20090
  Gene Name: zinc finger protein 639
  ENSP ID: ENSP00000419650
MNEYPKKRKRKTLHPSRYSDSSGISRIADGFNGIFSDHCYSVCSMRQPDLKYFDNKDDDSDTETSNDLPKFADGIKARNRNQNYLVPSPVLRILDHTAFSTEKSADIVICDEECDSPESVNQQTQEESPIEVHTAEDVPIAVEVHAISEDYDIETENNSSESLQDQTDEEPPAKLCKILDKSQALNVTAQQKWPLLRANSSGLYKCELCEFNSKYFSDLKQHMILKHKRTDSNVCRVCKESFSTNMLLIEHAKLHEEDPYICKYCDYKTVIFENLSQHIADTHFSDHL

SEQ ID NO: 100858 - protein, 485 aa, Homo sapiens; identical to SEQ ID NO: 100851
  Payload ID: 20090
  Gene Name: zinc finger protein 639
  Uniprot ID: Q9UID6
  ENSP ID: ENSP00000477626

SEQ ID NO: 100859 - protein, 438 aa, Homo sapiens
  Payload ID: 20091
  Gene Name: zinc finger protein 641
  Uniprot ID: Q96N77
  ENSP ID: ENSP00000301042
MQAEDRSQFGSAAEMLSEQTAALGTGWESMNVQLDGAEPQVERGSQEERPWRTVPGPLEHLCCDLEEEPQSLQEKAQSAPWVPAIPQEGNTGDWEMAAALLAAGSQGLVTIKDVSLCFSQEEWRSLDPSQTDFYGEYVMQENCGIVVSLRFPIPKLDMLSQLEGGEEQWVPDPQDLEERDILRVTYTGDGSEHEGDTPELEAEPPRMLSSVSEDTVLWNPEHDESWDSMPSSSRGMLLGPPFLQEDSFSNLLCSTEMDSLLRPHTCPQCGKQFVWGSHLARHQQTHTGERPYSCLKCEKTFGRRHHLIRHQKTHLHDKTSRCSECGKNFRCNSHLASHQRVHAEGKSCKGQEVGESPGTRKRQRAPPVPKCHVCTECGKSFGRRHHLVRHWLTHTGEKPFQCPRCEKSFGRKHHLDRHLLTHQGQSPRNSWDRGTSVF

SEQ ID NO: 100860 - protein, 415 aa, Homo sapiens
  Payload ID: 20091
  Gene Name: zinc finger protein 641
  Uniprot ID: Q96N77
  ENSP ID: ENSP00000394627
MLSEQTAALGTGWESMNVQLDGAEPQVERGSQEERPWRTVPGPLEHLCCDLEEEPQSLQEKAQSAPWVPAIPQEGNTGDWEMAAALLAAGSQVSSASLGVSCGPITAAFVLLSHQPIDELAHMIINGFPIPKLDMLSQLEGGEEQWVPDPQDLEERDILRVTYTGDGSEHEGDTPELEAEPPRMLSSVSEDTVLWNPEHDESWDSMPSSSRGMLLGPPFLQEDSFSNLLCSTEMDSLLRPHTCPQCGKQFVWGSHLARHQQTHTGERPYSCLKCEKTFGRRHHLIRHQKTHLHDKTSRCSECGKNFRCNSHLASHQRVHAEGKSCKGQEVGESPGTRKRQRAPPVPKCHVCTECGKSFGRRHHLVRHWLTHTGEKPFQCPRCEKSFGRKHHLDRHLLTHQGQSPRNSWDRGTSVF

SEQ ID NO: 100861 - protein, 438 aa, Homo sapiens; identical to SEQ ID NO: 100859
  Payload ID: 20091
  Gene Name: zinc finger protein 641
  Uniprot ID: Q96N77
  ENSP ID: ENSP00000437832

SEQ ID NO: 100862 - protein, 77 aa, Homo sapiens
  Payload ID: 20091
  Gene Name: zinc finger protein 641
  ENSP ID: ENSP00000446625
MLSEQTAALGTGWESMNVQLDGAEPQVERGSQEERPWRTVPGPLEHLCCDLEEEPQSLQEKAQSAPWVPAIPQEGNT

SEQ ID NO: 100863 - protein, 107 aa, Homo sapiens
  Payload ID: 20091
  Gene Name: zinc finger protein 641
  ENSP ID: ENSP00000447381
MLSEQTAALGTGWESMNVQLDGAEPQVERGSQEERPWRTVPGPLEHLCCDLEEEPQSLQEKAQSAPWVPAIPQEGNTGDWEMAAALLAAGSQGLVTIKDVSLCFSQE

SEQ ID NO: 100864 - protein, 51 aa, Homo sapiens
  Payload ID: 20091
  Gene Name: zinc finger protein 641
  ENSP ID: ENSP00000448025
  MOD_RES (1)..(1): Any amino acid
XCGIVVSLRFPIPKLDMLSQLEGGEEQWVPDPQDLEERDILRVTYTGKNLE

SEQ ID NO: 100865 - protein, 82 aa, Homo sapiens
  Payload ID: 20091
  Gene Name: zinc finger protein 641
  ENSP ID: ENSP00000448140
MLSEQTAALGTGWESMNVQLDGAEPQVERGSQEERPWRTVPGPLEHLCCDLEEEPQSLQEKGFPIPKLDMLSQLEGGEEQWV

SEQ ID NO: 100866 - protein, 136 aa, Homo sapiens
  Payload ID: 20091
  Gene Name: zinc finger protein 641
  ENSP ID: ENSP00000448810
MQAEDRSQFGSAAEMLSEQTAALGTGWESMNVQLDGAEPQVERGSQEERPWRTVPGPLEHLCCDLEEEPQSLQEKAQSAPWVPAIPQEGNTGDWEMAAALLAAGSQGLVTIKDVSLCFSQEEWRSLDPSQTDFYGE

SEQ ID NO: 100867 - protein, 424 aa, Homo sapiens
  Payload ID: 20091
  Gene Name: zinc finger protein 641
  Uniprot ID: Q96N77
  ENSP ID: ENSP00000449974
MLSEQTAALGTGWESMNVQLDGAEPQVERGSQEERPWRTVPGPLEHLCCDLEEEPQSLQEKAQSAPWVPAIPQEGNTGDWEMAAALLAAGSQGLVTIKDVSLCFSQEEWRSLDPSQTDFYGEYVMQENCGIVVSLRFPIPKLDMLSQLEGGEEQWVPDPQDLEERDILRVTYTGDGSEHEGDTPELEAEPPRMLSSVSEDTVLWNPEHDESWDSMPSSSRGMLLGPPFLQEDSFSNLLCSTEMDSLLRPHTCPQCGKQFVWGSHLARHQQTHTGERPYSCLKCEKTFGRRHHLIRHQKTHLHDKTSRCSECGKNFRCNSHLASHQRVHAEGKSCKGQEVGESPGTRKRQRAPPVPKCHVCTECGKSFGRRHHLVRHWLTHTGEKPFQCPRCEKSFGRKHHLDRHLLTHQGQSPRNSWDRGTSVF

SEQ ID NO: 100868 - protein, 1327 aa, Homo sapiens
  Payload ID: 20092
  Gene Name: zinc finger protein 644
  Uniprot ID: Q9H582
  ENSP ID: ENSP00000337008
MRSFLQQDVNKTKSRLNVLNGLANNMDDLKINTDITGAKEELLDDNNFISDKESGVHKPKDCQTSFQKNNTLTLPEELSKDKSENALSGGQSSLFIHAGAPTVSSENFILPKGAAVNGPVSHSSLTKTSNMNKGSVSLTTGQPVDQPTTESCSTLKVAADLQLSTPQKASQHQVLFLLSDVAHAKNPTHSNKKLPTSASVGCDIQNSVGSNIKSDGTLINQVEVGEDGEDLLVKDDCVNTVTGISSGTDGFRSENDTNWDPQKEFIQFLMTNEETVDKAPPHSKIGLEKKRKRKMDVSKITRYTEDCFSDSNCVPNKSKMQEVDFLEQNEELQAVDSQKYALSKVKPESTDEDLESVDAFQHLIYNPDKCGEESSPVHTSTFLSNTLKKKCEESDSESPATFSTEEPSFYPCTKCNVNFREKKHLHRHMMYHLDGNSHFRHLNVPRPYACRECGRTFRDRNSLLKHMIIHQERRQKLMEEIRELKELQDEGRSARLQCPQCVFGTNCPKTFVQHAKTHEKDKRYYCCEECNFMAVTENELECHRGIAHGAVVKCPMVTSDIAQRKTQKKTFMKDSVVGSSKKSATYICKMCPFTTSAKSVLKKHTEYLHSSSCVDSFGSPLGLDKRKNDILEEPVDSDSTKTLTKQQSTTFPKNSALKQDVKRTFGSTSQSSSFSKIHKRPHRIQKARKSIAQSGVNMCNQNSSPHKNVTIKSSVDQKPKYFHQAAKEKSNAKANSHYLYRHKYENYRMIKKSGESYPVHFKKEEASSLNSLHLFSSSSNSHNNFISDPHKPDAKRPESFKDHRRVAVKRVIKESKKESSVGGEDLDSYPDFLHKMTVVVLQKLNSAEKKDSYETEDESSWDNVELGDYTTQAIEDETYSDINQEHVNLFPLFKSKVEGQEPGENATLSYDQNDGFYFEYYEDTGSNNFLHEIHDPQHLETADASLSKHSSVFHWTDLSLEKKSCPYCPATFETGVGLSNHVRGHLHRAGLSYEARHVVSPEQIATSDKMQHFKRTGTGTPVKRVRKAIEKSETTSEHTCQLCGGWFDTKIGLSNHVRGHLKRLGKTKWDAHKSPICVLNEMMQNEEKYEKILKALNSRRIIPRPFVAQKLASSDDFISQNVIPLEAYRNGLKTEALSVSASEEEGLNFLNEYDETKPELPSGKKNQSLTLIELLKNKRMGEERNSAISPQKIHNQTARKRFVQKCVLPLNEDSPLMYQPQKMDLTMHSALDCKQKKSRSRSGSKKKMLTLPHGADEVYILRCRFCGLVFRGPLSVQEDWIKHLQRHIVNANLPRTGAGMVEVTSLLKKPASITETSFSLLMAEAAS

SEQ ID NO: 100869 - protein, 105 aa, Homo sapiens
  Payload ID: 20092
  Gene Name: zinc finger protein 644
  Uniprot ID: Q9H582
  ENSP ID: ENSP00000340828
MLIRQNLALDCKQKKSRSRSGSKKKMLTLPHGADEVYILRCRFCGLVFRGPLSVQEDWIKHLQRHIVNANLPRTGAGMVEVTSLLKKPASITETSFSLLMAEAAS

SEQ ID NO: 100870 - protein, 105 aa, Homo sapiens; identical to SEQ ID NO: 100869
  Payload ID: 20092
  Gene Name: zinc finger protein 644
  Uniprot ID: Q9H582
  ENSP ID: ENSP00000354659

SEQ ID NO: 100871 - protein, 1327 aa, Homo sapiens; identical to SEQ ID NO: 100868
  Payload ID: 20092
  Gene Name: zinc finger protein 644
  Uniprot ID: Q9H582
  ENSP ID: ENSP00000359469

SEQ ID NO: 100872 - protein, 650 aa, Homo sapiens
  Payload ID: 20092
  Gene Name: zinc finger protein 644
  ENSP ID: ENSP00000482748
MMYHLDGNSHFRHLNVPRPYACRECGRTFRDRNSLLKHMIIHQERRQKLMEEIRELKELQDEGRSARLQCPQCVFGTNCPKTFVQHAKTHEKDKRYYCCEECNFMAVTENELECHRGIAHGAVVKCPMVTSDIAQRKTQKKTFMKDSVVGSSKKSATYICKMCPFTTSAKSVLKKHTEYLHSSSCVDSFGSPLGLDKRKNDILEEPVDSDSTKTLTKQQSTTFPKNSALKQDVKRTFGSTSQSSSFSKIHKRPHRIQKARKSIAQSGVNMCNQNSSPHKNVTIKSSVDQKPKYFHQAAKEKSNAKANSHYLYRHKYENYRMIKKSGESYPVHFKKEEASSLNSLHLFSSSSNSHNNFISDPHKPDAKRPESFKDHRRVAVKRVIKESKKESSVGGEDLDSYPDFLHKMTVVVLQKLNSAEKKDSYETEDESSWDNVELGDYTTQAIEDETYSDINQEHVNLFPLFKSKVEGQEPGENATLSYDQNDGFYFEYYEDTGSNNFLHEIHDPQHLETADASLSKHSSVFHWTDLSLEKKSCPYCPATFETGVGLSNHVRGHLHRAGLSYEARHVVSPEQIATSDKMQHFKRTGTGTPVKRVRKAIEKSETTSEHTCQLCGGWFDTKIGLSNHVRGHLKRLGKTKWDAHKSPICV

SEQ ID NO: 100873 - protein, 425 aa, Homo sapiens
  Payload ID: 20093
  Gene Name: zinc finger protein 645
  Uniprot ID: Q8N7E2
  ENSP ID: ENSP00000323348
MNKMPAGEQECEYNKEGKYYSKGVKLVRKKKKIPGYRWGDIKINIIGEKDDLPIHFCDKCDLPIKIYGRIIPCKHAFCYHCANLYDKVGYKVCPRCRYPVLRIEAHKRGSVFMCSIVQQCKRTYLSQKSLQAHIKRRHKRARKQVTSASLEKVRPHIAPPQTEISDIPKRLQDRDHLSYIPPEQHTMVSLPSVQHMLQEQHNQPHKDIQAPPPELSLSLPFPIQWETVSIFTRKHGNLTVDHIQNNSDSGAKKPTPPDYYPECQSQPAVSSPHHIIPQKQHYAPPPSPSSPVNHQMPYPPQDVVTPNSVRSQVPALTTTYDPSSGYIIVKVPPDMNSPPLRAPQSQNGNPSASEFASHHYNLNILPQFTENQETLSPQFTQTDAMDHRRWPAWKRLSPCPPTRSPPPSTLHGRSHHSHQRRHRRY

SEQ ID NO: 100874 - protein, 1832 aa, Homo sapiens
  Payload ID: 20094
  Gene Name: zinc finger protein 646
  Uniprot ID: O15015
  ENSP ID: ENSP00000300850
MEDTPPSLSCSDCQRHFPSLPELSRHRELLHPSPNQDSEEADSIPRPYRCQQCGRGYRHPGSLVNHRRTHETGLFPCTTCGKDFSNPMALKSHMRTHAPEGRRRHRPPRPKEATPHLQGETVSTDSWGQRLGSSEGWENQTKHTEETPDCESVPDPRAASGTWEDLPTRQREGLASHPGPEDGADGWGPSTNSARAPPLPIPASSLLSNLEQYLAESVVNFTGGQEPTQSPPAEEERRYKCSQCGKTYKHAGSLTNHRQSHTLGIYPCAICFKEFSNLMALKNHSRLHAQYRPYHCPHCPRVFRLPRELLEHQQSHEGERQEPRWEEKGMPTTNGHTDESSQDQLPSAQMLNGSAELSTSGELEDSGLEEYRPFRCGDCGRTYRHAGSLINHRKSHQTGVYPCSLCSKQLFNAAALKNHVRAHHRPRQGVGENGQPSVPPAPLLLAETTHKEEEDPTTTLDHRPYKCSECGRAYRHRGSLVNHRHSHRTGEYQCSLCPRKYPNLMALRNHVRVHCKAARRSADIGAEGAPSHLKVELPPDPVEAEAAPHTDQDHVCKHEEEATDITPAADKTAAHICSICGLLFEDAESLERHGLTHGAGEKENSRTETTMSPPRAFACRDCGKSYRHSGSLINHRQTHQTGDFSCGACAKHFHTMAAMKNHLRRHSRRRSRRHRKRAGGASGGREAKLLAAESWTRELEDNEGLESPQDPSGESPHGAEGNLESDGDCLQAESEGDKCGLERDETHFQGDKESGGTGEGLERKDASLLDNLDIPGEEGGGTHFCDSLTGVDEDQKPATGQPNSSSHSANAVTGWQAGAAHTCSDCGHSFPHATGLLSHRPCHPPGIYQCSLCPKEFDSLPALRSHFQNHRPGEATSAQPFLCCLCGMIFPGRAGYRLHRRQAHSSSGMTEGSEEEGEEEGVAEAAPARSPPLQLSEAELLNQLQREVEALDSAGYGHICGCCGQTYDDLGSLERHHQSQSSGTTADKAPSPLGVAGDAMEMVVDSVLEDIVNSVSGEGGDAKSQEGAGTPLGDSLCIQGGESLLEAQPRPFRCNQCGKTYRHGGSLVNHRKIHQTGDFLCPVCSRCYPNLAAYRNHLRNHPRCKGSEPQVGPIPEAAGSSELQVGPIPEGGSNKPQHMAEEGPGQAEVEKLQEELKVEPLEEVARVKEEVWEETTVKGEEIEPRLETAEKGCQTEASSERPFSCEVCGRSYKHAGSLINHRQSHQTGHFGCQACSKGFSNLMSLKNHRRIHADPRRFRCSECGKAFRLRKQLASHQRVHMERRGGGGTRKATREDRPFRCGQCGRTYRHAGSLLNHRRSHETGQYSCPTCPKTYSNRMALKDHQRLHSENRRRRAGRSRRTAVRCALCGRSFPGRGSLERHLREHEETEREPANGQGGLDGTAASEANLTGSQGLETQLGGAEPVPHLEDGVPRPGERSQSPIRAASSEAPEPLSWGAGKAGGWPVGGGLGNHSGGWVPQFLTRSEEPEDSVHRSPCHAGDCQLNGPTLSHMDSWDNRDNSSQLQPGSHSSCSQCGKTYCQSGSLLNHNTNKTDRHYCLLCSKEFLNPVATKSHSHNHIDAQTFACPDCGKAFESHQELASHLQAHARGHSQVPAQMEEARDPKAGTGEDQVVLPGQGKAQEAPSETPRGPGESVERARGGQAVTSMAAEDKERPFRCTQCGRSYRHAGSLLNHQKAHTTGLYPCSLCPKLLPNLLSLKNHSRTHTDPKRHCCSICGKAFRTAARLEGHGRVHAPREGPFTCPHCPRHFRRRISFVQHQQQHQEEWTVAGSGAPVAPVTGRGDLPLPPPPTPTTPLLDPSPQWPADLSFSL

SEQ ID NO: 100875 - protein, 1829 aa, Homo sapiens
  Payload ID: 20094
  Gene Name: zinc finger protein 646
  Uniprot ID: O15015
  ENSP ID: ENSP00000378429
MEDTPPSLSCSDCQRHFPSLPELSRHRELLHPSPNQDSEEADSIPRPYRCQQCGRGYRHPGSLVNHRRTHETGLFPCTTCGKDFSNPMALKSHMRTHAPEGRRRHRPPRPKEATPHLQGETVSTDSWGQRLGSSEGWENQTKHTEETPDCESVPDPRAASGTWEDLPTRQREGLASHPGPEDGADGWGPSTNSARAPPLPIPASSLLSNLEQYLAESVVNFTGGQEPTQSPPAEEERRYKCSQCGKTYKHAGSLTNHRQSHTLGIYPCAICFKEFSNLMALKNHSRLHAQYRPYHCPHCPRVFRLPRELLEHQQSHEGERQEPRWEEKGMPTTNGHTDESSQDQLPSAQMLNGSAELSTSGELEDSGLEEYRPFRCGDCGRTYRHAGSLINHRKSHQTGVYPCSLCSKQLFNAAALKNHVRAHHRPRQGVGENGQPSVPPAPLLLAETTHKEEEDPTTTLDHRPYKCSECGRAYRHRGSLVNHRHSHRTGEYQCSLCPRKYPNLMALRNHVRVHCKAARRSADIGAEGAPSHLKVELPPDPVEAEAAPHTDQDHVCKHEEEATDITPAADKTAAHICSICGLLFEDAESLERHGLTHGAGEKENSRTETTMSPPRAFACRDCGKSYRHSGSLINHRQTHQTGDFSCGACAKHFHTMAAMKNHLRRHSRRRSRRHRKRAGGASGGREAKLLAAESWTRELEDNEGLESPQDPSGESPHGAEGNLESDGDCLQAESEGDKCGLERDETHFQGDKESGGTGEGLERKDASLLDNLDIPGEEGGGTHFCDSLTGVDEDQKPATGQPNSSSHSANAVTGWQAGAAHTCSDCGHSFPHATGLLSHRPCHPPGIYQCSLCPKEFDSLPALRSHFQNHRPGEATSAQPFLCCLCGMIFPGRAGYRLHRRQAHSSSGMTEGSEEEGEEEGVAEAAPARSPPLQLSEAELLNQLQREVEALDSAGYGHICGCCGQTYDDLGSLERHHQSQSSGTTADKAPSPLGVAGDAMEMVVDSVLEDIVNSVSGEGGDAKSQEGAGTPLGDSLCIQGGESLLEAQPRPFRCNQCGKTYRHGGSLVNHRKIHQTGDFLCPVCSRCYPNLAAYRNHLRNHPRCKGSEPQVGPIPEAAGSSELQVGPIPEGGSNKPQHMAEEGPGQAEVEKLQEELKVEPLEEVARVKEEVWEETTVKGEEIEPRLETAEKGCQTEASSERPFSCEVCGRSYKHAGSLINHRQSHQTGHFGCQACSKGFSNLMSLKNHRRIHADPRRFRCSECGKAFRLRKQLASHQRVHMERRGGGGTRKATREDRPFRCGQCGRTYRHAGSLLNHRRSHETGQYSCPTCPKTYSNRMALKDHQRLHSENRRRRAGRSRRTAVRCALCGRSFPGRGSLERHLREHEETEREPANGQGGLDGTAASEANLTGSQGLETQLGGAEPVPHLEDGVPRPGERSQSPIRAASSEAPEPLSWGAGKAGGWPVGGGLGNHSGGWVPQFLTRSEEPEDSVHRSPCHAGDCQLNGPTLSHMDSWDNRDNSSQLQPGSHSSCSQCGKTYCQSGSLLNHNTNKTDRHYCLLCSKEFLNPVATKSHSHNHIDAQTFACPDCGKAFESHQELASHLQAHARGHSQVPAQMEEARDPKAGTGEDQVVLPGQGKAQEAPSETPRGPGESVERARGGQAVTSMAAEDKERPFRCTQCGRSYRHAGSLLNHQKAHTTGLYPCSLCPKLLPNLLSLKNHSRTHTDPKRHCCSICGKAFRTAARLEGHGRVHAPREGPFTCPHCPRHFRRRISFVQHQQQHQEEWTVAGSGRGHEGSQEEVGTQWRGKSSPKVGGGARSERREPRGF

SEQ ID NO: 100876 - protein, 240 aa, Homo sapiens
  Payload ID: 20094
  Gene Name: zinc finger protein 646
  ENSP ID: ENSP00000391271
MEDTPPSLSCSDCQRHFPSLPELSRHRELLHPSPNQDSEEADSIPRPYRCQQCGRGYRHPGSLVNHRRTHETGLFPCTTCGKDFSNPMALKSHMRTHAPEGRRRHRPPRPKEATPHLQGETVSTDSWGQRLGSSEGWENQTKHTEETPDCESVPDPRAASGTWEDLPTRQREGLASHPGPEDGADGWGPSTNSARAPPLPIPASSLLSNLEQYLAESVVNFTGGQEPTQSPPAEEERRYK

SEQ ID NO: 100877 - protein, 54 aa, Homo sapiens
  Payload ID: 20094
  Gene Name: zinc finger protein 646
  ENSP ID: ENSP00000456651
MEDTPPSLSCSDCQRHFPSLPELSRHRELLHPSPNQDSEEADSIPRPYRCQQCG

SEQ ID NO: 100878 - protein, 568 aa, Homo sapiens
  Payload ID: 20095
  Gene Name: zinc finger protein 648
  Uniprot ID: Q5T619
  ENSP ID: ENSP00000344129
MAQVDSQDRWGEASPLSSLTEEAHDTQMLSMNLESDDEDGGEAEKEGTADPVACPRGSSPVTHENPDLPWPHPLGKEEEKFSDSSSAGGMGQKPVEMSGKASWSRDVTKINETQGSPGASRALGSLPSGLAHKLLGQMQPLGDRLPAGDDGYSGANQDAVLDVPPSFPSNGKYLCAHKSVDTSAGNSSLLCFPRPGSNWDLPTQETHTPAQASATPASLAAAVLAKARNSRKVQNQAGRREGGEAEARPYRCLRGGRAFQKPSKPLSPAETRGGAAKRYACELCGKAYSHRGTLQQHRRLHTGERPYQCSFCDKAYTWSSDHRKHIRTHTGEKPYPCPDCGKAFVRSSDLRKHQRNMHSNNKPFPCSECGLTFNKPLSLLRHQRTHLGAKPFRCPACDREFAVASRMVEHQRVHSGERPFPCPTCGKCFTKSSNLSEHQTLHTGQRPFKCADCGVAFAQPSRLVRHQRIHTGERPFPCTQCGQAFARSSTLKRHQQIHSGEKGFLCAECGRAFRIASELAQHIRMHNGERPYQCEDCGQAFTRSNHLQRHRAKHGTCKKEPIPSSSDE

SEQ ID NO: 100879 - protein, 505 aa, Homo sapiens
  Payload ID: 20096
  Gene Name: zinc finger protein 649
  Uniprot ID: Q9BS31
  ENSP ID: ENSP00000347043
MTKAQESLTLEDVAVDFTWEEWQFLSPAQKDLYRDVMLENYSNLVSVGYQAGKPDALTKLEQGEPLWTLEDEIHSPAHPEIEKADDHLQQPLQNQKILKRTGQRYEHGRTLKSYLGLTNQSRRYNRKEPAEFNGDGAFLHDNHEQMPTEIEFPESRKPISTKSQFLKHQQTHNIEKAHECTDCGKAFLKKSQLTEHKRIHTGKKPHVCSLCGKAFYKKYRLTEHERAHRGEKPHGCSLCGKAFYKRYRLTEHERAHKGEKPYGCSECGKAFPRKSELTEHQRIHTGIKPHQCSECGRAFSRKSLLVVHQRTHTGEKPHTCSECGKGFIQKGNLNIHQRTHTGEKPYGCIDCGKAFSQKSCLVAHQRYHTGKTPFVCPECGQPCSQKSGLIRHQKIHSGEKPYKCSDCGKAFLTKTMLIVHHRTHTGERPYGCDECEKAYFYMSCLVKHKRIHSREKRGDSVKVENPSTASHSLSPSEHVQGKSPVNMVTVAMVAGQCEFAHILHS

SEQ ID NO: 100880 - protein, 477 aa, Homo sapiens
  Payload ID: 20096
  Gene Name: zinc finger protein 649
  ENSP ID: ENSP00000468983
MTKAQESLTLEDVAVDFTWEEWQFLSPAQKDLYRDVMLENYSNLVSVGYQAGKPDALTKLEQGEPLWTLEDEIHSPAHPEIEKADDHLQQPLQNQKILKRTGQRYEHGRTLKSYLGLTNQSRRYNRKEPAEFNGDGAFLHDNHEQMPTEIEFPESRKPISTKSQFLKHQQTHNIEKAHECTDCGKAFLKKSQLTEHKRIHTGKKPHVCSLCGKAFYKKYRLTEHERAHKGEKPYGCSECGKAFPRKSELTEHQRIHTGIKPHQCSECGRAFSRKSLLVVHQRTHTGEKPHTCSECGKGFIQKGNLNIHQRTHTGEKPYGCIDCGKAFSQKSCLVAHQRYHTGKTPFVCPECGQPCSQKSGLIRHQKIHSGEKPYKCSDCGKAFLTKTMLIVHHRTHTGERPYGCDECEKAYFYMSCLVKHKRIHSREKRGDSVKVENPSTASHSLSPSEHVQGKSPVNMVTVAMVAGQCEFAHILHS

SEQ ID NO: 100881 - protein, 41 aa, Homo sapiens
  Payload ID: 20096
  Gene Name: zinc finger protein 649
  ENSP ID: ENSP00000469690
MESLTLEDVAVDFTWEEWQFLSPAQKDLYRDVMLENYSNLV

SEQ ID NO: 100882 - protein, 47 aa, Homo sapiens
  Payload ID: 20096
  Gene Name: zinc finger protein 649
  ENSP ID: ENSP00000471098
MTKAQESLTLEDVAVDFTWEEWQFLSPAQKDLYRDVMLENYSNLVSV

SEQ ID NO: 100883 - protein, 43 aa, Homo sapiens
  Payload ID: 20096
  Gene Name: zinc finger protein 649
  ENSP ID: ENSP00000471756
MESLTLEDVAVDFTWEEWQFLSPAQKDLYRDVMLENYSNLVSV

SEQ ID NO: 100884 - protein, 606 aa, Homo sapiens
  Payload ID: 20097
  Gene Name: zinc finger protein 652
  Uniprot ID: Q9Y2D9
  ENSP ID: ENSP00000354686
MSHTASSCQELVENCAVHVAGMAQEDSRRGQVPSSFYHGANQELDLSTKVYKRESGSPYSVLVDTKMSKPHLHETEEQPYFRETRAVSDVHAVKEDRENSDDTEEEEEEVSYKREQIIVEVNLNNQTLNVSKGEKGVSSQSKETPVLKTSSEEEEEESEEEATDDSNDYGENEKQKKKEKIVEKVSVTQRRTRRAASVAAATTSPTPRTTRGRRKSVEPPKRKKRATKEPKAPVQKAKCEEKETLTCEKCPRVFNTRWYLEKHMNVTHRRMQICDKCGKKFVLESELSLHQQTDCEKNIQCVSCNKSFKKLWSLHEHIKIVHGYAEKKFSCEICEKKFYTMAHVRKHMVAHTKDMPFTCETCGKSFKRSMSLKVHSLQHSGEKPFRCENCDERFQYKYQLRSHMSIHIGHKQFMCQWCGKDFNMKQYFDEHMKTHTGEKPFICEICGKSFTSRPNMKRHRRTHTGEKPYPCDVCGQRFRFSNMLKAHKEKCFRVTSPVNVPPAVQIPLTTSPATPVPSVVNTATTPTPPINMNPVSTLPPRPIPHPFSHLHIHPHPHHPHHLPIPPVPHLPPPPALFKSEPLNHRGQSEDNFLRHLAEKNSSAQHH

SEQ ID NO: 100885 - protein, 606 aa, Homo sapiens; identical to SEQ ID NO: 100884
  Payload ID: 20097
  Gene Name: zinc finger protein 652
  Uniprot ID: Q9Y2D9
  ENSP ID: ENSP00000416305

SEQ ID NO: 100886 - protein, 426 aa, Homo sapiens
  Payload ID: 20097
  Gene Name: zinc finger protein 652
  ENSP ID: ENSP00000424848
MSHTASSCQELVENCAVHVAGMAQEDSRRGQVPSSFYHGANQELDLSTKVYKRESGSPYSVLVDTKMSKPHLHETEEQPYFRETRAVSDVHAVKEDRENSDDTEEEEEEVSYKREQIIVECVSCNKSFKKLWSLHEHIKIVHGYAEKKFSCEICEKKFYTMAHVRKHMVAHTKDMPFTCETCGKSFKRSMSLKVHSLQHSGEKPFRCENCDERFQYKYQLRSHMSIHIGHKQFMCQWCGKDFNMKQYFDEHMKTHTGEKPFICEICGKSFTSRPNMKRHRRTHTGEKPYPCDVCGQRFRFSNMLKAHKEKCFRVTSPVNVPPAVQIPLTTSPATPVPSVVNTATTPTPPINMNPVSTLPPRPIPHPFSHLHIHPHPHHPHHLPIPPVPHLPPPPALFKSEPLNHRGQSEDNFLRHLAEKNSSAQHH

SEQ ID NO: 100887 - protein, 615 aa, Homo sapiens
  Payload ID: 20098
  Gene Name: zinc finger protein 653
  Uniprot ID: Q96CK0
  ENSP ID: ENSP00000293771
MAERALEPEAEAEAEAGAGGEAAAEEGAAGRKARGRPRLTESDRARRRLESRKKYDVRRVYLGEAHGPWVDLRRRSGWSDAKLAAYLISLERGQRSGRHGKPWEQVPKKPKRKKRRRRNVNCLKNVVIWYEDHKHRCPYEPHLAELDPTFGLYTTAVWQCEAGHRYFQDLHSPLKPLSDSDPDSDKVGNGLVAGSSDSSSSGSASDSEESPEGQPVKAAAAAAAATPTSPVGSSGLITQEGVHIPFDVHHVESLAEQGTPLCSNPAGNGPEALETVVCVPVPVQVGAGPSALFENVPQEALGEVVASCPMPGMVPGSQVIIIAGPGYDALTAEGIHLNMAAGSGVPGSGLGEEVPCAMMEGVAAYTQTEPEGSQPSTMDATAVAGIETKKEKEDLCLLKKEEKEEPVAPELATTVPESAEPEAEADGEELDGSDMSAIIYEIPKEPEKRRRSKRSRVMDADGLLEMFHCPYEGCSQVYVALSSFQNHVNLVHRKGKTKVCPHPGCGKKFYLSNHLRRHMIIHSGVREFTCETCGKSFKRKNHLEVHRRTHTGETPLQCEICGYQCRQRASLNWHMKKHTAEVQYNFTCDRCGKRFEKLDSVKFHTLKSHPDHKPT

SEQ ID NO: 100888 - protein, 217 aa, Homo sapiens
  Payload ID: 20098
  Gene Name: zinc finger protein 653
  ENSP ID: ENSP00000465166
  MOD_RES (1)..(1): Any amino acid
XEMFHCPYEGCSQVYVALSSFQNHVNLVHRKGKTKVCPHPGCGKKFYLSNHLRRHMIIHSGVREFTCETCGKSFKRKNHLEVRDLWLPVPAARVAQLAHEEAHCGGAVQLHVRSLREALREAGQRQVPHAQKPPGSQAHLTHLTTDRPYLFVRSDTTPGLAGAWTAARAARTAGRKEAPPPRPRAGPPGQVPHPAPPHPSRSWCLGLHCWNCVKRAE

SEQ ID NO: 100889 - protein, 34 aa, Homo sapiens
  Payload ID: 20098
  Gene Name: zinc finger protein 653
  ENSP ID: ENSP00000465674
  MOD_RES (1)..(1): Any amino acid
XGRHGRRLRLRGDKTCLRSHRQLRAELSLELGSG

SEQ ID NO: 100890 - protein, 72 aa, Homo sapiens
  Payload ID: 20098
  Gene Name: zinc finger protein 653
  ENSP ID: ENSP00000465955
  MOD_RES (1)..(1): Any amino acid
XMFHCPYEGCSQVYVALSSFQVSVNSPARPAASPSRGRTTWRYIGAPTPARPPCSARSVATSAGSARRSTGT

SEQ ID NO: 100891 - protein, 169 aa, Homo sapiens
  Payload ID: 20098
  Gene Name: zinc finger protein 653
  ENSP ID: ENSP00000467069
  MOD_RES (1)..(1): Any amino acid
XKEKEDLCLLKKEEKEEPVAPELATTVPESAEPEAEADGEELDGSDMSAIIYEIPKEPEKRRRSKRSRVMDADGLLEMFHCPYEGCSQVYVALSSFQNHVNLVHRKGKTKVCPHPGCGKKFYLSNHLRRHMIIHSGVREFTCETCGKSFKRKNHLEVHRRTHTGETPLQ

SEQ ID NO: 100892 - protein, 581 aa, Homo sapiens
  Payload ID: 20099
  Gene Name: zinc finger protein 654
  Uniprot ID: Q8IZM8
  ENSP ID: ENSP00000312141
MLCNKEFLGGHIVRHAQAHQKKGSFACVICGRKFRNRGLMQKHLKNHVKKIQRQQIAAAQQDDQEVTALEEINCSSSSISFENGNSDSKDLEVETLTASSEGNKEVIPEHVAEFIEIPISVPEDVIENVIENGSPNNSLNNVFKPLTECGDDYEEEEDEEGDYEEDDYDLNQETSVIHKINGTVCHPKDIYATDQEGNFKCPALGCVRIFKRIGFLNKHAMTVHPTDLNVRQTVMKWSKGKCKFCQRQFEDSQHFIDHLNRHSYPNVYFCLHFNCNESFKLPFQLAQHTKSHRIFQAQCSFPECHELFEDLPLLYEHEAQHYLSKTPESSAQPSETILWDVQTDSNPNQEKDSSSNEKQTISLPVSTSKSRKESTEPKTCIESMEKKTDSLVQNGNERSDDTVSNISLIDQKMPDIEPNSENNCSSSDIVNGHSEIEQTPLVSSDPALKIDTNRIRTENGSILPSVVPQEHNTLPVSQAPSKPNLTSEHTSYGLILTKPYVRPLPPSYLDERYLSMPKRRKFLTDRVDACSDQDNVYKKSVKRLRCGKCLTTYCNAEALEAHLAQKKCQTLFGFDSDDESA

SEQ ID NO: 100893 - protein, 491 aa, Homo sapiens
  Payload ID: 20100
  Gene Name: zinc finger protein 655
  Uniprot ID: Q8N720
  ENSP ID: ENSP00000252713
MEEIPAQEAAGSPRVQFQSLETQSECLSPEPQFVQDTDMEQGLTGDGETREENKLLIPKQKISEEVHSYKVRVGRLKHDITQVPETREVYKSEDRLERLQEILRKFLYLEREFRQITISKETFTSEKNNECHEPEKSFSLDSTIDADQRVLRIQNTDDNDKYDMSFNQNSASGKHEHLNLTEDFQSSECKESLMDLSHLNKWESIPNTEKSYKCDVCGKIFHQSSALTRHQRIHTREKPYKCKECEKSFSQSSSLSRHKRIHTREKPYKCEASDKSCEASDKSCSPSSGIIQHKKIHTRAKSYKCSSCERVFSRSVHLTQHQKIHKEMPCKCTVCGSDFCHTSYLLEHQRVHHEEKAYEYDEYGLAYIKQQGIHFREKPYTCSECGKDFRLNSHLIQHQRIHTGEKAHECNECGKAFSQTSCLIQHHKMHRKEKSYECNEYEGSFSHSSDLILQQEVLTRQKAFDCDVWEKNSSQRAHLVQHQSIHTKENS

SEQ ID NO: 100894 - protein, 181 aa, Homo sapiens
  Payload ID: 20100
  Gene Name: zinc finger protein 655
  Uniprot ID: Q8N720
  ENSP ID: ENSP00000322363
MEEIPAQEAAGSPRVQFQSLETQSECLSPEPQFVQDTDMEQGLTGAPPVPQVPALPREGSPGDQAAALLTARYQEFVTFEDVAVHLTREEWGYLDPVQRDLYREVMLENYGNVVSLGILLRLPTTRIHSVNSCPALSHTQASAFSGETLAVLTAGISKRWPKYRLPIDIARPCSETPFPRL

SEQ ID NO: 100895 - protein, 110 aa, Homo sapiens
  Payload ID: 20100
  Gene Name: zinc finger protein 655
  Uniprot ID: Q8N720
  ENSP ID: ENSP00000350530
MEEIPAQEAAGSPRVQFQSLETQSECLSPEPQFVQDTDMEQGLTGGILLRLPTTRIHSVNSCPALSHTQASAFSGETLAVLTAGISKRWPKYRLPIDIARPCSETPFPRL

SEQ ID NO: 100896 - protein, 491 aa, Homo sapiens; identical to SEQ ID NO: 100893
  Payload ID: 20100
  Gene Name: zinc finger protein 655
  Uniprot ID: Q8N720
  ENSP ID: ENSP00000377718

SEQ ID NO: 100897 - protein, 182 aa, Homo sapiens
  Payload ID: 20100
  Gene Name: zinc finger protein 655
  ENSP ID: ENSP00000389260
MEEIPAQEAAGSPRVQFQSLETQSECLSPEPQFVQDTDMEQGLTGGFPISKPDGISQLEQDLQVFDLETKTREVLRDDCSDGETREENKLLIPKQKISEEVHSYKVRVGRLKHDITQVPETREVYKSEDRLERLQEILRKFLYLEREFRQITISKETFTSEKNNECHEPEKSFSLDSTIDAD

SEQ ID NO: 100898 - protein, 50 aa, Homo sapiens
  Payload ID: 20100
  Gene Name: zinc finger protein 655
  ENSP ID: ENSP00000390295
MEEIPAQEAAGSPRVQFQSLETQSECLSPEPQFVQDTDMEQGLTGVGSWD

SEQ ID NO: 100899 - protein, 112 aa, Homo sapiens
  Payload ID: 20100
  Gene Name: zinc finger protein 655
  ENSP ID: ENSP00000392244
MEEIPAQEAAGSPRVQFQSLETQSECLSPEPQFVQDTDMEQGLTGGFPISKPDGISQLEQDLQVFDLETKTREVLRDDCSDGETREENKLLIPKQKISEEVHSYKVRVGRLK

SEQ ID NO: 100900 - protein, 103 aa, Homo sapiens
  Payload ID: 20100
  Gene Name: zinc finger protein 655
  ENSP ID: ENSP00000392980
MEEIPAQEAAGSPRVQFQSLETQSECLSPEPQFVQDTDMEQGLTGAPPVPQVPALPREGSPGDQAAALLTARYQDFQFPSLMGSPSWNRIYRSLIWKLRLEKS

SEQ ID NO: 100901 - protein, 109 aa, Homo sapiens
  Payload ID: 20100
  Gene Name: zinc finger protein 655
  ENSP ID: ENSP00000393750
MEEIPAQEAAGSPRVQFQSLETQSECLSPEPQFVQDTDMEQGLTGGFPISKPDGISQLEQDLQVFDLETKTREVLRDDCSDGETREENKLLIPKQKISEEVHSYKVRVG

SEQ ID NO: 100902 - protein, 526 aa, Homo sapiens
  Payload ID: 20100
  Gene Name: zinc finger protein 655
  Uniprot ID: Q8N720
  ENSP ID: ENSP00000393876
MEEIPAQEAAGSPRVQFQSLETQSECLSPEPQFVQDTDMEQGLTGGFPISKPDGISQLEQDLQVFDLETKTREVLRDDCSDGETREENKLLIPKQKISEEVHSYKVRVGRLKHDITQVPETREVYKSEDRLERLQEILRKFLYLEREFRQITISKETFTSEKNNECHEPEKSFSLDSTIDADQRVLRIQNTDDNDKYDMSFNQNSASGKHEHLNLTEDFQSSECKESLMDLSHLNKWESIPNTEKSYKCDVCGKIFHQSSALTRHQRIHTREKPYKCKECEKSFSQSSSLSRHKRIHTREKPYKCEASDKSCEASDKSCSPSSGIIQHKKIHTRAKSYKCSSCERVFSRSVHLTQHQKIHKEMPCKCTVCGSDFCHTSYLLEHQRVHHEEKAYEYDEYGLAYIKQQGIHFREKPYTCSECGKDFRLNSHLIQHQRIHTGEKAHECNECGKAFSQTSCLIQHHKMHRKEKSYECNEYEGSFSHSSDLILQQEVLTRQKAFDCDVWEKNSSQRAHLVQHQSIHTKENS

SEQ ID NO: 100903 - protein, 131 aa, Homo sapiens
  Payload ID: 20100
  Gene Name: zinc finger protein 655
  ENSP ID: ENSP00000395799
MEEIPAQEAAGSPRVQFQSLETQSECLSPEPQFVQDTDMEQGLTGAPPVPQVPALPREGSPGDQAAALLTARYQSSQDVLFQEFVTFEDVAVHLTREEWGYLDPVQRDLYREVMLENYGNVVSLGTVGSWD

SEQ ID NO: 100904 - protein, 110 aa, Homo sapiens; identical to SEQ ID NO: 100895
  Payload ID: 20100
  Gene Name: zinc finger protein 655
  Uniprot ID: Q8N720
  ENSP ID: ENSP00000396396

SEQ ID NO: 100905 - protein, 99 aa, Homo sapiens
  Payload ID: 20100
  Gene Name: zinc finger protein 655
  ENSP ID: ENSP00000398872
MEEIPAQEAAGSPRVQFQSLETQSECLSPEPQFVQDTDMEQGLTGGILLRLPTTRIHSVNSCPALSHTQASAFSGETLAVLTAGISKRWPKYRLPIDIA

SEQ ID NO: 100906 - protein, 103 aa, Homo sapiens; identical to SEQ ID NO: 100900
  Payload ID: 20100
  Gene Name: zinc finger protein 655
  ENSP ID: ENSP00000403500

SEQ ID NO: 100907 - protein, 46 aa, Homo sapiens
  Payload ID: 20100
  Gene Name: zinc finger protein 655
  ENSP ID: ENSP00000408555
MEEIPAQEAAGSPRVQFQSLETQSECLSPEPQFVQDTDMEQGLTGG

SEQ ID NO: 100908 - protein, 123 aa, Homo sapiens
  Payload ID: 20100
  Gene Name: zinc finger protein 655
  ENSP ID: ENSP00000414007
MEEIPAQEAAGSPRVQFQSLETQSECLSPEPQFVQDTDMEQGLTGAPPVPQVPALPREGSPGDQAAALLTARYQEFVTFEDVAVHLTREEWGYLDPVQRDLYREVMLENYGNVVSLGTVGSWD

SEQ ID NO: 100909 - protein, 129 aa, Homo sapiens
  Payload ID: 20100
  Gene Name: zinc finger protein 655
  ENSP ID: ENSP00000414969
MEEIPAQEAAGSPRVQFQSLETQSECLSPEPQFVQDTDMEQGLTGAPPVPQVPALPREGSPGDQAAALLTARYQPGCVISGVCDIRGCGCAPYSRGMGIPGPCSEGPLQRSDVRELWERGLTGISNFQA

SEQ ID NO: 100910 - protein, 526 aa, Homo sapiens; identical to SEQ ID NO: 100902
  Payload ID: 20100
  Gene Name: zinc finger protein 655
  Uniprot ID: Q8N720
  ENSP ID: ENSP00000419135

SEQ ID NO: 100911 - protein, 103 aa, Homo sapiens; identical to SEQ ID NO: 100900
  Payload ID: 20100
  Gene Name: zinc finger protein 655
  ENSP ID: ENSP00000486262

SEQ ID NO: 100912 - protein, 597 aa, Homo sapiens
  Payload ID: 20101
  Gene Name: zinc finger protein 658
  ENSP ID: ENSP00000479295
MNMSQASVSFQDVTVEFTREEWQHLGPVERTLYRDVMLENYSHLISVGYCITKPKVISKLEKGEEPWSLEDEFLNQRYPGYFKVDHIKGIREKQEKPLWQEIFISDADKTLSKEGQKVLEKPFNLEIAPELSEKISCKCDSHRMNLPVASQLIISERKYSRKKTEYMNVCEKLQLDIKHEKAHAEEKSYEHGENAKAFSYKKDQHWKFQTLEESFECDGSGQGLYDKTICITPQSFLTGEKSCKDDEFRKNFDKITLFNHMRTDTRGKCSDLNEYGTSCDKTTAVEYNKVHMAMTHYECNERGINFSRKSPLTQSQRTITGWSAFESNKCEENFSQSSAHIVHQKTQAGDKFGEHNECTDALYQKLDFTAHQRIHTEDKFYLSDEHGKCRKSFYRKAHLIQHQRPHSGEKTYQYEECAKSFCSSSHPIQHPGTYVGFKLYECNECGKAFCQNSNLSKHLRIHTKEKPCDNNGCGRSYKSPLIGHQKTDAEMELCGGSEYGKTSHLKGHQRILMGEKPYECIECGKTFSKTSHLRAHQRIHTGEKPYECVECEKTFSHKTHLSVHQRVHTGEKPYECNDCGKSFTYNSALRAHQRIHT

SEQ ID NO: 100913 - protein, 617 aa, Homo sapiens
  Payload ID: 20101
  Gene Name: zinc finger protein 658
  Uniprot ID: Q5TYW1
  ENSP ID: ENSP00000480919
MNMSQASVSFQDVTVEFTREEWQHLGPVERTLYRDVMLENYSHLISVGYCITKPKVISKLEKGEEPWSLEDEFLNQRYPGYFKVDHIKGIREKQEKPLWQEIFISDADKTLSKEGQKVLEKPFNLEIAPELSEKISCKCDSHRMNLPVASQLIISERKYSRKKTEYMNVCEKLQLDIKHEKAHAEEKSYEHGENAKAFSYKKDQHWKFQTLEESFECDGSGQGLYDKTICITPQSFLTGEKSCKDDEFRKNFDKITLFNHMRTDTRGKCSDLNEYGTSCDKTTAVEYNKVHMAMTHYECNERGINFSRKSPLTQSQRTITGWSAFESNKCEENFSQSSAHIVHQKTQAGDKFGEHNECTDALYQKLDFTAHQRIHTEDKFYLSDEHGKCRKSFYRKAHLIQHQRPHSGEKTYQYEECAKSFCSSSHPIQHPGTYVGFKLYECNECGKAFCQNSNLSKHLRIHTKEKPCDNNGCGRSYKSPLIGHQKTDAEMELCGGSEYGKTSHLKGHQRILMGEKPYECIECGKTFSKTSHLRAHQRIHTGEKPYECVECEKTFSHKTHLSVHQRVHTGEKPYECNDCGKSFTYNSALRAHQRIHTGLAVCHVGILMATKSLFHQS

SEQ ID NO: 100914 - protein, 97 aa, Homo sapiens
  Payload ID: 20101
  Gene Name: zinc finger protein 658
  ENSP ID: ENSP00000482328
MNMSQASVSFQDVTVEFTREEWQHLGPVERTLYRDVMLENYSHLISVGYCITKPKVISKLEKGEEPWSLEDEFLNQRYPGYFKVDHIKGIREKQEKP

SEQ ID NO: 100915 - protein, 1059 aa, Homo sapiens
  Payload ID: 20101
  Gene Name: zinc finger protein 658
  Uniprot ID: Q5TYW1
  ENSP ID: ENSP00000482447
MNMSQASVSFQDVTVEFTREEWQHLGPVERTLYRDVMLENYSHLISVGYCITKPKVISKLEKGEEPWSLEDEFLNQRYPGYFKVDHIKGIREKQEKPLWQEIFISDADKTLSKEGQKVLEKPFNLEIAPELSEKISCKCDSHRMNLPVASQLIISERKYSRKKTEYMNVCEKLQLDIKHEKAHAEEKSYEHGENAKAFSYKKDQHWKFQTLEESFECDGSGQGLYDKTICITPQSFLTGEKSCKDDEFRKNFDKITLFNHMRTDTRGKCSDLNEYGTSCDKTTAVEYNKVHMAMTHYECNERGINFSRKSPLTQSQRTITGWSAFESNKCEENFSQSSAHIVHQKTQAGDKFGEHNECTDALYQKLDFTAHQRIHTEDKFYLSDEHGKCRKSFYRKAHLIQHQRPHSGEKTYQYEECAKSFCSSSHPIQHPGTYVGFKLYECNECGKAFCQNSNLSKHLRIHTKEKPCDNNGCGRSYKSPLIGHQKTDAEMELCGGSEYGKTSHLKGHQRILMGEKPYECIECGKTFSKTSHLRAHQRIHTGEKPYECVECEKTFSHKTHLSVHQRVHTGEKPYECNDCGKSFTYNSALRAHQRIHTGEKPYECSDCEKTFAHNSALRAHHRIHTGEKPYECNECGRSFAHISVLKAHQRIHTGEKPYECNECGRSFTYNSALRAHQRIHTGRKPYECSDCEKTFAHNSALKIHQRIHTGEKPYECNECEKTFAHNSALRAHQNIHTGEKLYECSECGKTFFQKTRLSTHRRIHTGEKPYECSKCGKTFSQKSYLSGHERIHTGEKPYECNVCGKTFVYKAALIVHQRIHTGEKPYECNQCGKTFSQRTHLCAHQRIHTGEKPYECNECGKTFADNSALRAHHRIHTGEKPYECNDCGKTFSKTSHLRAHLRTRSGEKPYECSECGKTFSEKSYVSAHQRVHTGEKPYECNVCGKPFAHNSTLRVHQRIHTGEKSYECNDCGKTFSQKSHLSAHQRIHTGEKPYECNECGKAFAQNSTLRVHQRIHTGEKPYECDECGKTFVRKAALRVHHTRMHTREKTLACNGFGKS

SEQ ID NO: 100916 - protein, 1059 aa, Homo sapiens; identical to SEQ ID NO: 100915
  Payload ID: 20101
  Gene Name: zinc finger protein 658
  Uniprot ID: Q5TYW1
  ENSP ID: ENSP00000482540

SEQ ID NO: 100917 - protein, 79 aa, Homo sapiens
  Payload ID: 20101
  Gene Name: zinc finger protein 658
  ENSP ID: ENSP00000483395
MNMSQASVSFQDVTVEFTREEWQHLGPVERTLYRDVMLENYSHLISVGYCITKPKVISKLEKGEEPWSLEDEFLNQRYP

SEQ ID NO: 100918 - protein, 155 aa, Homo sapiens
  Payload ID: 20101
  Gene Name: zinc finger protein 658
  ENSP ID: ENSP00000483979
MLENYSHLISVGYCITKPKVISKLEKGEEPWSLEDEFLNQRYPGYFKVDHIKGIREKQEKPLWQEIFISDADKTLSKEGQKVLEKPFNLEIAPELSEKISCKCDSHRMNLPVASQLIISERKYSRKKTEYMNVCEKLQLDIKHEKAHAEEKSYEH

SEQ ID NO: 100919 - protein, 57 aa, Homo sapiens
  Payload ID: 20102
  Gene Name: zinc finger protein 66
  ENSP ID: ENSP00000459415
MAQRNLYRDVMLENYRNLVFLGIVVSKPDLITHLEQGKKPSTMQRHEMVANPSGRCE

SEQ ID NO: 100920 - protein, 573 aa, Homo sapiens
  Payload ID: 20102
  Gene Name: zinc finger protein 66
  Uniprot ID: Q6ZN08
  ENSP ID: ENSP00000461425
MGPLQFRDVAIEFSLEEWHCLDMAQRNLYRDVMLENYRNLVFLGIVVSKPDLITHLEQGKKPSTMQRHEMVANPSVLCSHFNQDLWPEQSIKDSFQKLILRRHKKCGHDNLQLKKGCESVDKCKVHKRGYNGLNQCLTTTQSKMFQCDKHGKVFHQFSNTNRHKIRHTGKNPCKFTECGKAFNRSSTFTTHKKIHTGEKPYKCIECGKAFNRSSHLTTHKIIHTGEKRYKCEDCGKAFNRSSNLTTHKKIHTGEKPYKCEECGKAFKRSSILTTHKRIHTGEKPYKCEECGKVFKYLSSLSTHKIIHTGEKPYKCEECGKAFNWSSHLTTHKRIHTGEKPYKCEECGKGFKYSSTLTKHKIIHTGEKPYKCEECGEAFKYSCSLTAHKIIHTGKKPYKCEECGKVFKHSSPLSKHKRIHTGEKPYKCEECGKAFSRSSILTTHKIIHTGEKPYECEDCGKAFNRSSNLTKHKKIHTGEKPYKCEECGKAFKCSSILTTHKRIHTADKPYKCEECGKDFKYSSTLTRHKKIHTGGKPHKCNKCGKAFISSSNLSRHEIIHMGGNPYKCENVAKP

SEQ ID NO: 100921 - protein, 205 aa, Homo sapiens
  Payload ID: 20102
  Gene Name: zinc finger protein 66
  ENSP ID: ENSP00000469543
MGPLQFRDVAIEFSLEEWHCLDMAQRNLYRDVMLENYRNLVFLGIVVSKPDLITHLEQGKKPSTMQRHEMVANPSGPVLHILFFCCCFLSFFLFLSFFFFFLRWNLALLPRLKCSGAISAHCKLCLLGSSDSPTSASQVAGITGARHIAKVIFVFLVEMVFHHVGQARLKLLTSGYLPTSTSQSARITGLSYCTWPVLHILDIDL

SEQ ID NO: 100922 - protein, 601 aa, Homo sapiens
  Payload ID: 20102
  Gene Name: zinc finger protein 66
  ENSP ID: ENSP00000479221
MGPLQFRDVAIEFSLEEWHCLDMAQRNLYRDVMLENYRNLVFLGIVVSKPDLITHLEQGKKPSTMQRHEMVANPSVLCSHFNQDLWPEQSIKDSFQKLILRRHKKCGHDNLQLKKGCESVDKCKVHKRGYNGLNQCLTTTQSKMFQCDKHGKVFHQFSNTNRHKIRHTGKNPFKFTECGKAFNRSSTLTTHKKIHTGEKPYKCIECGKAFNRSSHLTTHKIIHTGEKRYKCEDCGKAFNRSSNLTTHKKIHTGEKPYKCEECGKAFKRSSILTTHKRIHTGEKPYKCEECGKVFKYLSSLSTHKIIHTGEKPYKCEECGKAFNWSSHLTTHKRIHTGEKPYKCEECGKGFKYSSTLTKHKIIHTGEKPYKCEECGEAFKYSCSLTAHKIIHTGKKPYKCEECGKVFKHSSPLSKHKRIHAGEKPYKCEECGKAFSRSSILTTHKIIHTGEKPYECEDCGKAFNRSSNLTKHKKIHTGEKPYKCEECGKAFKCSSILTTHKRIHTADKPYKCEECGKDFKYSSTLTRHKRIHTGEKPYKCEECGKAFNHPATLFSHKKIHTGGKPHKCNKCGKAFISSSNLSRHEIIHMGGNPYKCENVAKP

SEQ ID NO: 100923 - protein, 57 aa, Homo sapiens; identical to SEQ ID NO: 100919
  Payload ID: 20102
  Gene Name: zinc finger protein 66
  ENSP ID: ENSP00000482322

SEQ ID NO: 100924 - protein, 107 aa, Homo sapiens
  Payload ID: 20102
  Gene Name: zinc finger protein 66
  ENSP ID: ENSP00000485153
MGPLQFRDVAIEFSLEEWHCLDMAQRNLYRDVMLENYRNLVFLGIVVSKPDLITHLEQGKKPSTMQRHEMVANPSGPVLHILFFCCCFLSFFLSFSFSFFFFFFFFF

SEQ ID NO: 100925 - protein, 331 aa, Homo sapiens
  Payload ID: 20103
  Gene Name: zinc finger protein 660
  Uniprot ID: Q6AZW8
  ENSP ID: ENSP00000324605
MRRKTRNFKHKTVKDNKVLTEGSDQESEKDNSQCCDPATNERVQAEKRQYVCTECGKAFSQSANLTVHERIHTGEKPYKCKECGKAFSHSSNLVVHRRIHTGLKPYTCSECGKSFSGKSHLIRHQGIHSGEKTYECKECGKAFSRSSGLISHHRVHTGEKPYSCIECGKAFSRSSNLTQHQRMHRGKKVYKCKECGKTCGSNTKIMDHQRIHTGEKPYECDECGKTFILRKTLNEHQRLHRREKPYKCNECGKAFTSNRNLVDHQRVHTGEKPYKCNECGKTFRQTSQVILHLRTHTKEKPYKCSECGKAYRYSSQLIQHQRKHNEEKETS

SEQ ID NO: 100926 - protein, 39 aa, Homo sapiens
  Payload ID: 20103
  Gene Name: zinc finger protein 660
  ENSP ID: ENSP00000405284
MRRKTRNFKHKTVKDNKVLTEGSDQESEKDNSQCCDPAT

SEQ ID NO: 100927 - protein, 34 aa, Homo sapiens
  Payload ID: 20103
  Gene Name: zinc finger protein 660
  ENSP ID: ENSP00000411996
MRRKTRNFKHKTVKDNKVLTEGSDQESEKDNSQC

SEQ ID NO: 100928 - protein, 39 aa, Homo sapiens; identical to SEQ ID NO: 100926
  Payload ID: 20103
  Gene Name: zinc finger protein 660
  ENSP ID: ENSP00000485799

SEQ ID NO: 100929 - protein, 34 aa, Homo sapiens; identical to SEQ ID NO: 100927
  Payload ID: 20103
  Gene Name: zinc finger protein 660
  ENSP ID: ENSP00000486280

SEQ ID NO: 100930 - protein, 331 aa, Homo sapiens; identical to SEQ ID NO: 100925
  Payload ID: 20103
  Gene Name: zinc finger protein 660
  Uniprot ID: Q6AZW8
  ENSP ID: ENSP00000487319

SEQ ID NO: 100931 - protein, 452 aa, Homo sapiens
  Payload ID: 20104
  Gene Name: zinc finger protein 662
  Uniprot ID: Q6ZS27
  ENSP ID: ENSP00000329264
MAAVALASGTRLGLVLELLPGQPALPRARRESVTFEDVAVYFSENEWIGLGPAQRALYRDVMLENYGAVASLAFPFPKPALISQLERGETPWCSVPRGALDGEAPRGISSEGVLKRKKEDFILKEEIIEEAQDLMVLSSGPQWCGSQELWFGKTCEEKSRLGRWPGYLNGGRMESSTNDIIEVIVKDEMISVEESSGNTDVNNLLGIHHKILNEQIFYICEECGKCFDQNEDFDQHQKTHNGEKVYGCKECGKAFSFRSHCIAHQRIHSGVKPYECQECAKAFVWKSNLIRHQRIHTGEKPFECKECGKGFSQNTSLTQHQRIHTGEKPYTCKECGKSFTRNPALLRHQRMHTGEKPYECKDCGKGFMWNSDLSQHQRVHTGDKPHECTDCGKSFFCKAHLIRHQRIHTGERPYKCNDCGKAFSQNSVLIKHQRRHARDKPYNCQISHLLEH

SEQ ID NO: 100932 - protein, 426 aa, Homo sapiens
  Payload ID: 20104
  Gene Name: zinc finger protein 662
  Uniprot ID: Q6ZS27
  ENSP ID: ENSP00000405047
MLENYGAVASLAAFPFPKPALISQLERGETPWCSVPRGALDGEAPRGISSGYPFLKPAGISHPEQVEEPLNLKLQGEGPSLICPEGVLKRKKEDFILKEEIIEEAQDLMVLSSGPQWCGSQELWFGKTCEEKSRLGRWPGYLNGGRMESSTNDIIEVIVKDEMISVEESSGNTDVNNLLGIHHKILNEQIFYICEECGKCFDQNEDFDQHQKTHNGEKVYGCKECGKAFSFRSHCIAHQRIHSGVKPYECQECAKAFVWKSNLIRHQRIHTGEKPFECKECGKGFSQNTSLTQHQRIHTGEKPYTCKECGKSFTRNPALLRHQRMHTGEKPYECKDCGKGFMWNSDLSQHQRVHTGDKPHECTDCGKSFFCKAHLIRHQRIHTGERPYKCNDCGKAFSQNSVLIKHQRRHARDKPYNCQISHLLEH

SEQ ID NO: 100933 - protein, 106 aa, Homo sapiens
  Payload ID: 20104
  Gene Name: zinc finger protein 662
  ENSP ID: ENSP00000408945
MLENYGAVASLAAFPFPKPALISQLERGETPWCSVPRGALDGEAPRGISSGEILKLPGATIWSLRIKPIPKKTVTKQRETRSLVTSFEPLDQALPEAELPQNFSAM

SEQ ID NO: 100934 - protein, 261 aa, Homo sapiens
  Payload ID: 20105
  Gene Name: zinc finger protein 664
  Uniprot ID: Q8N3J9
  ENSP ID: ENSP00000337320
MIYKCPMCREFFSERADLFMHQKIHTAEKPHKCDKCDKGFFHISELHIHWRDHTGEKVYKCDDCGKDFSTTTKLNRHKKIHTVEKPYKCYECGKAFNWSSHLQIHMRVHTGEKPYVCSECGRGFSNSSNLCMHQRVHTGEKPFKCEECGKAFRHTSSLCMHQRVHTGEKPYKCYECGKAFSQSSSLCIHQRVHTGEKPYRCCGCGKAFSQSSSLCIHQRVHTGEKPFKCDECGKAFSQSTSLCIHQRVHTKERNHLKISVI

SEQ ID NO: 100935 - protein, 261 aa, Homo sapiens; identical to SEQ ID NO: 100934
  Payload ID: 20105
  Gene Name: zinc finger protein 664
  Uniprot ID: Q8N3J9
  ENSP ID: ENSP00000376205

SEQ ID NO: 100936 - protein, 261 aa, Homo sapiens; identical to SEQ ID NO: 100934
  Payload ID: 20105
  Gene Name: zinc finger protein 664
  Uniprot ID: Q8N3J9
  ENSP ID: ENSP00000440645

SEQ ID NO: 100937 - protein, 261 aa, Homo sapiens; identical to SEQ ID NO: 100934
  Payload ID: 20105
  Gene Name: zinc finger protein 664
  Uniprot ID: Q8N3J9
  ENSP ID: ENSP00000441405

SEQ ID NO: 100938 - protein, 678 aa, Homo sapiens
  Payload ID: 20106
  Gene Name: zinc finger protein 665
  Uniprot ID: Q9H7R5
  ENSP ID: ENSP00000379702
MALPQGQLTFKDVAIEFSQEEWTCLDPAQKTLYRDVMLENYRNLVSLDISCKCVNTDLPPKGKNNMGEAFYTVKLERLESCDTVGLSFQEVQKNTYDFECQWKDDEGNYKTVLMLQKENLPGRRAQRDRRAAGNRHIENQLGVSFQSHLPELQQFQHEGKIYEYNQVEKSPNNRGKHYKCDECGKVFSQNSRLTSHKRIHTGEKPYQCNKCGKAFTVRSNLTIHQVIHTGEKPYKCNECGKVFSQPSNLAGHQRIHTGEKPYKCNECGKAFRAHSKLTTHQVIHTGEKPYKCKECGKCFTQNSHLASHRRIHTGEKPYKCNECGKAFSVRSSLTTHQTIHTGEKPYKCNECGKVFRHNSYLAKHRRIHTGEKPYKCNECGKAFSMHSNLTKHQIIHTGEKPFKCNECVKVFTQYSHLANHRRIHTGEKPYRCDECGKAFSVRSSLTTHQAIHTGEKPYKCNDCGKVFTQNSHLASHRGIHSGEKPYKCDECGKAFSQTSQLARHWRVHTGEKPYKCNECGKAFSVHSSLTIHQTIHTGQKPYKCNDCGKVFRHNSYLAIHQRIHTGEKPYKCNECGKAFSVHSNLATHQVIHTGEKPYKCNECGKVFTQNSHLANHRRIHTGEKPYRCNECGKAFSVRSTLTTHMAVHTGDKPYKCNQCGKVFTQNSNLAKHRRIHSG

SEQ ID NO: 100939 - protein, 613 aa, Homo sapiens
  Payload ID: 20106
  Gene Name: zinc finger protein 665
  Uniprot ID: Q9H7R5
  ENSP ID: ENSP00000469154
MGEAFYTVKLERLESCDTVGLSFQEVQKNTYDFECQWKDDEGNYKTVLMLQKENLPGRRAQRDRRAAGNRHIENQLGVSFQSHLPELQQFQHEGKIYEYNQVEKSPNNRGKHYKCDECGKVFSQNSRLTSHKRIHTGEKPYQCNKCGKAFTVRSNLTIHQVIHTGEKPYKCNECGKVFSQPSNLAGHQRIHTGEKPYKCNECGKAFRAHSKLTTHQVIHTGEKPYKCKECGKCFTQNSHLASHRRIHTGEKPYKCNECGKAFSVRSSLTTHQTIHTGEKPYKCNECGKVFRHNSYLAKHRRIHTGEKPYKCNECGKAFSMHSNLTKHQIIHTGEKPFKCNECVKVFTQYSHLANHRRIHTGEKPYRCDECGKAFSVRSSLTTHQAIHTGEKPYKCNDCGKVFTQNSHLASHRGIHSGEKPYKCDECGKAFSQTSQLARHWRVHTGEKPYKCNECGKAFSVHSSLTIHQTIHTGQKPYKCNDCGKVFRHNSYLAIHQRIHTGEKPYKCNECGKAFSVHSNLATHQVIHTGEKPYKCNECGKVFTQNSHLANHRRIHTGEKPYRCNECGKAFSVRSTLTTHMAVHTGDKPYKCNQCGKVFTQNSNLAKHRRIHSG

SEQ ID NO: 100940 - protein, 610 aa, Homo sapiens
  Payload ID: 20107
  Gene Name: zinc finger protein 667
  Uniprot ID: Q5HYK9
  ENSP ID: ENSP00000292069
MPSARGKSKSKAPITFGDLAIYFSQEEWEWLSPIQKDLYEDVMLENYRNLVSLGLSFRRPNVITLLEKGKAPWMVEPVRRRRAPDSGSKCETKKLPPNQCNKSGQSICQKLVSAQQKAPTRKSGCNKNSVLVKPKKGHSGKKPLKCNDCGKTFSRSFSLKLHQNIHTGEKPFECSNCRKAFRQISSILLHQRIHSGKKSHECNKCGESFNQRTTLILHMRIHDGKEILDCGKALSQCQSFNIHQKIHVVGNVCQCRKCGKAFNQMSSLLLHKKIHNGKKTHKYNKCGRGFKKKSVFVVHKRIHAGEKIPENAKALSQSLQQRSHHLENPFKCRKCGKLFNRISPLMLHQRIHTSEKPYKCDKCDKFFRRLSTLILHLRIHNGEKLYRCNKCEKVCNRHSSLIQHQKVHTKKKKLFECKECGKMFSGTANLKIHQNIHSEEKPFKCNKCSKVFGRQSFLIEHQRIHTGEKPYQCEECGKAFSHRISLTRHKRIHTEDRPYECDQCGKAFSQSAHLAQHERIHTGEKPYTCKTCGKAFSQRTSLILHERSHTGEKPYECNECGKAFSSGSDLIRHQRSHSSEKPYECSKCGKAYSRSSSLIRHQNTHSEEKA

SEQ ID NO: 100941 - protein, 610 aa, Homo sapiens; identical to SEQ ID NO: 100940
  Payload ID: 20107
  Gene Name: zinc finger protein 667
  Uniprot ID: Q5HYK9
  ENSP ID: ENSP00000439402

SEQ ID NO: 100942 - protein, 84 aa, Homo sapiens
  Payload ID: 20107
  Gene Name: zinc finger protein 667
  ENSP ID: ENSP00000464708
MPSARGKSKSKAPITFGDLAIYFSQEEWEWLSPIQKDLYEDVMLENYRNLVSLGLSFRRPNVITLLEKGKAPWMVEPVRRRRAP

SEQ ID NO: 100943 - protein, 91 aa, Homo sapiens
  Payload ID: 20107
  Gene Name: zinc finger protein 667
  ENSP ID: ENSP00000467627
MPSARGKSKSKAPITFGDLAIYFSQEEWEWLSPIQKDLYEDVMLENYRNLVSLGLSFRRPNVITLLEKGKAPWMVEPVRRRRAPGWTTMMA

SEQ ID NO: 100944 - protein, 158 aa, Homo sapiens
  Payload ID: 20107
  Gene Name: zinc finger protein 667
  ENSP ID: ENSP00000468466
MPSARGKSKSKAPITFGDLAIYFSQEEWEWLSPIQKDLYEDVMLENYRNLVSLGLSFRRPNVITLLEKGKAPWMVEPVRRRRAPDSGSKCETKKLPPNQCNKSGQSICQKLVSAQQKAPTRKSGCNKNSVLVKPKKGHSGKKPLKCNDCGKTFSRSFS

SEQ ID NO: 100945 - protein, 127 aa, Homo sapiens
  Payload ID: 20107
  Gene Name: zinc finger protein 667
  ENSP ID: ENSP00000468550
MPSARGKSKSKAPITFGDLAIYFSQEEWEWLSPIQKDLYEDVMLENYRNLVSLGLSFRRPNVITLLEKGKAPWMVEPVRRRRAPELTEASPEAKEVPAPCLYSLLNQEPIEPLLFINYPLKYLFIAI

SEQ ID NO: 100946 - protein, 392 aa, Homo sapiens [sequence omitted]

SEQ ID NO: 100947 - protein, 619 aa, Homo sapiens
  Payload ID: 20108
  Gene Name: zinc finger protein 668
  Uniprot ID: Q96K58
  ENSP ID: ENSP00000300849
MEVEAAEARSPAPGYKRSGRRYKCLSCTKTFPNAPRAARHAATHGPADCSEEVAEVKPKPETEAKAEEASGEKVSGSAAKPRPYACPLCPKAYKTAPELRSHGRSHTGEKPFPCPECGRRFMQPVCLRVHLASHAGELPFRCAHCPKAYGALSKLKIHQRGHTGERPYACADCGKSFADPSVFRKHRRTHAGLRPYSCERCGKAYAELKDLRNHERSHTGERPFLCSECGKSFSRSSSLTCHQRIHAAQKPYRCPACGKGFTQLSSYQSHERTHSGEKPFLCPRCGRMFSDPSSFRRHQRAHEGVKPYHCEKCGKDFRQPADLAMHRRVHTGDRPFKCLQCDKTFVASWDLKRHALVHSGQRPFRCEECGRAFAERASLTKHSRVHSGERPFHCNACGKSFVVSSSLRKHERTHRSSEAAGVPPAQELVVGLALPVGVAGESSAAPAAGAGLGDPPAGLLGLPPESGGVMATQWQVVGMTVEHVECQDAGVREAPGPLEGAGEAGGEEADEKPPQFVCRECKETFSTMTLLRRHERSHPELRPFPCTQCGKSFSDRAGLRKHSRTHSSVRPYTCPHCPKAFLSASDLRKHERTHPVPMGTPTPLEPLVALLGMPEEGPA

SEQ ID NO: 100948 - protein, 619 aa, Homo sapiens; identical to SEQ ID NO: 100947
  Payload ID: 20108
  Gene Name: zinc finger protein 668
  Uniprot ID: Q96K58
  ENSP ID: ENSP00000378434

SEQ ID NO: 100949 - protein, 92 aa, Homo sapiens
  Payload ID: 20108
  Gene Name: zinc finger protein 668
  ENSP ID: ENSP00000390671
MEVEAAEARSPAPGYKRSGRRYKCLSCTKTFPNAPRAARHAATHGPADCSEEVAEVKPKPETEAKAEEASGEKVSGSAAKPRPYACPLCPKA

SEQ ID NO: 100950 - protein, 642 aa, Homo sapiens
  Payload ID: 20108
  Gene Name: zinc finger protein 668
  Uniprot ID: Q96K58
  ENSP ID: ENSP00000403975
MSEPGMLGRKDVWVPRETPFTKAMEVEAAEARSPAPGYKRSGRRYKCLSCTKTFPNAPRAARHAATHGPADCSEEVAEVKPKPETEAKAEEASGEKVSGSAAKPRPYACPLCPKAYKTAPELRSHGRSHTGEKPFPCPECGRRFMQPVCLRVHLASHAGELPFRCAHCPKAYGALSKLKIHQRGHTGERPYACADCGKSFADPSVFRKHRRTHAGLRPYSCERCGKAYAELKDLRNHERSHTGERPFLCSECGKSFSRSSSLTCHQRIHAAQKPYRCPACGKGFTQLSSYQSHERTHSGEKPFLCPRCGRMFSDPSSFRRHQRAHEGVKPYHCEKCGKDFRQPADLAMHRRVHTGDRPFKCLQCDKTFVASWDLKRHALVHSGQRPFRCEECGRAFAERASLTKHSRVHSGERPFHCNACGKSFVVSSSLRKHERTHRSSEAAGVPPAQELVVGLALPVGVAGESSAAPAAGAGLGDPPAGLLGLPPESGGVMATQWQVVGMTVEHVECQDAGVREAPGPLEGAGEAGGEEADEKPPQFVCRECKETFSTMTLLRRHERSHPELRPFPCTQCGKSFSDRAGLRKHSRTHSSVRPYTCPHCPKAFLSASDLRKHERTHPVPMGTPTPLEPLVALLGMPEEGPA

SEQ ID NO: 100951 - protein, 108 aa, Homo sapiens
  Payload ID: 20108
  Gene Name: zinc finger protein 668
  ENSP ID: ENSP00000412340
MEVEAAEARSPAPGYKRSGRRYKCLSCTKTFPNAPRAARHAATHGPADCSEEVAEVPHRRAPLPLLRVREELLPLILAHVPPAHPRGTEALPLPGLRQGLHAAQFLPE

SEQ ID NO: 100952 - protein, 163 aa, Homo sapiens
  Payload ID: 20108
  Gene Name: zinc finger protein 668
  ENSP ID: ENSP00000416853
MEVEAAEARSPAPGYKRSGRRYKCLSCTKTFPNAPRAARHAATHGPADCSEEVAEVKPKPETEAKAEEASGEKVSGSAAKPRPYACPLCPKAYKTAPELRSHGRSHTGEKPFPCPECGRRFMQPVCLRVHLASHAGELPFRCAHCPKAYGALSKLKIHQRGHT

SEQ ID NO: 100953 - protein, 619 aa, Homo sapiens; identical to SEQ ID NO: 100947
  Payload ID: 20108
  Gene Name: zinc finger protein 668
  Uniprot ID: Q96K58
  ENSP ID: ENSP00000440149

SEQ ID NO: 100954 - protein, 619 aa, Homo sapiens; identical to SEQ ID NO: 100947
  Payload ID: 20108
  Gene Name: zinc finger protein 668
  Uniprot ID: Q96K58
  ENSP ID: ENSP00000441349

SEQ ID NO: 100955 - protein, 642 aa, Homo sapiens; identical to SEQ ID NO: 100950
  Payload ID: 20108
  Gene Name: zinc finger protein 668
  Uniprot ID: Q96K58
  ENSP ID: ENSP00000442573

SEQ ID NO: 100956 - protein, 464 aa, Homo sapiens
  Payload ID: 20109
  Gene Name: zinc finger protein 669
  Uniprot ID: Q96BR6
  ENSP ID: ENSP00000342818
MVSGLRLASRSGEEGWLKPAVARLGPPRHRLRNLRTESPWRSRGSVLFCSGPGRAGRAAEPLHPVCTCGRHFRRPEPCREPLASPIQDSVAFEDVAVNFTQEEWALLDSSQKNLYREVMQETCRNLASVGSQWKDQNIEDHFEKPGKDIRNHIVQRLCESKEDGQYGEVVSQIPNLDLNENISTGLKPCECSICGKVFVRHSLLNRHILAHSGYKPYGEKQYKCEQCGKFFVSVPGVRRHMIMHSGNPAYKCTICGKAFYFLNSVERHQRTHTGEKPYKCKQCGKAFTVSGSCLIHERTHTGEKPYECKECGKTFRFSCSFKTHERTHTGERPYKCTKCDKAFSCSTSLRYHGSIHTGERPYECKQCGKAFSRLSSLCNHRSTHTGEKPYECKQCDQAFSRLSSLHLHERIHTGEKPYECKKCGKAYTRSSHLTRHERSHDIEAGCSDSAYNPSTLGGQGVWIA

SEQ ID NO: 100957 - protein, 71 aa, Homo sapiens
  Payload ID: 20109
  Gene Name: zinc finger protein 669
  ENSP ID: ENSP00000355456
MDSVAFEDVAVNFTQEEWALLDSSQKNLYREVMQETCRNLASVEIISYRDCVKVKKMVSMEKLSAKFQILI

SEQ ID NO: 100958 - protein, 61 aa, Homo sapiens
  Payload ID: 20109
  Gene Name: zinc finger protein 669
  ENSP ID: ENSP00000355457
MDSVAFEDVAVNFTQEEWALLDSSQKNLYREVMQETCRNLASEANGKTRILKITSKNLGKI

SEQ ID NO: 100959 - protein, 378 aa, Homo sapiens
  Payload ID: 20109
  Gene Name: zinc finger protein 669
  Uniprot ID: Q96BR6
  ENSP ID: ENSP00000404370
MDSVAFEDVAVNFTQEEWALLDSSQKNLYREVMQETCRNLASVGSQWKDQNIEDHFEKPGKDIRNHIVQRLCESKEDGQYGEVVSQIPNLDLNENISTGLKPCECSICGKVFVRHSLLNRHILAHSGYKPYGEKQYKCEQCGKFFVSVPGVRRHMIMHSGNPAYKCTICGKAFYFLNSVERHQRTHTGEKPYKCKQCGKAFTVSGSCLIHERTHTGEKPYECKECGKTFRFSCSFKTHERTHTGERPYKCTKCDKAFSCSTSLRYHGSIHTGERPYECKQCGKAFSRLSSLCNHRSTHTGEKPYECKQCDQAFSRLSSLHLHERIHTGEKPYECKKCGKAYTRSSHLTRHERSHDIEAGCSDSAYNPSTLGGQGVWIA

SEQ ID NO: 100960 - protein, 139 aa, Homo sapiens
  Payload ID: 20109
  Gene Name: zinc finger protein 669
  ENSP ID: ENSP00000429550
MVSGLRLASRSGEEGWLKPAVARLGPPRHRLRNLRTESPWRSRGSVLFCSGPGRAGRAAEPLHPVCTCGRHFRRPEPCREPLASPIQDSVAFEDVAVNFTQEEWALLDSSQKNLYREVMQETCRNLASVEIISYRDCVK

SEQ ID NO: 100961 - protein, 389 aa, Homo sapiens
  Payload ID: 20110
  Gene Name: zinc finger protein 670
  Uniprot ID: Q9BS34
  ENSP ID: ENSP00000355459
MDSVSFEDVAVAFTQEEWALLDPSQKNLYRDVMQEIFRNLASVGNKSEDQNIQDDFKNPGRNLSSHVVERLFEIKEGSQYGETFSQDSNLNLNKKVSTGVKPCECSVCGKVFICHSALHRHILSHIGNKLFECEECPEKLYHCKQCGKAFISLTSVDRHMVTHTSNGPYKGPVYEKPFDFPSVFQMPQSTYTGEKTYKCKHCDKAFNYSSYLREHERTHTGEKPYACKKCGKSFTFSSSLRQHERSHTGEKPYECKECGKAFSRSTYLGIHERTHTGEKPYECIKCGKAFRCSRVLRVHERTHSGEKPYECKQCGKAFKYSSNLCEHERTHTGVKPYGCKECGKSFTSSSALRSHERTHTGEKPYECKKCGKAFSCSSSLRKHERAYMW

SEQ ID NO: 100962 - protein, 534 aa, Homo sapiens
  Payload ID: 20111
  Gene Name: zinc finger protein 671
  Uniprot ID: Q8TAW3
  ENSP ID: ENSP00000321848
MLSPVSRDASDALQGRKCLRPRSRRLPLPAAVRAHGPMAELTDSARGCVVFEDVFVYFSREEWELLDDAQRLLYHDVMLENFALLASLGIAFSRSRAVMKLERGEEPWVYDQVDMTSATEREAQRGLRPGCWHGVEDEEVSSEQSIFVAGVSEVRTLMAELESHPCDICGPILKDTLHLAKYHGGKARQKPYLCGACGKQFWFSTDFDQHQNQPNGGKLFPRKEGRDSVKSCRVHVPEKTLTCGKGRRDFSATSGLLQHQASLSSMKPHKSTKLVSGFLMGQRYHRCGECGKAFTRKDTLARHQRIHTGERPYECNECGKFFSQSYDLFKHQTVHTGERPYECSECGKFFRQISGLIEHRRVHTGERLYQCGKCGKFFSSKSNLIRHQEVHTGARPYVCSECGKEFSRKHTLVLHQRTHTGERPYECSECGKAFSQSSHLNVHWRIHSSDYECSRCGKAFSCISKLIQHQKVHSGEKPYECSKCGKAFTQRPNLIRHWKVHTGERPYVCSECGREFIRKQTLVLHQRVHAGEKL

SEQ ID NO: 100963 - protein, 556 aa, Homo sapiens
  Payload ID: 20111
  Gene Name: zinc finger protein 671
  ENSP ID: ENSP00000338670
MLSPVSRDASDALQGRKCLRPRSRRLPLPAAVRAHGPMAELTDSARGCVVFEDVFVYFSREEWELLDDAQRLLYHDVMLENFALLASLGIAFSRSRAVMKLERGEEPWVYDQVDMTSATEREAQRGLRPGCWHGVEDEEVSSEQSIFVAGVSEVRTLMAELESHPCDICGPILKDTLHLAKYHGGKARQKPYLCGACGKQFWFSTDFDQHQNQPNGGKLFPRKEGRDSVKSCRVHVPEKTLTCGKGRRDFSATSGLLQHQASLSSMKPHKSTKLVSGFLMGQRYHRCGECGKAFTRKDTLARHQRIHTGERPYECNECGKFFSQSYDLFKHQTVHTGERPYECSECGKFFRQISGLIEHRRVHTGERLYQCGKCGKFFSSKSNLIRHQEVHTGARPYVCSECGKEFSRKHTLVLHQRTHTGERPYECSECGKAFSQSSHLNVHWRIHSSDYECSRCGKAFSCISKLIQHQKVHSGEKPYECSKCGKAFTQRPNLIRHWKVHTGERPYVCSECGREFIRKQTLVLHQRVHAGEKLKSVANVGESLRPMPLTYYMVGN

SEQ ID NO: 100964 - protein, 56 aa, Homo sapiens
  Payload ID: 20111
  Gene Name: zinc finger protein 671
  ENSP ID: ENSP00000468976
MLSPVSRDASDALQGRKCLRPRSRRLPLPAAVRAHGPMAELTDSARELHFPDHVQS

SEQ ID NO: 100965 - protein, 56 aa, Homo sapiens; identical to SEQ ID NO: 100964
  Payload ID: 20111
  Gene Name: zinc finger protein 671
  ENSP ID: ENSP00000470742

SEQ ID NO: 100966 - protein, 107 aa, Homo sapiens
  Payload ID: 20111
  Gene Name: zinc finger protein 671
  ENSP ID: ENSP00000471087
MLSPVSRDASDALQGRKCLRPRSRRLPLPAAVRAHGPMAELTDSARVGAASSGPSVTLSPTPNRKVPAAPVSQDSDALLGRGPISVWVGVGELRAEGTAQVKARGCC

SEQ ID NO: 100967 - protein, 452 aa, Homo sapiens
  Payload ID: 20112
  Gene Name: zinc finger protein 672
  Uniprot ID: Q499Z4
  ENSP ID: ENSP00000421915
MFATSGAVAAGKPYSCSECGKSFCYSSVLLRHERAHGGDGRFRCLECGERCARAADLRAHRRTHAGQTLYICSECGQSFRHSGRLDLHLGAHRQRCRTCPCRTCGRRFPHLPALLLHRRRQHLPERPRRCPLCARTFRQSALLFHQARAHPLGTTSDPAAPPHRCAQCPRAFRSGAGLRSHARIHVSRSPTRPRVSDAHQCGVCGKCFGKSSTLTRHLQTHSGEKPFKCPECGKGFLESATLVRHQRTHTGEKPYACGDCGRCFSESSTLLRHRRSHQGERPHACATCGKGFGQRSDLVVHQRIHTGEKPFACPECGRRFSDRSDLTKHRRTHTGEKPYRCELCGKRFTCVSNLNVHRRNHAGHKPHKCPECSKAFSVASKLALHRKTHLGERPAECAECGKCFSHSRSLSQHQRAHTRARTAAAVAIQSAVGTALVFEGPAEQEKPGFSVS

SEQ ID NO: 100968 - protein, 3 aa, Homo sapiens
  Payload ID: 20112
  Gene Name: zinc finger protein 672
  ENSP ID: ENSP00000422534
MFA

SEQ ID NO: 100969 - protein, 37 aa, Homo sapiens
  Payload ID: 20112
  Gene Name: zinc finger protein 672
  ENSP ID: ENSP00000426199
MFATSGAVAAGKPYSCSECGKSFCYSSVLLRHERAHG

SEQ ID NO: 100970 - protein, 69 aa, Homo sapiens
  Payload ID: 20112
  Gene Name: zinc finger protein 672
  ENSP ID: ENSP00000427021
MFATSGAVAAGKPYSCSECGKSFCYSSVLLRHERAHGGDGRFRCLECGERCARAADLRAHRRTHAGQTL

SEQ ID NO: 100971 - protein, 575 aa, Homo sapiens
  Payload ID: 20113
  Gene Name: zinc finger protein 674
  Uniprot ID: Q2M3X9
  ENSP ID: ENSP00000428248
MAMSQESLTFKDVFVDFTLEEWQQLDSAQKNLYRDVMLENYSHLVSVGHLVGKPDVIFRLGPGDESWMADGGTPVRTCAVWEVDEQIDHYKESQDKFLWQAAFIGKETLKDESGQECKICRKIIYLNTDFVSVKQRLPKYYSWERCSKHHLNFLGQNRSYVRKKDDGCKAYWKVCLHYNLHKAQPAERFFDPNQRGKALHQKQALRKSQRSQTGEKLYKCTECGKVFIQKANLVVHQRTHTGEKPYECCECAKAFSQKSTLIAHQRTHTGEKPYECSECGKTFIQKSTLIKHQRTHTGEKPFVCDKCPKAFKSSYHLIRHEKTHIRQAFYKGIKCTTSSLIYQRIHTSEKPQCSEHGKASDEKPSPTKHWRTHTKENIYECSKCGKSFRGKSHLSVHQRIHTGEKPYECSICGKTFSGKSHLSVHHRTHTGEKPYECRRCGKAFGEKSTLIVHQRMHTGEKPYKCNECGKAFSEKSPLIKHQRIHTGERPYECTDCKKAFSRKSTLIKHQRIHTGEKPYKCSECGKAFSVKSTLIVHHRTHTGEKPYECRDCGKAFSGKSTLIKHQRSHTGDKNL

SEQ ID NO: 100972 - protein, 581 aa, Homo sapiens
  Payload ID: 20113
  Gene Name: zinc finger protein 674
  Uniprot ID: Q2M3X9
  ENSP ID: ENSP00000429148
MAMSQESLTFKDVFVDFTLEEWQQLDSAQKNLYRDVMLENYSHLVSVGHLVGKPDVIFRLGPGDESWMADGGTPVRTCAGEDRPEVWEVDEQIDHYKESQDKFLWQAAFIGKETLKDESGQECKICRKIIYLNTDFVSVKQRLPKYYSWERCSKHHLNFLGQNRSYVRKKDDGCKAYWKVCLHYNLHKAQPAERFFDPNQRGKALHQKQALRKSQRSQTGEKLYKCTECGKVFIQKANLVVHQRTHTGEKPYECCECAKAFSQKSTLIAHQRTHTGEKPYECSECGKTFIQKSTLIKHQRTHTGEKPFVCDKCPKAFKSSYHLIRHEKTHIRQAFYKGIKCTTSSLIYQRIHTSEKPQCSEHGKASDEKPSPTKHWRTHTKENIYECSKCGKSFRGKSHLSVHQRIHTGEKPYECSICGKTFSGKSHLSVHHRTHTGEKPYECRRCGKAFGEKSTLIVHQRMHTGEKPYKCNECGKAFSEKSPLIKHQRIHTGERPYECTDCKKAFSRKSTLIKHQRIHTGEKPYKCSECGKAFSVKSTLIVHHRTHTGEKPYECRDCGKAFSGKSTLIKHQRSHTGDKNL

SEQ ID NO: 100973 - protein, 99 aa, Homo sapiens
  Payload ID: 20113
  Gene Name: zinc finger protein 674
  ENSP ID: ENSP00000429646
MAMSQESLTFKDVFVDFTLEEWQQLDSAQKNLYRDVMLENYSHLVSVGHLVGKPDVIFRLGPGDESWMADGGTPVRTCAVEMGFLHVHQAGLELPASGD

SEQ ID NO: 100974 - protein, 568 aa, Homo sapiens
  Payload ID: 20114
  Gene Name: zinc finger protein 675
  Uniprot ID: Q8TD23
  ENSP ID: ENSP00000352836
MGLLTFRDVAIEFSLEEWQCLDTAQRNLYKNVILENYRNLVFLGIAVSKQDLITCLEQEKEPLTVKRHEMVNEPPVMCSHFAQEFWPEQNIKDSFEKVTLRRYEKCGNDNFQLKGCKSVDECKLHKGGYNGLNQCLPTMQSKMFQCDKYVKVFNKFSHSDRHKIKHMENKPFKCKECGRSFCMLSHLTRHERNYTKVNFCKCEECEKAVNQSSKLTKHKRIYTCEKLYKCQECDRTFNQFSNLTEYKKDYAREKPYKCEECGKAFNQSSHLTTHKIIHTGEKPYKCEECGKAFNQFSNLTTHKKIHTGEQPYICEECGKAFTQSSTLTTHKRIHTGEKPYKCEECGKAFNRSSKLTEHKNIHTGEQPYKCEECGKAFNRSSNLTEHRKIHTEEKPYKCKECGKAFKHSSALTTHKRIHTGEKPYKCEECGKAFNRSSKLTEHKKLHTGKKPYKCEECGKAFIQSSKLTEHKKIHSGEIPYKCEECGKAFKHSSSLTTHKRIHTGEKPYKCEECGKAFSRSSKLTEHKIIHTGEKPYKCERCDKAFNQSANLTKHKKIHTGEKLQNWNV

SEQ ID NO: 100975 - protein, 77 aa, Homo sapiens
  Payload ID: 20114
  Gene Name: zinc finger protein 675
  ENSP ID: ENSP00000469271
MGLLTFRDVAIEFSLEEWQCLDTAQRNLYKNVILENYRNLVFLGIAVSKQDLITCLEQEKEPLTVKRHEMVNEPPGK

SEQ ID NO: 100976 - protein, 117 aa, Homo sapiens
  Payload ID: 20114
  Gene Name: zinc finger protein 675
  ENSP ID: ENSP00000469379
MGLLTFRDVAIEFSLEEWQCLDTAQRNLYKNVILENYRNLVFLGIAVSKQDLITCLEQEKEPLTVKRHEMVNEPPGSVGQTQQVVPHVRSNEMHHDGTLKNESEVTAHPLGPLWIPA

SEQ ID NO: 100977 - protein, 88 aa, Homo sapiens
  Payload ID: 20114
  Gene Name: zinc finger protein 675
  ENSP ID: ENSP00000472142
MGLLTFRDVAIEFSLEEWQCLDTAQRNLYKNVILENYRNLVFLGIAVSKQDLITCLEQEKEPLTVKRHEMVNEPPAVDKHPCTFYECD

SEQ ID NO: 100978 - protein, 118 aa, Homo sapiens
  Payload ID: 20114
  Gene Name: zinc finger protein 675
  ENSP ID: ENSP00000472170
MGLLTFRDVAIEFSLEEWQCLDTAQRNLYKNVILENYRNLVFLGIAVSKQDLITCLEQEKEPLTVKRHEMVNEPPGLPLMPSRSWTVLLPSLLTATSLPDSPASACRVPAIAGARSHA

SEQ ID NO: 100979 - protein, 104 aa, Homo sapiens
  Payload ID: 20114
  Gene Name: zinc finger protein 675
  ENSP ID: ENSP00000473035
MVNEPPVMCSHFAQEFWPEQNIKDSFEKVTLRRYEKCGNDNFQLKGCKSVDECKLHKGGYNGLNQCLPTMQSKMFQCDKYVKVFNKFSHSDRHKIKHMENKPFK

SEQ ID NO: 100980 - protein, 101 aa, Homo sapiens
  Payload ID: 20114
  Gene Name: zinc finger protein 675
  ENSP ID: ENSP00000473168
MGLLTFRDVAIEFSLEEWQCLDTAQRNLYKNVILENYRNLVFLGIAVSKQDLITCLEQEKEPLTVKRHEMVNEPPESRPVVQPEVQWYNLCLLQPPPPRFK

SEQ ID NO: 100981 - protein, 79 aa, Homo sapiens
  Payload ID: 20114
  Gene Name: zinc finger protein 675
  ENSP ID: ENSP00000473217
MGLLTFRDVAIEFSLEEWQCLDTAQRNLYKNVILENYRNLVFLGIAVSKQDLITCLEQEKEPLTVKRHEMVNEPPGQKQ

SEQ ID NO: 100982 - protein, 588 aa, Homo sapiens
  Payload ID: 20115
  Gene Name: zinc finger protein 676
  Uniprot ID: Q8N7Q3
  ENSP ID: ENSP00000378783
MLENYRNLVFLGIAAFKPDLIIFLEQGKEPWNMKRHEMVEEPPVICSHFSQEFWPEQGIEDSFQKMILRRYDKCGHENLHLKISCTNVDECNVHKEGYNKLNQSLTTTQSKVFQCGKYANVFHKCSNSNRHKIRHTGEKGLKCKEYVRSFCMLSHLSQHERIYTRENSYKCEENGKAFNWSSTLTYYKSIHTGEKPYKCEECGKAFSKFSILTKHKVIHTGEKPYKCEECGKAFNRSSILTKHKIIHTGEKPYKCEECGKGFSSVSTLNTHKAIHAEEKPYKCEECGKASNSSSKLMEHKRIHTGEKPYKCEECGKAFSWSSSLTEHKRIHAGEKPYKCEECGKAFNRSSILTKHKIIHTGEKPYKCEGCGKAFSKVSTLNTHKAIHAEEKPYKCEECGKASNSSSKLMEHKRIHTGEKPYKCEECGKAFSWSSSLTEHKRIHAGEKPYKCEECGKAFTWSSSFTKHKRIHAAEKPYKCEECGKGFSTFSILTKHKIIHTGEKRYKCEECGKAFSWSSILTEHKIIHTGEKPYKCEECGKAFSRSSSLTRHKRIHTGEKPYKCEECGKAFKSSSTVSYHKKIHTGENP

SEQ ID NO: 100983 - protein, 588 aa, Homo sapiens; identical to SEQ ID NO: 100982
  Payload ID: 20115
  Gene Name: zinc finger protein 676
  Uniprot ID: Q8N7Q3
  ENSP ID: ENSP00000380310

SEQ ID NO: 100984 - protein, 568 aa, Homo sapiens
  Payload ID: 20115
  Gene Name: zinc finger protein 676
  ENSP ID: ENSP00000483094
MDNPRYGMPFRRAGECPGAERHLLVPCFFGKGALTFRDVAIEFSLEEWQCLDSTQQNLYRNVMLENYRNLVFLGIAAFKPDLIIFLEQGKEPWNMKRHEMVEEPPVICSHFSQEFWPEQGIEDSFQKMILRRYDKCGHENLHLKISCTNVDECNVHKEGYNKLNQSLTTTQSKVFQCGKYANVFHKCSNSNRHKIRHTGEKGLKCKEYVRSFCMLSHLSQHERIYTRENSYKCEENGKAFNWSSTLTYYKSIHTGEKPYKCEECGKAFSKFSILTKHKVIHTGEKPYKCEECGKAFNRSSILTKHKIIHTGEKPYKCEECGKGFSSVSTLNTHKRIHTGEKPYKCEECGKAFSWSSSLTEHKRIHAGEKPYKCEECGKAFNRSSILTKHKIIHTGEKPYKCEGCGKAFSKVSTLNTHKRIHTGEKPYKCEECGKAFSWSSSLTEHKRIHAGEKPYKCEECGKAFTWSSSFTKHKRIHAAEKPYKCEECGKGFSTFSILTKHKIIHTGEKRYKCEECGKAFSWSSILTEHKIIHTGEKPYKCEECGKAFSRSSSLTTQENSYWRETLQM

SEQ ID NO: 100985 - protein, 584 aa, Homo sapiens
  Payload ID: 20116
  Gene Name: zinc finger protein 677
  Uniprot ID: Q86XU0
  ENSP ID: ENSP00000334394
MALSQGLFTFKDVAIEFSQEEWECLDPAQRALYRDVMLENYRNLLSLDEDNIPPEDDISVGFTSKGLSPKENNKEELYHLVILERKESHGINNFDLKEVWENMPKFDSLWDYDVKNYKGMPLTCNKNLTHRKDQQHNKSSIHFSLKQSVSIRDSAHQYFIHDKPFIRNLLKLKNNIRYAGNKYVKCFENKIGLSLQAQLAELQRFQTGEKMYECNPVEKSINSSSVSPLPPCVKNICNKYRKILKYPLLHTQYGRTHIREKSYKCNDCGKAFSKSSNLTNHQRIHSGQRPYKCNECGKAFNQCSNLTRHQRVHTGEKPYQCNICGKVCSQNSNLASHQRMHTGEKPYKCNECGKAFIQRSHLWGHERIHTGEKPYKCNECDKAFAERSSLTQHKRIHTGEKPYICNECGKAFKQCSHLTRHQNIHPGEKPHKCNVCGRAFIQSSSLVEHQRIHTGEKPYKCNKCDKAFIKRSHLWGHQRTHTGEKPYKCTECGKAFTERSNLTQHKKIHTGEKPYKCTECGKAFTQFANLTRHQKIHIEKKHCKHNIHGNALFQSSNLGDHQKSYNREKHIKYNETKIKYSSCT

SEQ ID NO: 100986 - protein, 584 aa, Homo sapiens; identical to SEQ ID NO: 100985
  Payload ID: 20116
  Gene Name: zinc finger protein 677
  Uniprot ID: Q86XU0
  ENSP ID: ENSP00000469391

SEQ ID NO: 100987 - protein, 77 aa, Homo sapiens
  Payload ID: 20116
  Gene Name: zinc finger protein 677
  ENSP ID: ENSP00000469701
MALSQGLFTFKDVAIEFSQEEWECLDPAQRALYRDVMLENYRNLLSLDEDNIPPEDGDGQLLVDSPMEEVSLVTEHS

SEQ ID NO: 100988 - protein, 71 aa, Homo sapiens
  Payload ID: 20116
  Gene Name: zinc finger protein 677
  ENSP ID: ENSP00000471071
MALSQGLFTFKDVAIEFSQEEWECLDPAQRALYRDVMLENYRNLLSLDEDNIPPEDGSHLAACGQSTLPLP

SEQ ID NO: 100989 - protein, 68 aa, Homo sapiens
  Payload ID: 20116
  Gene Name: zinc finger protein 677
  ENSP ID: ENSP00000471266
MALSQGLFTFKDVAIEFSQEEWECLDPAQRALYRDVMLENYRNLLSLDEDNIPPEDGNHPCTSLHFSL

SEQ ID NO: 100990 - protein, 80 aa, Homo sapiens
  Payload ID: 20116
  Gene Name: zinc finger protein 677
  ENSP ID: ENSP00000472132
MALSQGLFTFKDVAIEFSQEEWECLDPAQRALYRDVMLENYRNLLSLDEDNIPPEDAFYSIRELRETLVFLIPYSSKICL

SEQ ID NO: 100991 - protein, 145 aa, Homo sapiens
  Payload ID: 20116
  Gene Name: zinc finger protein 677
  ENSP ID: ENSP00000472416
MALSQGLFTFKDVAIEFSQEEWECLDPAQRALYRDVMLENYRNLLSLDEDNIPPEDDISVGFTSKGLSPKENNKEELYHLVILERKESHGINNFDLKEVWENMPKFDSLWDYDVKNYKGMPLTCNKNLTHRKDQQHNKSSIHFSL

SEQ ID NO: 100992 - protein, 68 aa, Homo sapiens; identical to SEQ ID NO: 100989
  Payload ID: 20116
  Gene Name: zinc finger protein 677
  ENSP ID: ENSP00000472783

SEQ ID NO: 100993 - protein, 525 aa, Homo sapiens
  Payload ID: 20117
  Gene Name: zinc finger protein 678
  Uniprot ID: Q5SXM1
  ENSP ID: ENSP00000344828
MGTISLCIGVCAFEGANTSTSFYKLVYTAILSYSIQDLLPEQDMKDLCQKVTLTRHRSWGLDNLHLVKDWRTVNEGKGQKEYCNRLTQCSSTKSKIFQCIECGRNFSWRSILTEHKRIHTGEKPYKCEECGKVFNRCSNLTKHKRIHTGEKPYKCDECGKVFNWWSQLTNHKKIHTGEKPYKCDECDKVFNWWSQLTSHKKIHSGEKPYPCEECGKAFTQFSNLTQHKRIHTGEKPYKCKECCKAFNKFSNLTQHKRIHTGEKPYKCEECGNVFNECSHLTRHRRIHTGEKPYKCEECGKAFTQFASLTRHKRIHTGEKPYQCEECGKTFNRCSHLSSHKRIHTGEKPYKCEECGRTFTQFSNLTQHKRIHTGEKPYKCKECGKAFNKFSSLTQHRRIHTGVKPYKCEECGKVFKQCSHLTSHKRIHTGEKPYKCKECGKAFYQSSILSKHKRIHTEEKPYKCEECGKAFNQFSSLTRHKRIHTGEKRYKCKECGKGFYQSSIHSKYKRIYTGEEPDKCKKCGSL

SEQ ID NO: 100994 - protein, 227 aa, Homo sapiens
  Payload ID: 20117
  Gene Name: zinc finger protein 678
  ENSP ID: ENSP00000394651
MPGHPESRKTRRILTMLPRLVLNSFPQVILLPNPPKVLRLQGLLAFSDVVIEFSPEEWACLDPAQRNLYRDVMFENYRNLVSLAILSYSIQDLLPEQDMKDLCQKVTLTRHRSWGLDNLHLVKDWRTVNEGKGQKEYCNRLTQCSSTKSKIFQCIECGRNFSWRSILTEHKRIHTGEKPYKCEECGKVFNRCSNLTKHKRIHTGEKPYKCDECGKVFNWWSQLTNHK

SEQ ID NO: 100995 - protein, 525 aa, Homo sapiens; identical to SEQ ID NO: 100993
  Payload ID: 20117
  Gene Name: zinc finger protein 678
  Uniprot ID: Q5SXM1
  ENSP ID: ENSP00000440403

SEQ ID NO: 100996 - protein, 76 aa, Homo sapiens
  Payload ID: 20117
  Gene Name: zinc finger protein 678
  ENSP ID: ENSP00000477097
MGTISLCIGVCAFEGANTSTSFYKLVYTAILSYSIQDLLPEQDMKDLCQKVTLTRHRSWGLDNLHLVKDWRTVNEG

SEQ ID NO: 100997 - protein, 411 aa, Homo sapiens
  Payload ID: 20118
  Gene Name: zinc finger protein 679
  Uniprot ID: Q8IYX0
  ENSP ID: ENSP00000255746
MAKRPGSPGSREMGLLTFRDVVIEFSLEEWQCLDHAQQNLYRDVMLENYRNLVSLGIAVSKPDLITCLEQNKEPWNIKRNEMVTKHPVMCSHFTQDLPPELGIKDSLQKVIPRRYGKSGHDNLQVKTCKSMGECEVQKGGCNEVNQCLSTTQNKIFQTHKCVKVFGKFSNSNRHKTRHTGKKHFKCKKYGKSFCMVSQLHQHQIIHTRENSYQCEECGKPFNCSSTLSKHKRIHTGEKPYRCEECGKAFTWSSTLTKHRRIHTGEKPYTCEECGQAFSRSSTLANHKRIHTGEKPYTCEECGKAFSLSSSLTYHKRIHTGEKPYTCEECGKAFNCSSTLKKHKIIHTGEKPYKCKECGKAFAFSSTLNTHKRIHTGEEPYKCEECDKAFKWSSSLANHKSMHTGEKPYKCE

SEQ ID NO: 100998 - protein, 411 aa, Homo sapiens; identical to SEQ ID NO: 100997
  Payload ID: 20118
  Gene Name: zinc finger protein 679
  Uniprot ID: Q8IYX0
  ENSP ID: ENSP00000416809

SEQ ID NO: 100999 - protein, 530 aa, Homo sapiens
  Payload ID: 20119
  Gene Name: zinc finger protein 680
  Uniprot ID: Q8NEM1
  ENSP ID: ENSP00000309330
MPGPPGSLEMGPLTFRDVAIEFSLEEWQCLDTAQRNLYRKVMFENYRNLVFLGIAVSKPHLITCLEQGKEPWNRKRQEMVAKPPVIYSHFTEDLWPEHSIKDSFQKVILRGYGKCGHENLQLRISCKSVDESKVFKEGYNELNQCLRTTQSKIFQCDKYVKVFHKFSNSNSHKKRNTGKKVFKCKECGKSFCMLSHLTQHIRIHTRENSYKCEECGKVLNWFSELIKHKGIHMGEKPYKCEECGKAFNQSSTLIKHKKIHIEEKPFKCEECGKAFSLFSILSKHKIIHTGDKPYKCDECHKAFNWFATLTNHKRIHTGEKPFKCEECGKDFNQFSNLTKHKKIHTGEKPYKCEECGKAFNQFANLTRHKKIHTGEKSYKCEECGKAFIQSSNLTEHMRIHTGEKPYKCEECGKAFNGCSSLTRHKRIHTRENTYKCEECGKGFTLFSTLTNHKVIHTGEKSYKCDECGNVFNWPATLANHKRIHAREKPYKCEECGKAFNRSSHLTRHKKIHTGEKLYKPEKCDNNFDNT

SEQ ID NO: 101000 - protein, 123 aa, Homo sapiens
  Payload ID: 20119
  Gene Name: zinc finger protein 680
  Uniprot ID: Q8NEM1
  ENSP ID: ENSP00000393506
MPGPPGSLEMGPLTFRDVAIEFSLEEWQCLDTAQRNLYRKVMFENYRNLVFLGIAVSKPHLITCLEQGKEPWNRKRQEMVAKPPESYCVAQADLELLVSSYLTALASLKMWDYRNNPLCQATM

SEQ ID NO: 101001 - protein, 645 aa, Homo sapiens
  Payload ID: 20120
  Gene Name: zinc finger protein 681
  Uniprot ID: Q96N22
  ENSP ID: ENSP00000384000
MEPLKFRDVAIEFSLEEWQCLDTIQQNLYRNVMLENYRNLVFLGIVVSKPDLITCLEQEKEPWTRKRHRMVAEPPVICSHFAQDFSPEQNIKDSFQKVTPRRYGKCEHENLQLSKSVDECKVQKGGYNGLNQCLPTTQSKIFQCDKYMKIFHKFSNLNGHKVRHTRKKPFKYKEFGKSFCIFSNLTQHKIICTRVNFYKCEDCGKAFNGSSIFTKHKRIHIGEKSYICEECGKACNQFTNLTTHKIIYTRDKLYKREECSKAFNLSSHITTHTIIHTGENPYKREECDKAFNQSLTLTTHKIIHTREKLNEYKECGKAFNQSSHLTRHKIIHTGEKPYKCEECGKAFNQSSHLTRHKIIHTGEKPYRCEECGKAFRQSSHLTTHKIIHTGEKPYKCEECGKAFNKSSHLTRHKSIHTGEKPYQCEKCGKASNQSSNLTEHKNIHTEEKPYKCEECGKAFNQFSNLTTHKRIHTGEKPYKCEECGKAFNQSSILTTHKRIHTGEKSYKCEECGKAFYRSSKLTEHKKIHTGEKPYTCEECGKAFNHSSHLATHKVIHTGEKPYQCEECGKAFNQSSHLTRHKRIHTGEKPYQCEKCGKAFNQSSNLTGHKKIHTGEKLYKPKRCNSDFENTSKFSKHKRNYAGEKS

SEQ ID NO: 101002 - protein, 152 aa, Homo sapiens
  Payload ID: 20120
  Gene Name: zinc finger protein 681
  ENSP ID: ENSP00000433806
MVAEPPVICSHFAQDFSPEQNIKDSFQKVTPRRYGKCEHENLQLSKSVDECKVQKGGYNGLNQCLPTTQSKIFQCDKYMKIFHKFSNLNGHKVRHTRKKPFKYKEFGKSFCIFSNLTQHKIICTRVNFYKCEDCGKAFNGSSIFTKHKRIHI

SEQ ID NO: 101003 - protein, 126 aa, Homo sapiens
  Payload ID: 20120
  Gene Name: zinc finger protein 681
  ENSP ID: ENSP00000435824
MVAEPPVICSHFAQDFSPEQNIKDSFQKVTPRRYGKCEHENLQLSKSVDECKVQKGGYNGLNQCLPTTQSKIFQCDKYMKIFHKFSNLNGHKVRHTRKKPFKYKEFGKSFCIFSNLTQHKIICTRV

SEQ ID NO: 101004 - protein, 466 aa, Homo sapiens
  Payload ID: 20121
  Gene Name: zinc finger protein 682
  Uniprot ID: O95780
  ENSP ID: ENSP00000351324
MLENYRNLVSLGLTVSKPELISRLEQRQEPWNVKRHETIAKPPAMSSHYTEDLLPEQCMQDSFQKVILRRYGSCGLEDLHLRKDGENVGECKDQKEIYNGLNQCLSTLPSKIFPYNKCVKVFSKSSNLNRENIRHTTEKLFKCMQCGKVFKSHSGLSYHKIIHTEEKLCICEECGKTFKWFSYLTKHKRIHTGEKPYKCEECGKAFNWCSSLTKHKRIHTGEKPYKCEECGKAFHWCSPFVRHKKIHTGEKPYTCEDCGRAFNRHSHLTKHKTIHTGKKPYKCKECGKAFNHCSLLTIHERTHTGEKPYKCEECGKAFNSSSILTEHKVIHSGEKPYKCEKCDKVFKRFSYLTKHKRIHTGEKPYKCEECGKAFNWSSILTEHKRIHTGEKPYNCEECGKAFNRCSHLTRHKKIHTAVKRYKCEECGKAFKRCSHLNEHKRVQRGEKSCKYKKCGEAFNHCSNLTT

SEQ ID NO: 101005 - protein, 466 aa, Homo sapiens; identical to SEQ ID NO: 101004
  Payload ID: 20121
  Gene Name: zinc finger protein 682
  Uniprot ID: O95780
  ENSP ID: ENSP00000380348

SEQ ID NO: 101006 - protein, 498 aa, Homo sapiens
  Payload ID: 20121
  Gene Name: zinc finger protein 682
  Uniprot ID: O95780
  ENSP ID: ENSP00000380351
MELLTFRDVTIEFSLEEWEFLNPAQQSLYRKVMLENYRNLVSLGLTVSKPELISRLEQRQEPWNVKRHETIAKPPAMSSHYTEDLLPEQCMQDSFQKVILRRYGSCGLEDLHLRKDGENVGECKDQKEIYNGLNQCLSTLPSKIFPYNKCVKVFSKSSNLNRENIRHTTEKLFKCMQCGKVFKSHSGLSYHKIIHTEEKLCICEECGKTFKWFSYLTKHKRIHTGEKPYKCEECGKAFNWCSSLTKHKRIHTGEKPYKCEECGKAFHWCSPFVRHKKIHTGEKPYTCEDCGRAFNRHSHLTKHKTIHTGKKPYKCKECGKAFNHCSLLTIHERTHTGEKPYKCEECGKAFNSSSILTEHKVIHSGEKPYKCEKCDKVFKRFSYLTKHKRIHTGEKPYKCEECGKAFNWSSILTEHKRIHTGEKPYNCEECGKAFNRCSHLTRHKKIHTAVKRYKCEECGKAFKRCSHLNEHKRVQRGEKSCKYKKCGEAFNHCSNLTT

SEQ ID NO: 101007 - protein, 103 aa, Homo sapiens
  Payload ID: 20121
  Gene Name: zinc finger protein 682
  ENSP ID: ENSP00000469042
MELLTFRDVTIEFSLEEWEFLNPAQQSLYRKVMLENYRNLVSLGLTVSKPELISRLEQRQEPWNVKRHETIAKPPDYSLTILCKKKSNILISFPSIIYVFSLH

SEQ ID NO: 101008 - protein, 52 aa, Homo sapiens
  Payload ID: 20121
  Gene Name: zinc finger protein 682
  ENSP ID: ENSP00000469870
  MOD_RES (1)..(1): Any amino acid
XLYRKVMLENYRNLVSLGLTVSKPELISRLEQRQEPWNVKRHETIAKPPVSV

SEQ ID NO: 101009 - protein, 76 aa, Homo sapiens
  Payload ID: 20121
  Gene Name: zinc finger protein 682
  ENSP ID: ENSP00000470315
MELLTFRDVTIEFSLEEWEFLNPAQQSLYRKVMLENYRNLVSLGLTVSKPELISRLEQRQEPWNVKRHETIAKPPG

SEQ ID NO: 101010 - protein, 504 aa, Homo sapiens
  Payload ID: 20121
  Gene Name: zinc finger protein 682
  ENSP ID: ENSP00000470718
MFCFVFQELLTFRDVTIEFSLEEWEFLNPAQQSLYRKVMLENYRNLVSLGLTVSKPELISRLEQRQEPWNVKRHETIAKPPAMSSHYTEDLLPEQCMQDSFQKVILRRYGSCGLEDLHLRKDGENVGECKDQKEIYNGLNQCLSTLPSKIFPYNKCVKVFSKSSNLNRENIRHTTEKLFKCMQCGKVFKSHSGLSYHKIIHTEEKLCICEECGKTFKWFSYLTKHKRIHTGEKPYKCEECGKAFNWCSSLTKHKRIHTGEKPYKCEECGKAFHWCSPFVRHKKIHTGEKPYTCEDCGRAFNRHSHLTKHKTIHTGKKPYKCKECGKAFNHCSLLTIHERTHTGEKPYKCEECGKAFNSSSILTEHKVIHSGEKPYKCEKCDKVFKRFSYLTKHKRIHTGEKPYKCEECGKAFNWSSILTEHKRIHTGEKPYNCEECGKAFNRCSHLTRHKKIHTAVKRYKCEECGKAFKRCSHLNEHKRVQRGEKSCKYKKCGEAFNHCSNLTT

SEQ ID NO: 101011 - protein, 137 aa, Homo sapiens
  Payload ID: 20121
  Gene Name: zinc finger protein 682
  ENSP ID: ENSP00000471048
MLENYRNLVSLGLTVSKPELISRLEQRQEPWNVKRHETIAKPPAMSSHYTEDLLPEQCMQDSFQKVILRRYGSCGLEDLHLRKDGENVGECKDQKEIYNGLNQCLSTLPSKIFPYNKCVKVFSKSSNLNRENIRHTT

SEQ ID NO: 101012 - protein, 422 aa, Homo sapiens
  Payload ID: 20121
  Gene Name: zinc finger protein 682
  Uniprot ID: O95780
  ENSP ID: ENSP00000471717
MSSHYTEDLLPEQCMQDSFQKVILRRYGSCGLEDLHLRKDGENVGECKDQKEIYNGLNQCLSTLPSKIFPYNKCVKVFSKSSNLNRENIRHTTEKLFKCMQCGKVFKSHSGLSYHKIIHTEEKLCICEECGKTFKWFSYLTKHKRIHTGEKPYKCEECGKAFNWCSSLTKHKRIHTGEKPYKCEECGKAFHWCSPFVRHKKIHTGEKPYTCEDCGRAFNRHSHLTKHKTIHTGKKPYKCKECGKAFNHCSLLTIHERTHTGEKPYKCEECGKAFNSSSILTEHKVIHSGEKPYKCEKCDKVFKRFSYLTKHKRIHTGEKPYKCEECGKAFNWSSILTEHKRIHTGEKPYNCEECGKAFNRCSHLTRHKKIHTAVKRYKCEECGKAFKRCSHLNEHKRVQRGEKSCKYKKCGEAFNHCSNLTT

SEQ ID NO: 101013 - protein, 44 aa, Homo sapiens
  Payload ID: 20121
  Gene Name: zinc finger protein 682
  ENSP ID: ENSP00000471745
  MOD_RES (1)..(1): Any amino acid
XYTEDLLPEQCMQDSFQKVILRRYGSCGLEDLHLRKDGENVVSV

SEQ ID NO: 101014 - protein, 82 aa, Homo sapiens
  Payload ID: 20121
  Gene Name: zinc finger protein 682
  ENSP ID: ENSP00000472444
MELLTFRDVTIEFSLEEWEFLNPAQQSLYRKVMLENYRNLVSLGLTVSKPELISRLEQRQEPWNVKRHETIAKPPGTYRVGQ

SEQ ID NO: 101015 - protein, 504 aa, Homo sapiens
  Payload ID: 20122
  Gene Name: zinc finger protein 683
  Uniprot ID: Q8IZ20
  ENSP ID: ENSP00000344095
MKEESAAQLGCCHRPMALGGTGGSLSPSLDFQLFRGDQVFSACRPLPDMVDAHGPSCASWLCPLPLAPGRSALLACLQDLDLNLCTPQPAPLGTDLQGLQEDALSMKHEPPGLQASSTDDKKFTVKYPQNKDKLGKQPERAGEGAPCPAFSSHNSSSPPPLQNRKSPSPLAFCPCPPVNSISKELPFLLHAFYPGYPLLLPPPHLFTYGALPSDQCPHLLMLPQDPSYPTMAMPSLLMMVNELGHPSARWETLLPYPGAFQASGQALPSQARNPGAGAAPTDSPGLERGGMASPAKRVPLSSQTGTAALPYPLKKKNGKILYECNICGKSFGQLSNLKVHLRVHSGERPFQCALCQKSFTQLAHLQKHHLVHTGERPHKCSVCHKRFSSSSNLKTHLRLHSGARPFQCSVCRSRFTQHIHLKLHHRLHAPQPCGLVHTQLPLASLACLAQWHQGALDLMAVASEKHMGYDIDEVKVSSTSQGKARAVSLSSAGTPLVMGQDQNN

SEQ ID NO: 101016 - protein, 524 aa, Homo sapiens
  Payload ID: 20122
  Gene Name: zinc finger protein 683
  Uniprot ID: Q8IZ20
  ENSP ID: ENSP00000384782
MKEESAAQLGCCHRPMALGGTGGSLSPSLDFQLFRGDQVFSACRPLPDMVDAHGPSCASWLCPLPLAPGRSALLACLQDLDLNLCTPQPAPLGTDLQGLQEDALSMKHEPPGLQASSTDDKKFTVKYPQNKDKLGKQPERAGEGAPCPAFSSHNSSSPPPLQNRKSPSPLAFCPCPPVNSISKELPFLLHAFYPGYPLLLPPPHLFTYGALPSDQCPHLLMLPQDPSYPTMAMPSLLMMVNELGHPSARWETLLPYPGAFQASGQALPSQARNPGAGAAPTDSPGLERGGMASPAKRVPLSSQTGTAALPYPLKKKNGKILYECNICGKSFGQLSNLKVHLRVHSGERPFQCALCQKSFTQLAHLQKHHLVHTGERPHKCSIPWVPGRNHWKSFQAWREREVCHKRFSSSSNLKTHLRLHSGARPFQCSVCRSRFTQHIHLKLHHRLHAPQPCGLVHTQLPLASLACLAQWHQGALDLMAVASEKHMGYDIDEVKVSSTSQGKARAVSLSSAGTPLVMGQDQNN

SEQ ID NO: 101017 - protein, 524 aa, Homo sapiens; identical to SEQ ID NO: 101016
  Payload ID: 20122
  Gene Name: zinc finger protein 683
  Uniprot ID: Q8IZ20
  ENSP ID: ENSP00000388792

SEQ ID NO: 101018 - protein, 197 aa, Homo sapiens
  Payload ID: 20122
  Gene Name: zinc finger protein 683
  ENSP ID: ENSP00000391584
MEAKGNGDMKEESAAQLGCCHRPMALGGTGGSLSPSLDFQLFRGDQVFSACRPLPDMVDAHGPSCASWLCPLPLAPGRSALLACLQDLDLNLCTPQPAPLGTDLQGLQEDALSMKHEPPGLQASSTDDKKFTVKYPQNKDKLGKQPERAGEGAPCPAFSSHNSSSPPPLQNRKSPSPLAFCPCPPVNSISKELPFLL

SEQ ID NO: 101019 - protein, 188 aa, Homo sapiens
  Payload ID: 20122
  Gene Name: zinc finger protein 683
  ENSP ID: ENSP00000401961
MKEESAAQLGCCHRPMALGGTGGSLSPSLDFQLFRGDQVFSACRPLPDMVDAHGPSCASWLCPLPLAPGRSALLACLQDLDLNLCTPQPAPLGTDLQGLQEDALSMKHEPPGLQASSTDDKKFTVKYPQNKDKLGKQPERAGEGAPCPAFSSHNSSSPPPLQNRKSPSPLAFCPCPPVNSISKELPFL

SEQ ID NO: 101020 - protein, 122 aa, Homo sapiens
  Payload ID: 20122
  Gene Name: zinc finger protein 683
  ENSP ID: ENSP00000406734
MKEESAAQLGCCHRPMALGGTGGSLSPSLDFQLFRGDQSTSHQGCRPAPPMTRNSQSSTHRTRTSWENSQKELARGPPAQPSPLITALPHHRCRTERAPAPWLSAPVPLSTPSPRSSHFSST

SEQ ID NO: 101021 - protein, 282 aa, Homo sapiens
  Payload ID: 20122
  Gene Name: zinc finger protein 683
  ENSP ID: ENSP00000411289
MEAKGNGDMKEESAAQLGCCHRPMALGGTGGSLSPSLDFQLFRGDQVFSACRPLPDMVDAHGPSCASWLCPLPLAPGRSALLACLQDLDLNLCTPQPAPLGTDLQGLQEDALSMKHEPPGLQASSTDDKKFTVKYPQNKDKLGKQPERAGEGAPCPAFSSHNSSSPPPLQNRKSPSPLAFCPCPPVNSISKELPFLLHAFYPGYPLLLPPPHLFTYGALPSDQCPHLLMLPQDPSYPTMAMPSLLMMVNELGHPSARWETLLPYPGAFQASGQALPSQARNP

SEQ ID NO: 101022 - protein, 269 aa, Homo sapiens
  Payload ID: 20122
  Gene Name: zinc finger protein 683
  ENSP ID: ENSP00000411290
MKEESAAQLGCCHRPMALGGTGGSLSPSLDFQLFRGDQVFSACRPLPDMVDAHGPSCASWLCPLPLAPGRSALLACLQDLDLNLCTPQPAPLGTDLQGLQEDALSMKHEPPGLQASSTDDKKFTVKYPQNKDKLGKQPERAGEGAPCPAFSSHNSSSPPPLQNRKSPSPLAFCPCPPVNSISKELPFLLHAFYPGYPLLLPPPHLFTYGALPSDQCPHLLMLPQDPSYPTMAMPSLLMMVNELGHPSARWETLLPYPGAFQASGQALPS

SEQ ID NO: 101023 - protein, 154 aa, Homo sapiens
  Payload ID: 20122
  Gene Name: zinc finger protein 683
  ENSP ID: ENSP00000412881
MKEESAAQLGCCHRPMALGGTGGSLSPSLDFQLFRGDQPAPLGTDLQGLQEDALSMKHEPPGLQASSTDDKKFTVKYPQNKDKLGKQPERAGEGAPCPAFSSHNSSSPPPLQNRKSPSPLAFCPCPPVNSISKELPFLLHAFYPGYPLLLPPPH

SEQ ID NO: 101024 - protein, 92 aa, Homo sapiens
  Payload ID: 20123
  Gene Name: zinc finger protein 684
  ENSP ID: ENSP00000361781
MISFQESVTFQDVAVDFTAEEWQLLDCAERTLYWDVMLENYRNLISVGCPITKTKVILKVEQGQEPWMVEGANPHESSPGWSAVAQSQLGFK

SEQ ID NO: 101025 - protein, 119 aa, Homo sapiens
  Payload ID: 20123
  Gene Name: zinc finger protein 684
  ENSP ID: ENSP00000361782
MISFQESVTFQDVAVDFTAEEWQLLDCAERTLYWDVMLENYRNLISVGCPITKTKVILKVEQGQEPWMVEGANPHESSPESRSVARLECSGAISARVQVILLPQPPEELELQAPATMPG

SEQ ID NO: 101026 - protein, 378 aa, Homo sapiens
  Payload ID: 20123
  Gene Name: zinc finger protein 684
  Uniprot ID: Q5T5D7
  ENSP ID: ENSP00000361784
MISFQESVTFQDVAVDFTAEEWQLLDCAERTLYWDVMLENYRNLISVGCPITKTKVILKVEQGQEPWMVEGANPHESSPESDYPLVDEPGKHRESKDNFLKSVLLTFNKILTMERIHHYNMSTSLNPMRKKSYKSFEKCLPPNLDLLKYNRSYTVENAYECSECGKAFKKKFHFIRHEKNHTRKKPFECNDCGKAYSRKAHLATHQKIHNGERPFVCNDCGKAFMHKAQLVVHQRLHTGEKPYECSQCGKTFTWNSSFNQHVKSHTLEKSFECKECGKTFRYSSSLYKHSRFHTGEKPYQCIICGKAFGNTSVLVTHQRIHTGEKPYSCIECGKAFIKKSHLLRHQITHTGEKPYECNRCGKAFSQKSNLIVHQKIHT

SEQ ID NO: 101027 - protein, 1237 aa, Homo sapiens
  Payload ID: 20124
  Gene Name: zinc finger protein 687
  Uniprot ID: Q8N1G0
  ENSP ID: ENSP00000319829
MGDMKTPDFDDLLAAFDIPDIDANEAIHSGPEENEGPGGPGKPEPGVGSESEDTAAASAGDGPGVPAQASDHGLPPPDISVVSVIVKNTVCPEQSEALAGGSAGDGAQAAGVTKEGPVGPHRMQNGFGSPEPSLPGTPHSPAPPSGGTWKEKGMEGKTPLDLFAHFGPEPGDHSDPLPPSAPSPTREGALTPPPFPSSFELAQENGPGMQPPVSSPPLGALKQESCSPHHPQVLAQQGSGSSPKATDIPASASPPPVAGVPFFKQSPGHQSPLASPKVPVCQPLKEEDDDEGPVDKSSPGSPQSPSSGAEAADEDSNDSPASSSSRPLKVRIKTIKTSCGNITRTVTQVPSDPDPPAPLAEGAFLAEASLLKLSPATPTSEGPKVVSVQLGDGTRLKGTVLPVATIQNASTAMLMAASVARKAVVLPGGTATSPKMIAKNVLGLVPQALPKADGRAGLGTGGQKVNGASVVMVQPSKTATGPSTGGGTVISRTQSSLVEAFNKILNSKNLLPAYRPNLSPPAEAGLALPPTGYRCLECGDAFSLEKSLARHYDRRSMRIEVTCNHCARRLVFFNKCSLLLHAREHKDKGLVMQCSHLVMRPVALDQMVGQPDITPLLPVAVPPVSGPLALPALGKGEGAITSSAITTVAAEAPVLPLSTEPPAAPATSAYTCFRCLECKEQCRDKAGMAAHFQQLGPPAPGATSNVCPTCPMMLPNRCSFSAHQRMHKNRPPHVCPECGGNFLQANFQTHLREACLHVSRRVGYRCPSCSVVFGGVNSIKSHIQTSHCEVFHKCPICPMAFKSGPSAHAHLYSQHPSFQTQQAKLIYKCAMCDTVFTHKPLLSSHFDQHLLPQRVSVFKCPSCPLLFAQKRTMLEHLKNTHQSGRLEETAGKGAGGALLTPKTEPEELAVSQGGAAPATEESSSSSEEEEVPSSPEPPRPAKRPRRELGSKGLKGGGGGPGGWTCGLCHSWFPERDEYVAHMKKEHGKSVKKFPCRLCERSFCSAPSLRRHVRVNHEGIKRVYPCRYCTEGKRTFSSRLILEKHVQVRHGLQLGAQSPGRGTTLARGSSARAQGPGRKRRQSSDSCSEEPDSTTPPAKSPRGGPGSGGHGPLRYRSSSSTEQSLMMGLRVEDGAQQCLDCGLCFASPGSLSRHRFISHKKRRGVGKASALGLGDGEEEAPPSRSDPDGGDSPLPASGGPLTCKVCGKSCDSPLNLKTHFRTHGMAFIRARQGAVGDN

SEQ ID NO: 101028 - protein, 1237 aa, Homo sapiens; identical to SEQ ID NO: 101027
  Payload ID: 20124
  Gene Name: zinc finger protein 687
  Uniprot ID: Q8N1G0
  ENSP ID: ENSP00000336620

SEQ ID NO: 101029 - protein, 147 aa, Homo sapiens
  Payload ID: 20124
  Gene Name: zinc finger protein 687
  ENSP ID: ENSP00000395261
MGRGLGSADMGDMKTPDFDDLLAAFDIPDIDANEAIHSGPEENEGPGGPGKPEPGVGSESEDTAAASAGDGPGVPAQASDHGLPPPDISVVSVIVKNTVCPEQSEALAGGSAGDGAQAAGVTKEGPVGPHRMQNGFGSPEPSLPGTP

SEQ ID NO: 101030 - protein, 706 aa, Homo sapiens
  Payload ID: 20124
  Gene Name: zinc finger protein 687
  ENSP ID: ENSP00000398821
  MOD_RES (1)..(1): Any amino acid
XTVLPVATIQNASTAMLMAASVARKAVVLPGGTATSPKMIAKNVLGLVPQALPKADGRAGLGTGGQKVNGASVVMVQPSKTATGPSTGGGTVISRTQSSLVEAFNKILNSKNLLPAYRPNLSPPAEAGLALPPTGYRCLECGDAFSLEKSLARHYDRRSMRIEVTCNHCARRLVFFNKCSLLLHAREHKDKGLVMQCSHLVMRPVALDQMVGQPDITPLLPVAVPPVSGPLALPALGKGEGAITSSAITTVAAEAPVLPLSTEPPAAPATSAYTCFRCLECKEQCRDKAGMAAHFQQLGPPAPGATSNVCPTCPMMLPNRCSFSAHQRMHKNRPPHVCPECGGNFLQANFQTHLREACLHVSRRVGYRCPSCSVVFGGVNSIKSHIQTSHCEVFHKCPICPMAFKSGPSAHAHLYSQHPSFQTQQAKLIYKCAMCDTVFTHKPLLSSHFDQHLLPQRVSVFKCPSCPLLFAQKRTMLEHLKNTHQSGRLEETAGKGAGGALLTPKTEPEELAVSQGGAAPATEESSSSSEEEEVPSSPEPPRPAKRPRRELGSKGLKGGGGGPGGWTCGLCHSWFPERDEYVAHMKKEHGKSVKKFPCRLCERSFCSAPSLRRHVRVNHEGIKRVYPCRSKGPGLRAVPLLPSCPLPFQVLHRGKTHLQQPPDPRETCPGPARLAAWGPVPWPGDHLGSGFQCQSPGARSETPPVF

SEQ ID NO: 101031 - protein, 785 aa, Homo sapiens
  Payload ID: 20124
  Gene Name: zinc finger protein 687
  ENSP ID: ENSP00000415286
MGDMKTPDFDDLLAAFDIPDIDANEAIHSGPEENEGPGGPGKPEPGVGSESEDTAAASAGDGPGVPAQASDHGLPPPDISVVSVIVKNTVCPEQSEALAGGSAGDGAQAAGVTKEGPVGPHRMQNGFGSPEPSLPGTPHSPAPPSGGTWKEKGMEGKTPLDLFAHFGPEPGDHSDPLPPSAPSPTREGALTPPPFPSSFELAQENGPGMQPPVSSPPLGALKQESCSPHHPQVLAQQGSGSSPKATDIPASASPPPVAGVPFFKQSPGHQSPLASPKVPVCQPLKEEDDDEGPVDKSSPGSPQSPSSGAEAADEDSNDSPASSSSRPLKVRIKTIKTSCGNITRTVTQVPSDPDPPAPLAEGAFLAEASLLKLSPATPTSEGPKVVSVQLGDGTRLKGTVLPVATIQNASTAMLMAASVARKAVVLPGGTATSPKMIAKNVLGLVPQALPKADGRAGLGTGGQKVNGASVVMVQPSKTATGPSTGGGTVISRTQSSLVEAFNKILNSKNLLPAYRPNLSPPAEAGLALPPTGYRCLECGDAFSLEKSLARHYDRRSMRIEVTCNHCARRLVFFNKCSLLLHAREHKDKGLVMQCSHLVMRPVALDQMVGQPDITPLLPVAVPPVSGPLALPALGKGEGAITSSAITTVAAEAPVLPLSTEPPAAPATSAYTCFRCLECKEQCRDKAGMAAHFQQLGPPAPGATSNVCPTCPMMLPNRCSFSAHQRMHKNRPPHVCPECGGNFLQANFQTHLREACLHVSRRVGYRTPISLGAWRRLLGKGPGVPC

SEQ ID NO: 101032 - protein, 99 aa, Homo sapiens
  Payload ID: 20124
  Gene Name: zinc finger protein 687
  ENSP ID: ENSP00000416942
RTFSSRLILEKHVQVRHGLQLGAQSPGRGTTLARGSSARAQFLPLFFRGQVGNAASLLTLAVRSLTARHRQPSPPGADLDLEAMALCATGAAAPQNRAS

SEQ ID NO: 101033 - protein, 276 aa, Homo sapiens
  Payload ID: 20125
  Gene Name: zinc finger protein 688
  Uniprot ID: P0C7X2
  ENSP ID: ENSP00000223459
MAPPPAPLLAPRPGETRPGCRKPGTVSFADVAVYFSPEEWGCLRPAQRALYRDVMQETYGHLGALGFPGPKPALISWMEQESEAWSPAAQDPEKGERLGGARRGDVPNRKEEEPEEVPRAKGPRKAPVKESPEVLVERNPDPAISVAPARAQPPKNAAWDPTTGAQPPAPIPSMDAQAGQRRHVCTDCGRRFTYPSLLVSHRRMHSGERPFPCPECGMRFKRKFAVEAHQWIHRSCSGGRRGRRPGIRAVPRAPVRGDRDPPVLFRHYPDIFEECG

SEQ ID NO: 101034 - protein, 262 aa, Homo sapiens
  Payload ID: 20125
  Gene Name: zinc finger protein 688
  Uniprot ID: P0C7X2
  ENSP ID: ENSP00000455227
MPRSPLRSSLSTEASGPRGPFKCPASPRPITAQLLPGSSPIIGRCVLRVQRGFPGPKPALISWMEQESEAWSPAAQDPEKGERLGGARRGDVPNRKEEEPEEVPRAKGPRKAPVKESPEVLVERNPDPAISVAPARAQPPKNAAWDPTTGAQPPAPIPSMDAQAGQRRHVCTDCGRRFTYPSLLVSHRRMHSGERPFPCPECGMRFKRKFAVEAHQWIHRSCSGGRRGRRPGIRAVPRAPVRGDRDPPVLFRHYPDIFEECG

SEQ ID NO: 101035 - protein, 142 aa, Homo sapiens
  Payload ID: 20125
  Gene Name: zinc finger protein 688
  ENSP ID: ENSP00000456047
  MOD_RES (1)..(1): Any amino acid
XATSRSQGFRYPLGSVFTRIHFIQAAALQPLPGFPGPKPALISWMEQESEAWSPAAQDPEKGERLGGARRGDVPNRKEEEPEEVPRAKGPRKAPVKESPEVLVERNPDPAISVAPARAQPPKNAAWDPTTGAQPPAPIPSMD

SEQ ID NO: 101036 - protein, 72 aa, Homo sapiens
  Payload ID: 20125
  Gene Name: zinc finger protein 688
  ENSP ID: ENSP00000456070
MAPPPAPLLAPRPGETRPGCRKPGTVSFADVAVYFSPEEWGCLRPAQRALYRDVMQETYGHLGALGPHFQHP

SEQ ID NO: 101037 - protein, 110 aa, Homo sapiens
  Payload ID: 20125
  Gene Name: zinc finger protein 688
  ENSP ID: ENSP00000457222
MAPPPAPLLAPRPGETRPGCRKPGTVSFADVAVYFSPEEWGCLRPAQRALYRDVMQETYGHLGALGFPGPKPALISWMEQESEAWSPAAQDPEKGERLGGARRGPHFQHP

SEQ ID NO: 101038 - protein, 500 aa, Homo sapiens
  Payload ID: 20126
  Gene Name: zinc finger protein 689
  Uniprot ID: Q96CS4
  ENSP ID: ENSP00000287461
MAPPSAPLPAQGPGKARPSRKRGRRPRALKFVDVAVYFSPEEWGCLRPAQRALYRDVMRETYGHLGALGCAGPKPALISWLERNTDDWEPAALDPQEYPRGLTVQRKSRTRKKNGEKEVFPPKEAPRKGKRGRRPSKPRLIPRQTSGGPICPDCGCTFPDHQALESHKCAQNLKKPYPCPDCGRRFSYPSLLVSHRRAHSGECPYVCDQCGKRFSQRKNLSQHQVIHTGEKPYHCPDCGRCFRRSRSLANHRTTHTGEKPHQCPSCGRRFAYPSLLAIHQRTHTGEKPYTCLECNRRFRQRTALVIHQRIHTGEKPYPCPDCERRFSSSSRLVSHRRVHSGERPYACEHCEARFSQRSTLLQHQLLHTGEKPYPCPDCGRAFRRSGSLAIHRSTHTEEKLHACDDCGRRFAYPSLLASHRRVHSGERPYACDLCSKRFAQWSHLAQHQLLHTGEKPFPCLECGRCFRQRWSLAVHKCSPKAPNCSPRSAIGGSSQRGNAH

SEQ ID NO: 101039 - protein, 498 aa, Homo sapiens
  Payload ID: 20126
  Gene Name: zinc finger protein 689
  ENSP ID: ENSP00000482634
MAPPSAPLPAQGPGKARPSRKRGRRPRALKFVDVAVYFSPEEWGCLRPAQRALYRDVMRETYGHLGALGCAGPKPALISWLERNTDDWEPAALDPQEYPRGLTVQRKSRTRKKNGEKEVFPPKEAPRKGKRGRRPSKPRLIPRQTSGGPICPDCGCTFPDHQALESHKCAQNLKKPYPCPDCGRRFSYPSLLVSHRRAHSGECPYVCDQCGKRFSQRKNLSQHQVIHTGEKPYHCPDCGRCFRRSRSLANHRTTHTGEKPHQCPSCGRRFAYPSLLAIHQRTHTGEKPYTCLECNRRFRQRTALVIHQRIHTGEKPYPCPDCERRFSSSSRLVSHRRVHSGERPYACEHCEARFSQRSTLLQHQLLHTGEKPYPCPDCGRAFRRSGSLAIHRSTHTEEKLHACDDCGRRFAYPSLLASHRRVHSGERPYACDLCSKRFAQWSHLAQHQLLHTGEKPFPCLEPVLPPEVVSAVHKCSPKAPNCSPRSAIGGSSQRGNAH

SEQ ID NO: 101040 - protein, 149 aa, Homo sapiens
  Payload ID: 20127
  Gene Name: zinc finger protein 69
  Uniprot ID: Q9UC07
  ENSP ID: ENSP00000345333
MPCCSHRRCREDPGTSESQEMEEWALLDISQRKLYKEVMLETFRNLTSVGKSWKDQNIEYEYQNPRRNFRSLIEKKVNEIKDDSHCGETFTQVPDDRLNFQEKKASPEIKSCDSFVCGEVGLGNSSFNMNIRGDIGHKAYEYQEYGPKP

SEQ ID NO: 101041 - protein, 154 aa, Homo sapiens
  Payload ID: 20127
  Gene Name: zinc finger protein 69
  ENSP ID: ENSP00000388784
MPCCSHRRCREDPGTSESQEMEEWALLDISQRKLYKEVMLETFRNLTSVGKSWKDQNIEYEYQNPRRNFRSLIEKKVNEIKDDSHCGETFTQVPDDRLNFQEKKASPEIKSCDSFVCGEVGLGNSSFNMNIRGDIGHKAYEYQEYGPKPCKCQQ

SEQ ID NO: 101042 - protein, 566 aa, Homo sapiens
  Payload ID: 20127
  Gene Name: zinc finger protein 69
  Uniprot ID: Q9UC07
  ENSP ID: ENSP00000402985
MPCCSHRRCREDPGTSESQEMDPVAFDDVAVNFTQEEWALLDISQRKLYKEVMLETFRNLTSVGKSWKDQNIEYEYQNPRRNFRSLIEKKVNEIKDDSHCGETFTQVPDDRLNFQEKKASPEIKSCDSFVCGEVGLGNSSFNMNIRGDIGHKAYEYQEYGPKPCKCQQPKKAFRYHPSFRTPQRDHTGEKPYACKECGKTFISHSSIQRHVVMHSGDGPYKCKFCGKAFHCLSLYLIHERIHTGEKPYECKQCGKSFSYSATLRIHERTHTGEKPYECQQCGKAFHSPRCYRRHERIHTGEKAYQCKECGKAFTCPQYVRIHERTHSRKKPYECTQCGKALSSLTSFQTHIRMHSGERPYECKICGKGFCSANSFQRHEKTHSGEKPYKCKQCGKAFIHSSSLRYHERIHTGEKPYECKQCGKAFRSSSHLQLHGRTHTGEKPYECQECGKAFRSMKNLQSHERTQTHVRIHSGERPYKCKLCGKGFYCPKSLQRHEKTHTGEKLYECKQCGEAFSSSSSFRYHERTHTGEKPYKCKQCGKAFRAASVLRMHGRTHPEDKPYECKQ

SEQ ID NO: 101043 - protein, 315 aa, Homo sapiens
  Payload ID: 20128
  Gene Name: zinc finger protein 691
  Uniprot ID: Q5VV52
  ENSP ID: ENSP00000361580
MSLCSPTHSAEMSLFLQGPEEMLPLSSEGSEMGSEKEQSPEPHLPEEGEGGKPWRVDDSEGSWIPPGEKEHGQESLSDELQETHPKKPWQKVTVRARELGDPIAHPRHEADEKPFICAQCGKTFNNTSNLRTHQRIHTGEKPYKCSECGKSFSRSSNRIRHERIHLEEKHYKCPKCQESFRRRSDLTTHQQDHLGKRPYRCDICGKSFSQSATLAVHHRTHLEPAPYICCECGKSFSNSSSFGVHHRTHTGERPYECTECGRTFSDISNFGAHQRTHRGEKPYRCTVCGKHFSRSSNLIRHQKTHLGEQAGKDSS

SEQ ID NO: 101044 - protein, 296 aa, Homo sapiens
  Payload ID: 20128
  Gene Name: zinc finger protein 691
  ENSP ID: ENSP00000361581
MSLCSPTHSAEMSLFLQGPEEMLPLSSEGSEMGSEKEQSPEPHLPEEGEGGKPWRVDDSEGSWIPPGEKEHGQESLSDELQETHPKKPWQKVTVRARELGDPIAHPRHEADEKPFICAQCGKTFNNTSNLRTHQRIHTGEKPYKCSECGKSFSRSSNRIRHERIHLEEKHYKCPKCQESFRRRSDLTTHQQDHLGKRPYRCDICGKSFSQSATLAVHHRTHLEPAPYICCECGKSFSNSSSFGVHHRTHTGERPYECTECGRTFSDISNFGAHQRTHRGEKPYRCTVCGKHFSRSS

SEQ ID NO: 101045 - protein, 306 aa, Homo sapiens
  Payload ID: 20128
  Gene Name: zinc finger protein 691
  ENSP ID: ENSP00000361582
MAQISSGGGGQSRCLLFALGSEMGSEKEQSPEPHLPEEGEGGKPWRVDDSEGSWIPPGEKEHGQESLSDELQETHPKKPWQKVTVRARELGDPIAHPRHEADEKPFICAQCGKTFNNTSNLRTHQRIHTGEKPYKCSECGKSFSRSSNRIRHERIHLEEKHYKCPKCQESFRRRSDLTTHQQDHLGKRPYRCDICGKSFSQSATLAVHHRTHLEPAPYICCECGKSFSNSSSFGVHHRTHTGERPYECTECGRTFSDISNFGAHQRTHRGEKPYRCTVCGKHFSRSSNLIRHQKTHLGEQAGKDSS

SEQ ID NO: 101046 - protein, 284 aa, Homo sapiens
  Payload ID: 20128
  Gene Name: zinc finger protein 691
  Uniprot ID: Q5VV52
  ENSP ID: ENSP00000361584
MGSEKEQSPEPHLPEEGEGGKPWRVDDSEGSWIPPGEKEHGQESLSDELQETHPKKPWQKVTVRARELGDPIAHPRHEADEKPFICAQCGKTFNNTSNLRTHQRIHTGEKPYKCSECGKSFSRSSNRIRHERIHLEEKHYKCPKCQESFRRRSDLTTHQQDHLGKRPYRCDICGKSFSQSATLAVHHRTHLEPAPYICCECGKSFSNSSSFGVHHRTHTGERPYECTECGRTFSDISNFGAHQRTHRGEKPYRCTVCGKHFSRSSNLIRHQKTHLGEQAGKDSS

SEQ ID NO: 101047 - protein, 284 aa, Homo sapiens; identical to SEQ ID NO: 101046
  Payload ID: 20128
  Gene Name: zinc finger protein 691
  Uniprot ID: Q5VV52
  ENSP ID: ENSP00000361585

SEQ ID NO: 101048 - protein, 284 aa, Homo sapiens; identical to SEQ ID NO: 101046
  Payload ID: 20128
  Gene Name: zinc finger protein 691
  Uniprot ID: Q5VV52
  ENSP ID: ENSP00000361586

SEQ ID NO: 101049 - protein, 133 aa, Homo sapiens
  Payload ID: 20128
  Gene Name: zinc finger protein 691
  ENSP ID: ENSP00000380228
MAQISSGGGGQSRCLLFALVLAICVHSQGSEMGSEKEQSPEPHLPEEGEGGKPWRVDDSEGSWIPPGEKEHGQESLSDELQETHPKKPWQKVTVRARELGDPIAHPRHEADEKPFICAQCGKTFNNTSNLRTH

SEQ ID NO: 101050 - protein, 306 aa, Homo sapiens; identical to SEQ ID NO: 101045
  Payload ID: 20128
  Gene Name: zinc finger protein 691
  ENSP ID: ENSP00000486871

SEQ ID NO: 101051 - protein, 519 aa, Homo sapiens
  Payload ID: 20129
  Gene Name: zinc finger protein 692
  Uniprot ID: Q9BU19
  ENSP ID: ENSP00000305483
MASSPAVDVSCRRREKRRQLDARRSKCRIRLGGHMEQWCLLKERLGFSLHSQLAKFLLDRYTSSGCVLCAGPEPLPPKGLQYLVLLSHAHSRECSLVPGLRGPGGQDGGLVWECSAGHTFSWGPSLSPTPSEAPKPASLPHTTRRSWCSEATSGQELADLESEHDERTQEARLPRRVGPPPETFPPPGEEEGEEEEDNDEDEEEMLSDASLWTYSSSPDDSEPDAPRLLPSPVTCTPKEGETPPAPAALSSPLAVPALSASSLSSRAPPPAEVRVQPQLSRTPQAAQQTEALASTGSQAQSAPTPAWDEDTAQIGPKRIRKAAKRELMPCDFPGCGRIFSNRQYLNHHKKYQHIHQKSFSCPEPACGKSFNFKKHLKEHMKLHSDTRDYICEFCARSFRTSSNLVIHRRIHTGEKPLQCEICGFTCRQKASLNWHQRKHAETVAALRFPCEFCGKRFEKPDSVAAHRSKSHPALLLAPQESPSGPLEPCPSISAPGPLGSSEGSRPSASPQAPTLLPQQ

SEQ ID NO: 101052 - protein, 474 aa, Homo sapiens
  Payload ID: 20129
  Gene Name: zinc finger protein 692
  Uniprot ID: Q9BU19
  ENSP ID: ENSP00000355427
MASSPAVDVSCRRREKRRQLDARRSKCRIRLGGHMEQWCLLKERLGFSLHSQLAKFLLDRYTSSGCVLCAGPEPLPPKGLQYLVLLSHAHSRECSLVPGLRGPGGQDGGLVWECSAGHTFSWGPSLSPTPSEAPKPASLPHTTRRSWCSEATSGQELADLESEHDERTQEARLPSSEPDAPRLLPSPVTCTPKEGETPPAPAALSSPLAVPALSASSLSSRAPPPAEVRVQPQLSRTPQAAQQTEALASTGSQAQSAPTPAWDEDTAQIGPKRIRKAAKRELMPCDFPGCGRIFSNRQYLNHHKKYQHIHQKSFSCPEPACGKSFNFKKHLKEHMKLHSDTRDYICEFCARSFRTSSNLVIHRRIHTGEKPLQCEICGFTCRQKASLNWHQRKHAETVAALRFPCEFCGKRFEKPDSVAAHRSKSHPALLLAPQESPSGPLEPCPSISAPGPLGSSEGSRPSASPQAPTLLPQQ

SEQ ID NO: 101053 - protein, 524 aa, Homo sapiens
  Payload ID: 20129
  Gene Name: zinc finger protein 692
  Uniprot ID: Q9BU19
  ENSP ID: ENSP00000391200
MPLVHMASSPAVDVSCRRREKRRQLDARRSKCRIRLGGHMEQWCLLKERLGFSLHSQLAKFLLDRYTSSGCVLCAGPEPLPPKGLQYLVLLSHAHSRECSLVPGLRGPGGQDGGLVWECSAGHTFSWGPSLSPTPSEAPKPASLPHTTRRSWCSEATSGQELADLESEHDERTQEARLPRRVGPPPETFPPPGEEEGEEEEDNDEDEEEMLSDASLWTYSSSPDDSEPDAPRLLPSPVTCTPKEGETPPAPAALSSPLAVPALSASSLSSRAPPPAEVRVQPQLSRTPQAAQQTEALASTGSQAQSAPTPAWDEDTAQIGPKRIRKAAKRELMPCDFPGCGRIFSNRQYLNHHKKYQHIHQKSFSCPEPACGKSFNFKKHLKEHMKLHSDTRDYICEFCARSFRTSSNLVIHRRIHTGEKPLQCEICGFTCRQKASLNWHQRKHAETVAALRFPCEFCGKRFEKPDSVAAHRSKSHPALLLAPQESPSGPLEPCPSISAPGPLGSSEGSRPSASPQAPTLLPQQ

SEQ ID NO: 101054 - protein, 105 aa, Homo sapiens
  Payload ID: 20129
  Gene Name: zinc finger protein 692
  ENSP ID: ENSP00000393552
MASSPAVDVSCRRREKRRQLDARRSKCRIRLGGHMEQWCLLKERLGFSLHSQLAKFLLDRYTSSGCVLCAAESAAWCPGFGGLAAKMGGLCGSAQQAIPSPGDPL

SEQ ID NO: 101055 - protein, 69 aa, Homo sapiens
  Payload ID: 20129
  Gene Name: zinc finger protein 692
  ENSP ID: ENSP00000431338
MASSPAVDVSCRRREKRRQLDARRSKCRIRLGGHMEQWCLLKERLGFSLHSQLAKFLLDRFLTLPGRPV

SEQ ID NO: 101056 - protein, 80 aa, Homo sapiens
  Payload ID: 20129
  Gene Name: zinc finger protein 692
  ENSP ID: ENSP00000431343
MASSPAVDVSCRRREKRRQLDARRSKCRIRLGGHMEQWCLLKERLGFSLHSQLAKFLLDRTACVTCGLRGSCSPPHGLSE

SEQ ID NO: 101057 - protein, 273 aa, Homo sapiens
  Payload ID: 20129
  Gene Name: zinc finger protein 692
  ENSP ID: ENSP00000431582
  MOD_RES (1)..(1): Any amino acid
XEPDAPRLLPSPVTCTPKEGETPPAPAALSSPLAVPALSASSLSSRAPPPAEVRVQPQLSRTPQAAQQTEALARKAAKRELMPCDFPGCGRIFSNRQYLNHHKKYQHIHQKSFSCPEPACGKSFNFKKHLKEHMKLHSDTRDYICEFCARSFRTSSNLVIHRRIHTGEKPLQCEICGFTCRQKASLNWHQRKHAETVAALRFPCEFCGKRFEKPDSVAAHRSKSHPALLLAPQESPSGPLEPCPSISAPGPLGSSEGSRPSASPQAPTLLPQQ

SEQ ID NO: 101058 - protein, 132 aa, Homo sapiens
  Payload ID: 20129
  Gene Name: zinc finger protein 692
  ENSP ID: ENSP00000432300
MASSPAVDVSCRRREKRRQLDARRSKCRIRLGGHMEQWCLLKERLGFSLHSQLAKFLLDRYTSSGCVLCAGPEPLPPKGLQYLVLLSHAHSRECSLVPGLRGPGGQDGGLVWECSAGHTFSWGPSLSPTPSE

SEQ ID NO: 101059 - protein, 79 aa, Homo sapiens
  Payload ID: 20129
  Gene Name: zinc finger protein 692
  ENSP ID: ENSP00000433522
  MOD_RES (1)..(1): Any amino acid
XKAAKRELMPCDFPGCGRIFSNRQYLNHHKKYQHIHQKSFSCPEPACGKSFNFKKHLKEHMKLHSGKGGPDGLHDLDNN

SEQ ID NO: 101060 - protein, 69 aa, Homo sapiens; identical to SEQ ID NO: 101055
  Payload ID: 20129
  Gene Name: zinc finger protein 692
  ENSP ID: ENSP00000434221

SEQ ID NO: 101061 - protein, 80 aa, Homo sapiens; identical to SEQ ID NO: 101056
  Payload ID: 20129
  Gene Name: zinc finger protein 692
  ENSP ID: ENSP00000434484

SEQ ID NO: 101062 - protein, 96 aa, Homo sapiens
  Payload ID: 20129
  Gene Name: zinc finger protein 692
  Uniprot ID: Q9BU19
  ENSP ID: ENSP00000436308
MASSPAVDVSCRRREKRRQLDARRSKCRIRLGGHMEQWCLLKERLGFSLHSQLAKFLLDRACPAALFHPQVSHFTRTACVTCGLRGSCSPPHGLSE

SEQ ID NO: 101063 - protein, 164 aa, Homo sapiens
  Payload ID: 20129
  Gene Name: zinc finger protein 692
  ENSP ID: ENSP00000436814
  MOD_RES (1)..(1): Any amino acid
XPEPLPPKGLQYLVLLSHAHSRECSLVPGLRGPGGQDGGLVWECSAGHTFSWGPSLSPTPSEAPKPASLPHTTRRSWCSEATSGQELADLESEHDERTQEARLPRRVGPPPETFPPPGEEEVVSLMPPDYCLPLSPAHLKRGRHHQPLQHSPVLLLCRPCQHPH

SEQ ID NO: 101064 - protein, 80 aa, Homo sapiens; identical to SEQ ID NO: 101056
  Payload ID: 20129
  Gene Name: zinc finger protein 692
  ENSP ID: ENSP00000437104

SEQ ID NO: 101065 - protein, 515 aa, Homo sapiens
  Payload ID: 20130
  Gene Name: zinc finger protein 695
  Uniprot ID: Q8IW36
  ENSP ID: ENSP00000341236
MGLLAFRDVALEFSPEEWECLDPAQRSLYRDVMLENYRNLISLGEDSFNMQFLFHSLAMSKPELIICLEARKEPWNVNTEKTARHSVLSSYLTEDILPEQGLQVSFQKVMLRRYERCCLEKLRLRNDWEIVGEWKGQKASYNGLDLCSATTHSKNFQCNKCVKGFSKFANLNKCKISHTGEKPFKCKECGNVSCMSLIMTQQQRIHIGENPYQCKKCGKAFNECSCFTDCKRIHVGEKHCKCEECNNIFKSCSSLAVVEKNHTEKKTYRCEECGKAFNLCSVLTKHKKIHTGEKPYKCEECGKSFKLFPYLTQHKRIHSREKPYKCEECGKVFKLLSYLTQHRRIHTGEKTFRCEECGKAFNQSSHLTEHRRIHTGEKPYKCEECGKAFTWFSYLIQHKRIHTGQKPYKCEECGKAFTWFSYLTQHKRIHTGEKPYKCDECGKAFNWFSYLTNHKRIHTGEKPYKCEECGKAFGQSSHLSKHKTIHTREKPYKCEECGKAFNHSAQLAVHEKTHT

SEQ ID NO: 101066 - protein, 133 aa, Homo sapiens
  Payload ID: 20130
  Gene Name: zinc finger protein 695
  Uniprot ID: Q8IW36
  ENSP ID: ENSP00000355460
MGLLAFRDVALEFSPEEWECLDPAQRSLYRDVMLENYRNLISLGEDSFNMQFLFHSLAMSKPELIICLEARKEPWNVNTEKTARHSVLSSYLTEDILPEQGLQVSFQKVMLRRYERCCLEKLRLRNDWEIVAM

SEQ ID NO: 101067 - protein, 88 aa, Homo sapiens
  Payload ID: 20130
  Gene Name: zinc finger protein 695
  ENSP ID: ENSP00000429540
MGLLAFRDVALEFSPEEWECLDPAQRSLYRDVMLENYRNLISLGEDSFNMQFLFHSLAMSKPELIICLEARKEPWNVNTEKTARHSAM

SEQ ID NO: 101068 - protein, 172 aa, Homo sapiens
  Payload ID: 20130
  Gene Name: zinc finger protein 695
  Uniprot ID: Q8IW36
  ENSP ID: ENSP00000429736
MGLLAFRDVALEFSPEEWECLDPAQRSLYRDVMLENYRNLISLGEDSFNMQFLFHSLAMSKPELIICLEARKEPWNVNTEKTARHSVLSSYLTEDILPEQGLQVSFQKVMLRRYERCCLEKLRLRNDWEIPCEDVLASPLPSAMILSFLRPPQKQKHVKPTEPVQSSTIELL

SEQ ID NO: 101069 - protein, 121 aa, Homo sapiens
  Payload ID: 20130
  Gene Name: zinc finger protein 695
  ENSP ID: ENSP00000430580
MGLLAFRDVALEFSPEEWECLDPAQRSLYRDVMLENYRNLISLGLAMSKPELIICLEARKEPWNVNTEKTARHSVLSSYLTEDILPEQGLQVSFQKVMLRRYERCCLEKLRLRNDWEIVAM

SEQ ID NO: 101070 - protein, 374 aa, Homo sapiens
  Payload ID: 20131
  Gene Name: zinc finger protein 696
  Uniprot ID: Q9H7X3
  ENSP ID: ENSP00000328515
MEPGGEPTGAKESSTLMESLAAVKAAFLAQAPSGSRSAEVQAAQSTEPAAEAGAPEGEGHRGGPPRALGSLGLCENQEARERPGGSPRGPVTSEKTGGQSGLESDVPPNAGPGAEGGGSWKGRPFPCGACGRSFKCSSDAAKHRSIHSGEKPYECSDCGKAFIHSSHVVRHQRAHSGERPYACAECGKAFGQSFNLLRHQRVHTGEKPYACADCGKAFGQRSDAAKHRRTHTGERLYACGECGKRFLHSSNVVRHRRTHHGENPYECRECGQAFSQSSNLLQHQRVHTGERPFACQDCGRAFSRSSFLREHRRIHTGEKPHQCGHCGRAFRALSGFFRHQRLHTGEKPFRCTECGRAFRLSFHLIQHRRVHGAE

SEQ ID NO: 101071 - protein, 204 aa, Homo sapiens
  Payload ID: 20131
  Gene Name: zinc finger protein 696
  ENSP ID: ENSP00000427857
MEPGGEPTGAKESSTLMESLAAVKAAFLAQAPSGSRSAEVQAAQSTEPAAEAGAPEGEGHRGGPPRALGSLGLCENQEARERPGGSPRGPVTSEKTGGQSGLESDVPPNAGPGAEGGGSWKGRPFPCGACGRSFKCSSDAAKHRSIHSGEKPYECSDCGKAFIHSSHVVRHQRAHSGERPYACAECGKAFGQSFNLLRHQRVHT

SEQ ID NO: 101072 - protein, 112 aa, Homo sapiens
  Payload ID: 20131
  Gene Name: zinc finger protein 696
  ENSP ID: ENSP00000428163
MRARSLKLFQLLVFCKMEPGGEPTGAKESSTLMESLAAVKAAFLAQAPSGSRSAEVQAAQSTEPAAEAGAPEGEGHRGGPPRALGSLGLCENQEARERPGGSPRGPVTSEKT

SEQ ID NO: 101073 - protein, 107 aa, Homo sapiens
  Payload ID: 20131
  Gene Name: zinc finger protein 696
  ENSP ID: ENSP00000428856
MEPGGEPTGAKESSTLMESLAAVKAAFLAQAPSGSRSAEVQAAQSTEPAAEAGAPEGEGHRGGPPRALGSLGLCENQEARERPGGSPRGPVTSEKTGGQSGLESDVP

SEQ ID NO: 101074 - protein, 37 aa, Homo sapiens
  Payload ID: 20131
  Gene Name: zinc finger protein 696
  ENSP ID: ENSP00000429859
MEPGGEPTGAKESSTLMESLAGEGTCPQSGPEFQGRN

SEQ ID NO: 101075 - protein, 53 aa, Homo sapiens
  Payload ID: 20131
  Gene Name: zinc finger protein 696
  ENSP ID: ENSP00000430952
MEPGGEPTGAKESSTLMESLAETGSHYVGQAGLELQVSSGPPASASESAEIQL

SEQ ID NO: 101076 - protein, 545 aa, Homo sapiens
  Payload ID: 20132
  Gene Name: zinc finger protein 697
  Uniprot ID: Q5TEC3
  ENSP ID: ENSP00000396857
MKQEDNQGVCAHQDSEDKGMGSDFEDSEDREGDPEEREMGSNPHDTNKREGHPEPEMGSNPQDSRHREAVPDICTEGQLSEEEGVSVRGEEDDQSGVADMAMFPGLSESDSISRSLREDDDESAGENRLEEEEEQPAPPVLPWRRHLSLGSRHRGDKPAHRRFHRLHHPMAVDLGELDSLVASIMDAPTICPDCGESFSPGAAFLQHQRIHRLAEAAAAASLEPFGLAGECDAMVGMMGVGVAGGFGAGPPLARPPREKPFRCGECGKGFSRNTYLTNHLRLHTGERPNLCADCGKSFSWRADLLKHRRLHTGEKPYPCPECGEAFSLSSHLLSHRRAHAAASGAGAAALRPFACGECGKGFVRRSHLANHQRIHTGEKPHGCGECGKRFSWRSDLVKHQRVHTGEKPYMCSECGETFSVSSHLFTHKRTHSGERPYVCRECGKGFGRNSHLVNHLRVHTGEKPFRCGQCEKRFSDFSTLTQHQRTHTGEKPYTCIECGKSFIQSSHLIRHRRIHTGNKPHKCAGCGKGFRYKTHLAQHQKLHLC

SEQ ID NO: 101077 - protein, 642 aa, Homo sapiens
  Payload ID: 20133
  Gene Name: zinc finger protein 699
  Uniprot ID: Q32M78
  ENSP ID: ENSP00000311596
MEEERKTAELQKNRIQDSVVFEDVAVDFTQEEWALLDLAQRNLYRDVMLENFQNLASLGYPLHTPHLISQWEQEEDLQTVKRELIQGIFMGEHREGFETQLKTNESVASQDICGEKISNEQKIVRFKRNDSWFSSLHENQESCGIDYQNKSHERHLRNHMVENIYECYEENQDGQTFSQVPNLDSLKRNTEVKSCECHECGKAFVDHSSLKSHIRSHTGSKPYQCKECGKAFHFLACFKKHMKTPTEEKPYECKECTKAFSCSSFFRAHMKIHIGKTNYECKECGKGFSCSSSLTEHKRIHSGDKPYECKECGKAFSCSSSLSKHKRIHSGDKPYECKECGKAFSSSSHLIIHIRIHTGEKPYECKECGKAFSESSKLTVHGRTHTGEKPYKCKECGKAYNCPSSLSIHMRKHTGEKPYECLECGKAFYLPTSLNTHVKNQSREKPYECKECGKAFSCPSSFRAHVRDHTGKIQYECKECGKTFSRSSSLTEHLRTHSGEKPYECKECGKAFISSSHLTVHIRTHTGEKPYECKKCGKAFIYPSALRIHMRTHTGEKPYECKECGKAFRHSSYLTVHARMHTGEKPFECLECGKAFSCPSSFRRHVRSHTGEKPYECKECGKAFVCPAYFRRHVKTHTRENI

SEQ ID NO: 101078 - protein, 642 aa, Homo sapiens; identical to SEQ ID NO: 101077
  Payload ID: 20133
  Gene Name: zinc finger protein 699
  Uniprot ID: Q32M78
  ENSP ID: ENSP00000467723

SEQ ID NO: 101079 - protein, 159 aa, Homo sapiens
  Payload ID: 20134
  Gene Name: zinc finger protein 7
  ENSP ID: ENSP00000318848
MGFLGCWCVSFQEVVTFGDVAVHFSREEWQCLDPGQRALYREVMLENHSSVAGLAGFLVFKPELISRLEQGEEPWVLDLQGAEGTEAPRTSKTGFLGRPTMGQEPRHPHAPPATPVPGLPKHCSQRLTLPPPGLSSSPLGHFLVHDQDRRRGTSAIWMV

SEQ ID NO: 101080 - protein, 697 aa, Homo sapiens
  Payload ID: 20134
  Gene Name: zinc finger protein 7
  Uniprot ID: P17097
  ENSP ID: ENSP00000393260
MGFLGCWCVSFQEVVTFGDVAVHFSREEWQCLDPGQRALYREVMLENHSSVAGLAGFLVFKPELISRLEQGEEPWVLDLQGAEGTEAPRTSKTDSTIRTENEQACEDMDILKSESYGTVVRISPQDFPQNPGFGDVSDSEVWLDSHLGSPGLKVTGFTFQNNCLNEETVVPKTFTKDAPQGCKELGSSGLDCQPLESQGESAEGMSQRCEECGKGIRATSDIALHWEINTQKISRCQECQKKLSDCLQGKHTNNCHGEKPYECAECGKVFRLCSQLNQHQRIHTGEKPFKCTECGKAFRLSSKLIQHQRIHTGEKPYRCEECGKAFGQSSSLIHHQRIHTGERPYGCRECGKAFSQQSQLVRHQRTHTGERPYPCKECGKAFSQSSTLAQHQRMHTGEKAQILKASDSPSLVAHQRIHAVEKPFKCDECGKAFRWISRLSQHQLIHTGEKPYKCNKCTKAFGCSSRLIRHQRTHTGEKPFKCDECGKGFVQGSHLIQHQRIHTGEKPYVCNDCGKAFSQSSSLIYHQRIHKGEKPYECLQCGKAFSMSTQLTIHQRVHTGERPYKCNECGKAFSQNSTLFQHQIIHAGVKPYECSECGKAFSRSSYLIEHQRIHTRAQWFYEYGNALEGSTFVSRKKVNTIKKLHQCEDCEKIFRWRSHLIIHQRIHTGEKPYKCNDCGKAFNRSSRLTQHQKIHMG

SEQ ID NO: 101081 - protein, 241 aa, Homo sapiens
  Payload ID: 20134
  Gene Name: zinc finger protein 7
  ENSP ID: ENSP00000432641
MEVVTFGDVAVHFSREEWQCLDPGQRALYREVMLENHSSVAGLAGFLVFKPELISRLEQGEEPWVLDLQGAEGTEAPRTSKTDSTIRTENEQACEDMDILKSESYGTVVRISPQDFPQNPGFGDVSDSEVWLDSHLGSPGLKVTGFTFQNNCLNEETVVPKTFTKDAPQGCKELGSSGLDCQPLESQGESAEGMSQRCEECGKGIRATSDIALHWEINTQKISRCQECQKKLSDCLQGKHT

SEQ ID NO: 101082 - protein, 686 aa, Homo sapiens
  Payload ID: 20134
  Gene Name: zinc finger protein 7
  Uniprot ID: P17097
  ENSP ID: ENSP00000432724
MEVVTFGDVAVHFSREEWQCLDPGQRALYREVMLENHSSVAGLAGFLVFKPELISRLEQGEEPWVLDLQGAEGTEAPRTSKTDSTIRTENEQACEDMDILKSESYGTVVRISPQDFPQNPGFGDVSDSEVWLDSHLGSPGLKVTGFTFQNNCLNEETVVPKTFTKDAPQGCKELGSSGLDCQPLESQGESAEGMSQRCEECGKGIRATSDIALHWEINTQKISRCQECQKKLSDCLQGKHTNNCHGEKPYECAECGKVFRLCSQLNQHQRIHTGEKPFKCTECGKAFRLSSKLIQHQRIHTGEKPYRCEECGKAFGQSSSLIHHQRIHTGERPYGCRECGKAFSQQSQLVRHQRTHTGERPYPCKECGKAFSQSSTLAQHQRMHTGEKAQILKASDSPSLVAHQRIHAVEKPFKCDECGKAFRWISRLSQHQLIHTGEKPYKCNKCTKAFGCSSRLIRHQRTHTGEKPFKCDECGKGFVQGSHLIQHQRIHTGEKPYVCNDCGKAFSQSSSLIYHQRIHKGEKPYECLQCGKAFSMSTQLTIHQRVHTGERPYKCNECGKAFSQNSTLFQHQIIHAGVKPYECSECGKAFSRSSYLIEHQRIHTRAQWFYEYGNALEGSTFVSRKKVNTIKKLHQCEDCEKIFRWRSHLIIHQRIHTGEKPYKCNDCGKAFNRSSRLTQHQKIHMG

SEQ ID NO: 101083 - protein, 134 aa, Homo sapiens
  Payload ID: 20134
  Gene Name: zinc finger protein 7
  ENSP ID: ENSP00000433218
MEVVTFGDVAVHFSREEWQCLDPGQRALYREVMLENHSSVAGLAGFLVFKPELISRLEQGEEPWVLDLQGAEGTEAPRTSKTAVEAGNLKPGGQQAGPCPPVKALGKDPVLPLRAAGGFLAVLGFLGLWMRPSL

SEQ ID NO: 101084 - protein, 146 aa, Homo sapiens
  Payload ID: 20134
  Gene Name: zinc finger protein 7
  ENSP ID: ENSP00000433630
MEVVTFGDVAVHFSREEWQCLDPGQRALYREVMLENHSSVAGLAFSDPTLWFGYLCPCFPRDGNLWAWPSRGAAAFPGFLVFKPELISRLEQGEEPWVLDLQGAEGTEAPRTSKTDSTIRTENEQACEDMDILKSESYGTVVRISP

SEQ ID NO: 101085 - protein, 156 aa, Homo sapiens
  Payload ID: 20134
  Gene Name: zinc finger protein 7
  ENSP ID: ENSP00000433656
MEVVTFGDVAVHFSREEWQCLDPGQRALYREVMLENHSSVAGLGFLVFKPELISRLEQGEEPWVLDLQGAEGTEAPRTSKTDSTIRTENEQACEDMDILKSESYGTVVRISPQDFPQNPGFGDVSDSEVWLDSHLGSPGLKVTGFTFQNNCLNEET

SEQ ID NO: 101086 - protein, 148 aa, Homo sapiens
  Payload ID: 20134
  Gene Name: zinc finger protein 7
  Uniprot ID: P17097
  ENSP ID: ENSP00000435252
MEVVTFGDVAVHFSREEWQCLDPGQRALYREVMLENHSSVAGLAGFLVFKPELISRLEQGEEPWVLDLQGAEGTEAPRTSKTGFLGRPTMGQEPRHPHAPPATPVPGLPKHCSQRLTLPPPGLSSSPLGHFLVHDQDRRRGTSAIWMV

SEQ ID NO: 101087 - protein, 86 aa, Homo sapiens
  Payload ID: 20134
  Gene Name: zinc finger protein 7
  ENSP ID: ENSP00000436231
MEVVTFGDVAVHFSREEWQCLDPGQRALYREVMLENHSSVAGLGFLVFKPELISRLEQGEEPWVLDLQGAEGTEAPRTSKTGETYK

SEQ ID NO: 101088 - protein, 590 aa, Homo sapiens
  Payload ID: 20134
  Gene Name: zinc finger protein 7
  ENSP ID: ENSP00000439424
MDILKSESYGTVVRISPQDFPQNPGFGDVSDSEVWLDSHLGSPGLKVTGFTFQNNCLNEETVVPKTFTKDAPQGCKELGSSGLDCQPLESQGESAEGMSQRCEECGKGIRATSDIALHWEINTQKISRCQECQKKLSDCLQGKHTNNCHGEKPYECAECGKVFRLCSQLNQHQRIHTGEKPFKCTECGKAFRLSSKLIQHQRIHTGEKPYRCEECGKAFGQSSSLIHHQRIHTGERPYGCRECGKAFSQQSQLVRHQRTHTGERPYPCKECGKAFSQSSTLAQHQRMHTGEKAQILKASDSPSLVAHQRIHAVEKPFKCDECGKAFRWISRLSQHQLIHTGEKPYKCNKCTKAFGCSSRLIRHQRTHTGEKPFKCDECGKGFVQGSHLIQHQRIHTGEKPYVCNDCGKAFSQSSSLIYHQRIHKGEKPYECLQCGKAFSMSTQLTIHQRVHTGERPYKCNECGKAFSQNSTLFQHQIIHAGVKPYECSECGKAFSRSSYLIEHQRIHTRAQWFYEYGNALEGSTFVSRKKVNTIKKLHQCEDCEKIFRWRSHLIIHQRIHTGEKPYKCNDCGKAFNRSSRLTQHQKIHMG

SEQ ID NO: 101089 - protein, 446 aa, Homo sapiens
  Payload ID: 20135
  Gene Name: zinc finger protein 70
  Uniprot ID: Q9UC06
  ENSP ID: ENSP00000339314
MEVPPATKFGETFAFENRLESQQGLFPGEDLGDPFLQERGLEQMAVIYKEIPLGEQDEENDDYEGNFSLCSSPVQHQSIPPGTRPQDDELFGQTFLQKSDLSMCQIIHSEEPSPCDCAETDRGDSGPNAPHRTPQPAKPYACRECGKAFSQSSHLLRHLVIHTGEKPYECCECGKAFSQSSHLLRHQIIHTGEKPYECRECGKAFRQSSALTQHQKIHTGKRPYECRECGKDFSRSSSLRKHERIHTGERPYQCKECGKSFNQSSGLSQHRKIHTLKKPHECDLCGKAFCHRSHLIRHQRIHTGKKPYKCDECGKAFSQSSNLIEHRKTHTGEKPYKCQKCGKAFSQSSSLIEHQRIHTGEKPYECCQCGKAFCHSSALIQHQRIHTGKKPYTCECGKAFRHRSALIEHYKTHTREKPYVCNLCGKSFRGSSHLIRHQKIHSGEKL

SEQ ID NO: 101090 - protein, 742 aa, Homo sapiens
  Payload ID: 20136
  Gene Name: zinc finger protein 700
  Uniprot ID: Q9H0M5
  ENSP ID: ENSP00000254321
MPCCSHRSCREDPGTSESREMDPVAFEDVAVNFTQEEWTLLDISQKNLFREVMLETFRNLTSIGKKWSDQNIEYEYQNPRRSFRSLIEEKVNEIKEDSHCGETFTQVPDDRLNFQEKKASPEVKSCDSFVCAEVGIGNSSFNMSIRGDTGHKAYEYQEYGPKPYKCQQPKNKKAFRYRPSIRTQERDHTGEKPYACKVCGKTFIFHSSIRRHMVMHSGDGTYKCKFCGKAFHSFSLYLIHERTHTGEKPYECKQCGKSFTYSATLQIHERTHTGEKPYECSKCDKAFHSSSSYHRHERSHMGEKPYQCKECGKAFAYTSSLRRHERTHSGKKPYECKQYGEGLSYLISFQTHIRMNSGERPYKCKICGKGFYSAKSFQTHEKTHTGEKRYKCKQCGKAFNLSSSFRYHERIHTGEKPYECKQCGKAFRSASQLRVHGGTHTGEKPYECKECGKAFRSTSHLRVHGRTHTGEKPYECKECGKAFRYVKHLQIHERTEKHIRMPSGERPYKCSICEKGFYSAKSFQTHEKTHTGEKPYECNQCGKAFRCCNSLRYHERTHTGEKPYECKQCGKAFRSASHLRMHERTHTGEKPYECKQCGKAFSCASNLRKHGRTHTGEKPYECKQCGKAFRSASNLQMHERTHTGEKPYECKECEKAFCKFSSFQIHERKHRGEKPYECKHCGNGFTSAKILQIHARTHIGEKHYECKECGKAFNYFSSLHIHARTHMGEKPYECKDCGKAFS

SEQ ID NO: 101091 - protein, 724 aa, Homo sapiens
  Payload ID: 20136
  Gene Name: zinc finger protein 700
  ENSP ID: ENSP00000467996
MFQDPVAFEDVAVNFTQEEWTLLDISQKNLFREVMLETFRNLTSIGKKWSDQNIEYEYQNPRRSFRSLIEEKVNEIKEDSHCGETFTQVPDDRLNFQEKKASPEVKSCDSFVCAEVGIGNSSFNMSIRGDTGHKAYEYQEYGPKPYKCQQPKNKKAFRYRPSIRTQERDHTGEKPYACKVCGKTFIFHSSIRRHMVMHSGDGTYKCKFCGKAFHSFSLYLIHERTHTGEKPYECKQCGKSFTYSATLQIHERTHTGEKPYECSKCDKAFHSSSSYHRHERSHMGEKPYQCKECGKAFAYTSSLRRHERTHSGKKPYECKQYGEGLSYLISFQTHIRMNSGERPYKCKICGKGFYSAKSFQTHEKTHTGEKRYKCKQCGKAFNLSSSFRYHERIHTGEKPYECKQCGKAFRSASQLRVHGGTHTGEKPYECKECGKAFRSTSHLRVHGRTHTGEKPYECKECGKAFRYVKHLQIHERTEKHIRMPSGERPYKCSICEKGFYSAKSFQTHEKTHTGEKPYECNQCGKAFRCCNSLRYHERTHTGEKPYECKQCGKAFRSASHLRMHERTHTGEKPYECKQCGKAFSCASNLRKHGRTHTGEKPYECKQCGKAFRSASNLQMHERTHTGEKPYECKECEKAFCKFSSFQIHERKHRGEKPYECKHCGNGFTSAKILQIHARTHIGEKHYECKECGKAFNYFSSLHIHARTHMGEKPYECKDCGKAFS

SEQ ID NO: 101092 - protein, 745 aa, Homo sapiens
  Payload ID: 20136
  Gene Name: zinc finger protein 700
  ENSP ID: ENSP00000479449
MPCCSHRSCREDPGTSESREMMFQDPVAFEDVAVNFTQEEWTLLDISQKNLFREVMLETFRNLTSIGKKWSDQNIEYEYQNPRRSFRSLIEEKVNEIKEDSHCGETFTQVPDDRLNFQEKKASPEVKSCDSFVCAEVGIGNSSFNMSIRGDTGHKAYEYQEYGPKPYKCQQPKNKKAFRYRPSIRTQERDHTGEKPYACKVCGKTFIFHSSIRRHMVMHSGDGTYKCKFCGKAFHSFSLYLIHERTHTGEKPYECKQCGKSFTYSATLQIHERTHTGEKPYECSKCDKAFHSSSSYHRHERSHMGEKPYQCKECGKAFAYTSSLRRHERTHSGKKPYECKQYGEGLSYLISFQTHIRMNSGERPYKCKICGKGFYSAKSFQTHEKTHTGEKRYKCKQCGKAFNLSSSFRYHERIHTGEKPYECKQCGKAFRSASQLRVHGGTHTGEKPYECKECGKAFRSTSHLRVHGRTHTGEKPYECKECGKAFRYVKHLQIHERTEKHIRMPSGERPYKCSICEKGFYSAKSFQTHEKTHTGEKPYECNQCGKAFRCCNSLRYHERTHTGEKPYECKQCGKAFRSASHLRMHERTHTGEKPYECKQCGKAFSCASNLRKHGRTHTGEKPYECKQCGKAFRSASNLQMHERTHTGEKPYECKECEKAFCKFSSFQIHERKHRGEKPYECKHCGNGFTSAKILQIHARTHIGEKHYECKECGKAFNYFSSLHIHARTHMGEKPYECKDCGKAFS

SEQ ID NO: 101093 - protein, 531 aa, Homo sapiens
  Payload ID: 20137
  Gene Name: zinc finger protein 701
  Uniprot ID: Q9NV72
  ENSP ID: ENSP00000301093
MGFLHVGQDGLELPTSGDPPASASQSAGITGVSHRTQPPCFEGLTSKDLVREEKTRKRKRKAKESGMALLQGLLTFRDVAIEFSQEEWKCLDPAQRTLYRDVMLENYRNLVSLDTSSKCMMKMFSSTGQGNTEVVHTGTLQIHASHHIGDTCFQEIEKDIHDFVFQWQENETNGHEALMTKTKKLMSSTERHDQRHAGNKPIKNELGSSFHSHLPEVHIFHPEGKIGNQVEKAINDAFSVSASQRISCRPKTRISNKYRNNFLQSSLLTQKREVHTREKSFQRNESGKAFNGSSLLKKHQIIHLGDKQYKCDVCGKDFHQKRYLACHRCHTGENPYTCNECGKTFSHNSALLVHKAIHTGEKPYKCNECGKVFNQQSNLARHHRVHTGEKPYKCEECDKVFSRKSHLERHRRIHTGEKPYKCKVCDKAFRRDSHLAQHTVIHTGEKPYKCNECGKTFVQNSSLVMHKVIHTGEKRYKCNECGKVFNHKSNLACHRRLHTGEKPYKCNECGKVFNRKSNLERHHRLHTGKKS

SEQ ID NO: 101094 - protein, 465 aa, Homo sapiens
  Payload ID: 20137
  Gene Name: zinc finger protein 701
  Uniprot ID: Q9NV72
  ENSP ID: ENSP00000375662
MALLQGLLTFRDVAIEFSQEEWKCLDPAQRTLYRDVMLENYRNLVSLDTSSKCMMKMFSSTGQGNTEVVHTGTLQIHASHHIGDTCFQEIEKDIHDFVFQWQENETNGHEALMTKTKKLMSSTERHDQRHAGNKPIKNELGSSFHSHLPEVHIFHPEGKIGNQVEKAINDAFSVSASQRISCRPKTRISNKYRNNFLQSSLLTQKREVHTREKSFQRNESGKAFNGSSLLKKHQIIHLGDKQYKCDVCGKDFHQKRYLACHRCHTGENPYTCNECGKTFSHNSALLVHKAIHTGEKPYKCNECGKVFNQQSNLARHHRVHTGEKPYKCEECDKVFSRKSHLERHRRIHTGEKPYKCKVCDKAFRRDSHLAQHTVIHTGEKPYKCNECGKTFVQNSSLVMHKVIHTGEKRYKCNECGKVFNHKSNLACHRRLHTGEKPYKCNECGKVFNRKSNLERHHRLHTGKKS

SEQ ID NO: 101095 - protein, 531 aa, Homo sapiens; identical to SEQ ID NO: 101093
  Payload ID: 20137
  Gene Name: zinc finger protein 701
  Uniprot ID: Q9NV72
  ENSP ID: ENSP00000444339

SEQ ID NO: 101096 - protein, 212 aa, Homo sapiens
  Payload ID: 20137
  Gene Name: zinc finger protein 701
  ENSP ID: ENSP00000471080
MGFLHVGQDGLELPTSGDPPASASQSAGITGVSHRTQPPCFEGLTSKDLVREEKTRKRKRKAKESGMALLQGLLTFRDVAIEFSQEEWKCLDPAQRTLYRDVMLENYRNLVSLDTSSKCMMKMFSSTGQGNTEVVHTGTLQIHASHHIGDTCFQEIEKDIHDFVFQWQENETNGHEALMTKTKKLMSSTERHDQRHAGNKPIKNELGSSFHS

SEQ ID NO: 101097 - protein, 145 aa, Homo sapiens
  Payload ID: 20137
  Gene Name: zinc finger protein 701
  ENSP ID: ENSP00000472955
MSQLNLKQIIVSLCPPGCECSLVILAHCNLCLLSSSNSCALVSQVAEITGLTSKDLVREEKTRKRKRKAKESGMALLQGLLTFRDVAIEFSQEEWKCLDPAQRTLYRDVMLENYRNLVSLDTSSKCMMKMFSSTGQGNTEVVHTG

SEQ ID NO: 101098 - protein, 590 aa, Homo sapiens
  Payload ID: 20138
  Gene Name: zinc finger protein 703
  Uniprot ID: Q9H7S9
  ENSP ID: ENSP00000332325
MSDSPAGSNPRTPESSGSGSGGGGKRPAVPAAVSLLPPADPLRQANRLPIRVLKMLSAHTGHLLHPEYLQPLSSTPVSPIELDAKKSPLALLAQTCSQIGKPDPPPSSKLNSVAAAANGLGAEKDPGRSAPGAASAAAALKQLGDSPAEDKSSFKPYSKGSGGGDSRKDSGSSSVSSTSSSSSSSPGDKAGFRVPSAACPPFPPHGAPVSASSSSSSPGGSRGGSPHHSDCKNGGGVGGGELDKKDQEPKPSPEPAAVSRGGGGEPGAHGGAESGASGRKSEPPSALVGAGHVAPVSPYKPGHSVFPLPPSSIGYHGSIVGAYAGYPSQFVPGLDPSKSGLVGGQLSGGLGLPPGKPPSSSPLTGASPPSFLQGLCRDPYCLGGYHGASHLGGSSCSTCSAHDPAGPSLKAGGYPLVYPGHPLQPAALSSSAAQAALPGHPLYTYGFMLQNEPLPHSCNWVAASGPCDKRFATSEELLSHLRTHTALPGAEKLLAAYPGASGLGSAAAAAAAAASCHLHLPPPAAPGSPGSLSLRNPHTLGLSRYHPYGKSHLSTAGGLAVPSLPTAGPYYSPYALYGQRLASASALGYQ

SEQ ID NO: 101099 - protein, 412 aa, Homo sapiens
  Payload ID: 20139
  Gene Name: zinc finger protein 704
  Uniprot ID: Q6ZNC4
  ENSP ID: ENSP00000331462
MTFTFQSEDLKRDCGKKMSHQHVFSLAMEEDVKTADTKKASRILDHEKENTRSICLLEQKRKVVSSNIDVPPARKSSEELDMDKVTAAMVLTSLSTSPLVRSPPVRPNESLSGSWKEGGCVPSSTSSSGYWSWSAPSDQSNPSTPSPPLSADSFKPFRSPAQPDDGIDEAEASNLLFDEPIPRKRKNSMKVMFKCLWKNCGKVLSTAAGIQKHIRTIHLGRVGDSDYSDGEEDFYYTEIKLNTDSVADGLSSLAPVSPSQSLASPPTFPIPDSSRTETPCAKTETKLMTPLSRSAPTTLYLVHTDHAYQATPPVTIPGSAKFTPNGSSFSISWQSPPVTFTGIPVSPTHHPVGTGEQRQHAHTVLSSPPRGTVSLRKPRGEGKKCRKVYGMENRDMWCTACRWKKACQRFLD

SEQ ID NO: 101100 - protein, 189 aa, Homo sapiens
  Payload ID: 20139
  Gene Name: zinc finger protein 704
  ENSP ID: ENSP00000427715
MTFTFQSEDLKRDCGKKMSHQHVFSLAMEEDVKTADTKKASRILDHEKENTRSICLLEQKRKVVSSNIDVPPARKSSEELDMDKVTAAMVLTSLSTSPLVRSPPVRPNESLSGSWKEGGCVPSSTSSSGYWSWSAPSDQSNPSTPSPPLSADSFKPFRSPAQPDDGIDEAEASNLLFDEPIPRKRKNSM

SEQ ID NO: 101101 - protein, 300 aa, Homo sapiens
  Payload ID: 20140
  Gene Name: zinc finger protein 705A
  Uniprot ID: Q6ZN79
  ENSP ID: ENSP00000352233
MHSLKKVTFEDVAIDFTQEEWAMMDTSKRKLYRDVMLENISHLVSLGYQISKSYIILQLEQGKELWREGREFLQDQNPDRESALKKKHMISMHPITRKDASTSMTMENSLILEDPFECNDSGEDCTHSSTITQRLLTHSGKKPYVSKQCGKSLRNLFSPKPHKQIHTKGKSYQCNLCEKAYTNCFRLRRHKMTHTGERPYACHLCGKAFTQCSHLRRHEKTHTGERPYKCHQCGKAFIQSFNLRRHERTHLGKKCYECDKSGKAFSQSSGFRGNKIIHTGEKPHACLLCGKAFSLSSDLR

SEQ ID NO: 101102 - protein, 207 aa, Homo sapiens
  Payload ID: 20140
  Gene Name: zinc finger protein 705A
  ENSP ID: ENSP00000379816
MHSLKKVTFEDVAIDFTQEEWAMMDTSKRKLYRDVMLENISHLVSLGYQISKSYIILQLEQGKELWREGREFLQDQNPDRESALKKKHMISMHPITRKDASTSMTMENSLILEDPFECNDSGEDCTHSSTITQRLLTHSGKKPYVSKQCGKSLRNLFSPKPHKQIHTKGKSYQCNLCEKAYTNCFRLRRHKMTHTGERPYACHLCGK

SEQ ID NO: 101103 - protein, 77 aa, Homo sapiens
  Payload ID: 20140
  Gene Name: zinc finger protein 705A
  ENSP ID: ENSP00000384896
MHSLKKVTFEDVAIDFTQEEWAMMDTSKRKLYRDVMLENISHLVSLGYQISKSYIILQLEQGKELWREGREFLQDQN

SEQ ID NO: 101104 - protein, 101 aa, Homo sapiens
  Payload ID: 20140
  Gene Name: zinc finger protein 705A
  ENSP ID: ENSP00000475525
  MOD_RES (1)..(1): Any amino acid
XDRESALKKKHMISMHPITRKDASTSMTMENSLILEDPFECNDSGEDCTHSSTITQRLLTHSGKKPYVSKQCGKSLRNLFSPKPHKQIHTKGNPTSSWMSG

SEQ ID NO: 101105 - protein, 300 aa, Homo sapiens; identical to SEQ ID NO: 101101
  Payload ID: 20140
  Gene Name: zinc finger protein 705A
  Uniprot ID: Q6ZN79
  ENSP ID: ENSP00000481663

SEQ ID NO: 101106 - protein, 300 aa, Homo sapiens
  Payload ID: 20141
  Gene Name: zinc finger protein 705B
  Uniprot ID: P0CI00
  ENSP ID: ENSP00000382987
MHSLEKVTFEDVAIDFTQEEWDMMDTSKRKLYRDVMLENISHLVSLGYQISKSYIILQLEQGKELWWEGRVFLQDQNPDRESALKKKHMISMHPIIRKDTSTSMTMENSLILEDPFEYNDSGEDCTHSSTITQCLLTHSGKKPCVSKQCGKSLRNLLSPKPRKQIHTKGKSYQCNLCEKAYTNCFYLRRHKMTHTGERPYACHLCGKAFTQCSHLRRHEKTHTGERPYKCHQCGKAFIQSFNLRRHERTHLGQKCYECDKSGKAFSQSSGFRGNKIIHIGEKPPACLLCGKAFSLSSDLR

SEQ ID NO: 101107 - protein, 300 aa, Homo sapiens
  Payload ID: 20142
  Gene Name: zinc finger protein 705D
  Uniprot ID: P0CH99
  ENSP ID: ENSP00000382957
MHSLEKVTFEDVAIDFTQEEWDMMDTSKRKLYRDVMLENISHLVSLGYQISKSYIILQLEQGKELWREGRVFLQDQNPDRESALKKKHMISMHPIIRKDASTSMTMENSLILEDPFEYNDSGEDCTHSSTITQCLLTHSGKKPCVSKQCGKSLRNLLSPKPRKQIHTKGKSYQCNLCEKAYTNCFYLRRHKMTHTGERPYACHLCGKAFTQCSHLRRHEKTHTGERPYKCHQCGKAFIQSFNLRRHERTHLGQKCYECDKSGKAFSQSSGFRGNKIIHIGEKPHACLLCGKAFSLSSDLR

SEQ ID NO: 101108 - protein, 300 aa, Homo sapiens; identical to SEQ ID NO: 101107
  Payload ID: 20142
  Gene Name: zinc finger protein 705D
  Uniprot ID: P0CH99
  ENSP ID: ENSP00000445477

SEQ ID NO: 101109 - protein, 300 aa, Homo sapiens
  Payload ID: 20143
  Gene Name: zinc finger protein 705G
  Uniprot ID: A8MUZ8
  ENSP ID: ENSP00000383020
MHSLKKLTFEDVAIDFTQEEWAMMDTSKRKLYRDVMLENISHLVSLGYQISKSYIILQLEQGKELWREGRVFLQDQNPNRESALKKTHMISMHPITRKDASTSMTMENSLILEDPFECNDSGEDCTRSSTITQCLLTHSGKKPYVSKQCGKSLRNLLSTEPHKQIHTKGKSYQCNLCEKAYTNCFHLRRHKMTHTGERPYACHLCRKAFTQCSHLRRHEKTHTGQRPYKCHQYGKVFIQSFNLQRHERTHLGKKCYECDKSGKAFSQSSGFRGNKIIHTGEKPHACLLCGKAFSLSSNLR

SEQ ID NO: 101110 - protein, 300 aa, Homo sapiens
  Payload ID: 20143
  Gene Name: zinc finger protein 705G
  ENSP ID: ENSP00000479140
MHSLEKVTFEDVAIDFTQEEWDMMDTSKRKLYRDVMLENISHLVSLGYQISKSYIILQLEQGKELWWEGRVFLQDQNPDRESALKKKHMISMHPIIRKDTSTSMTMENSLILEDPFEYNDSGEDCTHSSTITQCLLTHSGKKPCVSKQCGKSLRNLLSPKPRKQIHTKGKSYQCNLCEKAYTNCFYLRRHKMTHTGERPYACHLCGKAFTQCSHLRRHEKTHTGERPYKCHQCGKAFIQSFNLRRHERTHLGQKCYECDKSGKAFSQSSGFRGNKIIHIGEKPHACLLCGKAFSLSSDLR

SEQ ID NO: 101111 - protein, 76 aa, Homo sapiens
  Payload ID: 20144
  Gene Name: zinc finger protein 706
  Uniprot ID: Q9Y5V0
  ENSP ID: ENSP00000311768
MARGQQKIQSQQKNAKKQAGQKKKQGHDQKAAAKAALIYTCTVCRTQMPDPKTFKQHFESKHPKTPLPPELADVQA

SEQ ID NO: 101112 - protein, 76 aa, Homo sapiens; identical to SEQ ID NO: 101111
  Payload ID: 20144
  Gene Name: zinc finger protein 706
  Uniprot ID: Q9Y5V0
  ENSP ID: ENSP00000427761

SEQ ID NO: 101113 - protein, 51 aa, Homo sapiens
  Payload ID: 20144
  Gene Name: zinc finger protein 706
  ENSP ID: ENSP00000427803
QKAAAKAALIYTCTVCRLSFAQFFVRHKCQTLRPSSSTLRASILRLHFLQN

SEQ ID NO: 101114 - protein, 76 aa, Homo sapiens; identical to SEQ ID NO: 101111
  Payload ID: 20144
  Gene Name: zinc finger protein 706
  Uniprot ID: Q9Y5V0
  ENSP ID: ENSP00000428227

SEQ ID NO: 101115 - protein, 76 aa, Homo sapiens; identical to SEQ ID NO: 101111
  Payload ID: 20144
  Gene Name: zinc finger protein 706
  Uniprot ID: Q9Y5V0
  ENSP ID: ENSP00000428696

SEQ ID NO: 101116 - protein, 76 aa, Homo sapiens; identical to SEQ ID NO: 101111
  Payload ID: 20144
  Gene Name: zinc finger protein 706
  Uniprot ID: Q9Y5V0
  ENSP ID: ENSP00000428985

SEQ ID NO: 101117 - protein, 42 aa, Homo sapiens
  Payload ID: 20144
  Gene Name: zinc finger protein 706
  ENSP ID: ENSP00000429260
MARGQQKIQSQQKNAKKQAGQKKKQGHDQKAAAKAALIYTCT

SEQ ID NO: 101118 - protein, 48 aa, Homo sapiens
  Payload ID: 20144
  Gene Name: zinc finger protein 706
  ENSP ID: ENSP00000429645
MARGQQKIQSQQKNAKKQAGQKKKQGHDQKAAAKAALIYTCTVCRVNS

SEQ ID NO: 101119 - protein, 8 aa, Homo sapiens
  Payload ID: 20144
  Gene Name: zinc finger protein 706
  ENSP ID: ENSP00000430090
MARGQQKI

SEQ ID NO: 101120 - protein, 76 aa, Homo sapiens; identical to SEQ ID NO: 101111
  Payload ID: 20144
  Gene Name: zinc finger protein 706
  Uniprot ID: Q9Y5V0
  ENSP ID: ENSP00000430165

SEQ ID NO: 101121 - protein, 76 aa, Homo sapiens; identical to SEQ ID NO: 101111
  Payload ID: 20144
  Gene Name: zinc finger protein 706
  Uniprot ID: Q9Y5V0
  ENSP ID: ENSP00000430823

SEQ ID NO: 101122 - protein, 53 aa, Homo sapiens
  Payload ID: 20144
  Gene Name: zinc finger protein 706
  ENSP ID: ENSP00000430845
MARGQQKIQSQQKNAKKQAGQKKKQGHDQKAAAKAALIYTCTVCRKSKLTNGN

SEQ ID NO: 101123 - protein, 30 aa, Homo sapiens
  Payload ID: 20144
  Gene Name: zinc finger protein 706
  ENSP ID: ENSP00000431059
  MOD_RES (1)..(1): Any amino acid
XMPDPKTFKQHFESKHPKTPLPPELADVQA

SEQ ID NO: 101124 - protein, 371 aa, Homo sapiens
  Payload ID: 20145
  Gene Name: zinc finger protein 707
  Uniprot ID: Q96C28
  ENSP ID: ENSP00000351482
MDMAQEPVTFRDVAIYFSREEWACLEPSQRALYRDVMLDNFSSVAALGFCSPRPDLVSRLEQWEEPWVEDRERPEFQAVQRGPRPGARKSADPKRPCDHPAWAHKKTHVRRERAREGSSFRKGFRLDTDDGQLPRAAPERTDAKPTAFPCQVLTQRCGRRPGRRERRKQRAVELSFICGTCGKALSCHSRLLAHQTVHTGTKAFECPECGQTFRWASNLQRHQKNHTREKPFCCEACGQAFSLKDRLAQHRKVHTEHRPYSCGDCGKAFKQKSNLLRHQLVHTGERPFYCADCGKAFRTKENLSHHQRVHSGEKPYTCAECGKSFRWPKGFSIHRRLHLTKRFYECGHCGKGFRHLGFFTRHQRTHRHGEV

SEQ ID NO: 101125 - protein, 55 aa, Homo sapiens
  Payload ID: 20145
  Gene Name: zinc finger protein 707
  ENSP ID: ENSP00000393748
MDMAQEPVTFRDVAIYFSREEWACLEPSQRALYRDVMLDNFSSVAALGEHGLSAA

SEQ ID NO: 101126 - protein, 371 aa, Homo sapiens; identical to SEQ ID NO: 101124
  Payload ID: 20145
  Gene Name: zinc finger protein 707
  Uniprot ID: Q96C28
  ENSP ID: ENSP00000413215

SEQ ID NO: 101127 - protein, 55 aa, Homo sapiens; identical to SEQ ID NO: 101125
  Payload ID: 20145
  Gene Name: zinc finger protein 707
  ENSP ID: ENSP00000434215

SEQ ID NO: 101128 - protein, 55 aa, Homo sapiens; identical to SEQ ID NO: 101125
  Payload ID: 20145
  Gene Name: zinc finger protein 707
  ENSP ID: ENSP00000434322

SEQ ID NO: 101129 - protein, 79 aa, Homo sapiens
  Payload ID: 20145
  Gene Name: zinc finger protein 707
  ENSP ID: ENSP00000434503
MDMAQEPVTFRDVAIYFSREEWACLEPSQRALYRDVMLDNFSSVAALGFCSPRPDLVSRLEQWEEPWVEDRERPEFQAV

SEQ ID NO: 101130 - protein, 55 aa, Homo sapiens; identical to SEQ ID NO: 101125
  Payload ID: 20145
  Gene Name: zinc finger protein 707
  ENSP ID: ENSP00000434791

SEQ ID NO: 101131 - protein, 92 aa, Homo sapiens
  Payload ID: 20145
  Gene Name: zinc finger protein 707
  ENSP ID: ENSP00000435251
MDMAQEPVTFRDVAIYFSREEWACLEPSQRALYRDVMLDNFSSVAALGFCSPRPDLVSRLEQWEEPWVEDRERPEFQAVQRGPRPEWDGAAM

SEQ ID NO: 101132 - protein, 55 aa, Homo sapiens; identical to SEQ ID NO: 101125
  Payload ID: 20145
  Gene Name: zinc finger protein 707
  ENSP ID: ENSP00000435679

SEQ ID NO: 101133 - protein, 145 aa, Homo sapiens
  Payload ID: 20145
  Gene Name: zinc finger protein 707
  ENSP ID: ENSP00000435906
MLDNFSSVAALGFCSPRPDLVSRLEQWEEPWVEDRERPEFQAVQRGPRPGARKSADPKRPCDHPAWAHKKTHVRRERAREGSSFRKGFRLDTDDGQLPRAAPERTDAKPTAFPCQVLTQRCGRRPGRRERRKQRAVELSFICGTC

SEQ ID NO: 101134 - protein, 371 aa, Homo sapiens; identical to SEQ ID NO: 101124
  Payload ID: 20145
  Gene Name: zinc finger protein 707
  Uniprot ID: Q96C28
  ENSP ID: ENSP00000436212

SEQ ID NO: 101135 - protein, 371 aa, Homo sapiens; identical to SEQ ID NO: 101124
  Payload ID: 20145
  Gene Name: zinc finger protein 707
  Uniprot ID: Q96C28
  ENSP ID: ENSP00000436250

SEQ ID NO: 101136 - protein, 134 aa, Homo sapiens
  Payload ID: 20145
  Gene Name: zinc finger protein 707
  ENSP ID: ENSP00000436362
MDMAQEPVTFRDVAIYFSREEWACLEPSQRALYRDVMLDNFSSVAALAPDQTSSLAWNSGRSRGLKTGRDLSSRQCRGDPGQGQGSLQTPRDLVIIQLGLTRKPTCGEKEPGKEAALGRASGWTRMTGSFPELL

SEQ ID NO: 101137 - protein, 103 aa, Homo sapiens
  Payload ID: 20145
  Gene Name: zinc finger protein 707
  ENSP ID: ENSP00000436394
MDMAQEPVTFRDVAIYFSREEWACLEPSQRALYRDVMLDNFSSVAALGFCSPRPDLVSRLEQWEEPWVEDRERPEFQAVQRGPRPATQVLSGGGHWCGCLTSL

SEQ ID NO: 101138 - protein, 47 aa, Homo sapiens
  Payload ID: 20145
  Gene Name: zinc finger protein 707
  ENSP ID: ENSP00000436634
MDMAQEPVTFRDVAIYFSREEWACLEPSQRALYRDVMLDNFSSVAAL

SEQ ID NO: 101139 - protein, 141 aa, Homo sapiens
  Payload ID: 20145
  Gene Name: zinc finger protein 707
  ENSP ID: ENSP00000437134
MDMAQEPVTFRDVAIYFSREEWACLEPSQRALYRDVMLDNFSSVAALGFCSPRPDLVSRLEQWEEPWVEDRERPEFQAVQRGPRPGARKSADPKRPCDHPAWAHKKTHVRRERAREGSSFRKGFRLDTDDGQLPRAAPERT

SEQ ID NO: 101140 - protein, 371 aa, Homo sapiens; identical to SEQ ID NO: 101124
  Payload ID: 20145
  Gene Name: zinc finger protein 707
  Uniprot ID: Q96C28
  ENSP ID: ENSP00000481033

SEQ ID NO: 101141 - protein, 371 aa, Homo sapiens; identical to SEQ ID NO: 101124
  Payload ID: 20145
  Gene Name: zinc finger protein 707
  Uniprot ID: Q96C28
  ENSP ID: ENSP00000481069

SEQ ID NO: 101142 - protein, 371 aa, Homo sapiens; identical to SEQ ID NO: 101124
  Payload ID: 20145
  Gene Name: zinc finger protein 707
  Uniprot ID: Q96C28
  ENSP ID: ENSP00000484032

SEQ ID NO: 101143 - protein, 371 aa, Homo sapiens; identical to SEQ ID NO: 101124
  Payload ID: 20145
  Gene Name: zinc finger protein 707
  Uniprot ID: Q96C28
  ENSP ID: ENSP00000484744

SEQ ID NO: 101144 - protein, 145 aa, Homo sapiens; identical to SEQ ID NO: 101133
  Payload ID: 20145
  Gene Name: zinc finger protein 707
  ENSP ID: ENSP00000487682

SEQ ID NO: 101145 - protein, 92 aa, Homo sapiens; identical to SEQ ID NO: 101131
  Payload ID: 20145
  Gene Name: zinc finger protein 707
  ENSP ID: ENSP00000487846

SEQ ID NO: 101146 - protein, 55 aa, Homo sapiens; identical to SEQ ID NO: 101125
  Payload ID: 20145
  Gene Name: zinc finger protein 707
  ENSP ID: ENSP00000487900

SEQ ID NO: 101147 - protein, 141 aa, Homo sapiens; identical to SEQ ID NO: 101139
  Payload ID: 20145
  Gene Name: zinc finger protein 707
  ENSP ID: ENSP00000488006

SEQ ID NO: 101148 - protein, 55 aa, Homo sapiens; identical to SEQ ID NO: 101125
  Payload ID: 20145
  Gene Name: zinc finger protein 707
  ENSP ID: ENSP00000488098

SEQ ID NO: 101149 - protein, 55 aa, Homo sapiens; identical to SEQ ID NO: 101125
  Payload ID: 20145
  Gene Name: zinc finger protein 707
  ENSP ID: ENSP00000488157

SEQ ID NO: 101150 - protein, 55 aa, Homo sapiens; identical to SEQ ID NO: 101125
  Payload ID: 20145
  Gene Name: zinc finger protein 707
  ENSP ID: ENSP00000488184

SEQ ID NO: 101151 - protein, 55 aa, Homo sapiens; identical to SEQ ID NO: 101125
  Payload ID: 20145
  Gene Name: zinc finger protein 707
  ENSP ID: ENSP00000488529

SEQ ID NO: 101152 - protein, 103 aa, Homo sapiens; identical to SEQ ID NO: 101137
  Payload ID: 20145
  Gene Name: zinc finger protein 707
  ENSP ID: ENSP00000488596

SEQ ID NO: 101153 - protein, 134 aa, Homo sapiens; identical to SEQ ID NO: 101136
  Payload ID: 20145
  Gene Name: zinc finger protein 707
  ENSP ID: ENSP00000488654

SEQ ID NO: 101154 - protein, 79 aa, Homo sapiens; identical to SEQ ID NO: 101129
  Payload ID: 20145
  Gene Name: zinc finger protein 707
  ENSP ID: ENSP00000488675

SEQ ID NO: 101155 - protein, 47 aa, Homo sapiens; identical to SEQ ID NO: 101138
  Payload ID: 20145
  Gene Name: zinc finger protein 707
  ENSP ID: ENSP00000488790

SEQ ID NO: 101156 - protein, 563 aa, Homo sapiens
  Payload ID: 20146
  Gene Name: zinc finger protein 708
  Uniprot ID: P17019
  ENSP ID: ENSP00000349401
MGPLTFMDVAIEFSLEEWQCLDTAQQNLYRNVMLENYRNLVFLGIAVSNLDLITCLEQGKEPWNMKRHEMAAKPPAMCSHFAKDLRPEQYIKNSFQQVILRRYGKCGYQKGCKSVDEHKLHKGGHKGLNRCVTTTQSKIVQCDKYVKVFHKYSNAKRHKIRHTGKNPFKCKECGKSFCMLSQLTQHEIIHTGEKPYKCEECGKAFKKSSNLTNHKIIHTGEKPYKCEECGKAFNQSSTLTRHKIIHTGEKLYKCEECGKAFNRSSNLTKHKIVHTGEKPYKCEECGKAFKQSSNLTNHKKIHTGEKPYKCGECGKAFTLSSHLTTHKRIHTGEKPYKCEECGKAFSVFSTLTKHKIIHTEEKPYKCEECGKAFNRSSHLTNHKVIHTGEKPYKCEECGKAFTKSSTLTYHKVIHTGKKPYKCEECGKAFSIFSILTKHKVIHTEDKPYKCEECGKTFNYSSNFTNHKKIHTGEKPYKCEECGKSFILSSHLTTHKIIHTGEKPYKCKECGKAFNQSSTLMKHKIIHTGEKPYKCEECGKAFNQSPNLTKHKRIHTKEKPYKCK

SEQ ID NO: 101157 - protein, 126 aa, Homo sapiens
  Payload ID: 20146
  Gene Name: zinc finger protein 708
  ENSP ID: ENSP00000469961
MKRHEMAAKPPAMCSHFAKDLRPEQYIKNSFQQVILRRYGKCGYQKGCKSVDEHKLHKGGHKGLNRCVTTTQSKIVQCDKYVKVFHKYSNAKRHKIRHTGKNPFKCKECGKSFCMLSQLTQHEIIH

SEQ ID NO: 101158 - protein, 65 aa, Homo sapiens
  Payload ID: 20146
  Gene Name: zinc finger protein 708
  ENSP ID: ENSP00000471855
MCSHFAKDLRPEQYIKNSFQQVILRRYGKCGYQKGCKSVDEHKLHKGGHKGLNRCVTTTQSKIVQ

SEQ ID NO: 101159 - protein, 38 aa, Homo sapiens
  Payload ID: 20146
  Gene Name: zinc finger protein 708
  ENSP ID: ENSP00000472827
MVKVFLWKLYGVMCLQPPFSFFLVLGFSTVWSKPRYTS

SEQ ID NO: 101160 - protein, 528 aa, Homo sapiens
  Payload ID: 20146
  Gene Name: zinc finger protein 708
  ENSP ID: ENSP00000478939
MGPLTFMDVAIEFSLEEWQCLDTAQQNLYRNVMLENYRNLVFLGIAVSNLDLITCLEQGKEPWNMKRHEMAAKPPAMCSHFAKDLRPEQYIKNSFQQVILRRYGKCGYQKVKVWMSCDKYVKVFHKYSNAKRHKITYWKKSFQCKECGKSFCMLSQLTQHEIIHTGEKPYKCEECGKAFKKSSNLTNHKIIHTGEKPYKCEECGKAFNQSSTLTRHKIIHTGEKLYKCEECGKAFNRSSNLTKHKIVHTGEKPYKCEECGKAFKQSSNLTNHKKIHTGEKPYKCGECGKAFTLSSHLTTHKRIHTGEKPYKCEECGKAFSVFSTLTKHKIIHTEEKPYKCEECGKAFNRSSHLTNHKVIHTGEKPYKCEECGKAFTKSSTLTFTNHKKIHTGEKPYKCEECGKSFILSSHLTTHKIIHTGEKPYKCKECGKAFNQSSTLMKHKIIHTGEKPYKCEECGKAFNQSPNLTKHKIIHTGEKSYKCEECGKAFKRYLNLTTHKIIPAGEKPYKCEECGKAFNHFSNLTKHNS

SEQ ID NO: 101161 - protein, 641 aa, Homo sapiens; identical to SEQ ID NO: 20438
  Payload ID: 20147
  Gene Name: zinc finger protein 709
  Uniprot ID: Q8N972
  ENSP ID: ENSP00000380840

SEQ ID NO: 101162 - protein, 133 aa, Homo sapiens
  Payload ID: 20147
  Gene Name: zinc finger protein 709
  ENSP ID: ENSP00000398085
VAPLQSLSAVTSSDQRRRSKEARTPGTRDTDSVVFEDVAVNFTQEEWALLGPSQKKLYRDVMQETFVNLASIGENWEEKNIEDHKNQGRKLRSHMVERLCERKEGSQFGETISQTPNPKPNKKTFTRVKPYEC

SEQ ID NO: 101163 - protein, 489 aa, Homo sapiens
  Payload ID: 20148
  Gene Name: zinc finger protein 71
  Uniprot ID: Q9NQZ8
  ENSP ID: ENSP00000328245
MKELDPKNDISEDKLSVVGEATGGPTRNGARGPGSEGVWEPGSWPERPRGDAGAEWEPLGIPQGNKLLGGSVPACHELKAFANQGCVLVPPRLDDPTEKGACPPVRRGKNFSSTSDLSKPPMPCEEKKTYDCSECGKAFSRSSSLIKHQRIHTGEKPFECDTCGKHFIERSSLTIHQRVHTGEKPYACGDCGKAFSQRMNLTVHQRTHTGEKPYVCDVCGKAFRKTSSLTQHERIHTGEKPYACGDCGKAFSQNMHLIVHQRTHTGEKPYVCPECGRAFSQNMHLTEHQRTHTGEKPYACKECGKAFNKSSSLTLHQRNHTGEKPYVCGECGKAFSQSSYLIQHQRFHIGVKPFECSECGKAFSKNSSLTQHQRIHTGEKPYECYICKKHFTGRSSLIVHQIVHTGEKPYVCGECGKAFSQSAYLIEHQRIHTGEKPYRCGQCGKSFIKNSSLTVHQRIHTGEKPYRCGECGKTFSRNTNLTRHLRIHT

SEQ ID NO: 101164 - protein, 128 aa, Homo sapiens
  Payload ID: 20148
  Gene Name: zinc finger protein 71
  ENSP ID: ENSP00000471138
MKELDPKNDISEDKLSVVGEATGGPTRNGARGPGSEGVWEPGSWPERPRGDAGAEWEPLGIPQGNKLLGGSVPACHELKAFANQGCVLVPPRLDDPTEKGACPPVRRGKNFSSTSDLSKPPMPCEEKK

SEQ ID NO: 101165 - protein, 664 aa, Homo sapiens
  Payload ID: 20149
  Gene Name: zinc finger protein 710
  Uniprot ID: Q8N1W2
  ENSP ID: ENSP00000268154
MEGFMDSGTQTDAVVVLSLAQAAVLGLVSENELFGATISAEAFYPDLGPELSGAAMGEPEPPGPDVYQLACNGRALEEPAEEEVLEVEAACEKHTRRKTRPPVRLVPKVKFEKVEEEEQEVYEVSVPGDDKDAGPAEAPAEAASGGCDALVQSSAVKMIDLSAFSRKPRTLRHLPRTPRPELNVAPYDPHFPAPARDGFPEPSMALPGPEALPTECGFEPPHLAPLSDPEAPSMESPEPVKPEQGFVWQEASEFEADTAGSTVERHKKAQLDRLDINVQIDDSYLVEAGDRQKRWQCRMCEKSYTSKYNLVTHILGHNGIKPHSCPHCSKLFKQPSHLQTHLLTHQGTRPHKCQVCHKAFTQTSHLKRHMLLHSEVKPYSCHFCGRGFAYPSELKAHEVKHESGRCHVCVECGLDFSTLTQLKRHLASHQGPTLYQCLECDKSFHYRSQLQNHMLKHQNVRPFVCTECGMEFSQIHHLKQHSLTHKGVKEFKCEVCGREFTLQANMKRHMLIHTSVRPYQCHICFKTFVQKQTLKTHMIVHSPVKPFKCKVCGKSFNRMYNLLGHMHLHAGSKPFKCPYCSSKFNLKGNLSRHMKVKHGVMDIGLDSQDPMMELTGTDPSELDGQQEMEDFEENAYSYASVDSSAEASVLTEQAMKEMAYYNVL

SEQ ID NO: 101166 - protein, 79 aa, Homo sapiens
  Payload ID: 20149
  Gene Name: zinc finger protein 710
  ENSP ID: ENSP00000452993
MEGFMDSGTQTDAVVVLSLAQAAVLGLVSENELFGATISAEAFYPDLGPELSGAAMGEPEPPGPDVYQLACNGRALEEP

SEQ ID NO: 101167 - protein, 160 aa, Homo sapiens
  Payload ID: 20149
  Gene Name: zinc finger protein 710
  ENSP ID: ENSP00000453147
  MOD_RES (1)..(1): Any amino acid
XPSELKAHEVKHESGRCHVCVECGLDFSTLTQLKRHLASHQGPTLYQCLECDKSFHYRSQLQNHMLKHQNVRPFVCTECGMEFSQIHHLKQHSLTHKGVKEFKCEVCGREFTLQANMKRLAKAETSLGWAQVWKGGTLEGHDDNNDGIFMSSSKDLNEIT

SEQ ID NO: 101168 - protein, 387 aa, Homo sapiens
  Payload ID: 20149
  Gene Name: zinc finger protein 710
  ENSP ID: ENSP00000453404
KRWQCRMCEKSYTSKYNLVTHILGHNGIKPHSCPHCSKLFKQPSHLQTHLLTHQGTRPHKCQVCHKAFTQTSHLKRHMLLHSEVKPYSCHFCGRGFAYPSELKAHEVKHESGRCHVCVECGLDFSTLTQLKRHLASHQGPTLYQCLECDKSFHYRSQLQNHMLKHQNVRPFVCTECGMEFSQIHHLKQHSLTHKGVKEFKCEVCGREFTLQANMKRHMLIHTSVRPYQCHICFKTFVQKQTLKTHMIVHSPVKPFKCKVCGKSFNRMYNLLGHMHLHAGSKPFKCPYCSSKFNLKGNLSRHMKVKHGVMDIGLDSQGGWAKRNGQSRNDTNMTHSGASCPVRGVGRLAKAETSLGWAQVWKGGTLEGHDDNNDGIFMSSSKDLNEIT

SEQ ID NO: 101169 - protein, 761 aa, Homo sapiens
  Payload ID: 20150
  Gene Name: zinc finger protein 711
  Uniprot ID: Q9Y462
  ENSP ID: ENSP00000276123
MDSGGGSLGLHTPDSRMAHTMIMQDFVAGMAGTAHIDGDHIVVSVPEAVLVSDVVTDDGITLDHGLAAEVVHGPDIITETDVVTEGVIVPEAVLEADVAIEEDLEEDDGDHILTSELITETVRVPEQVFVADLVTGPNGHLEHVVQDCVSGVDSPTMVSEEVLVTNSDTETVIQAAGGVPGSTVTIKTEDDDDDDVKSTSEDYLMISLDDVGEKLEHMGNTPLKIGSDGSQEDAKEDGFGSEVIKVYIFKAEAEDDVEIGGTEIVTESEYTSGHSVAGVLDQSRMQREKMVYMAVKDSSQEEDDIRDERRVSRRYEDCQASGNTLDSALESRSSTAAQYLQICDGINTNKVLKQKAKKRRRGETRQWQTAVIIGPDGQPLTVYPCHICTKKFKSRGFLKRHMKNHPDHLMRKKYQCTDCDFTTNKKVSFHNHLESHKLINKVDKTHEFTEYTRRYREASPLSSNKLILRDKEPKMHKCKYCDYETAEQGLLNRHLLAVHSKNFPHVCVECGKGFRHPSELKKHMRTHTGEKPYQCQYCIFRCADQSNLKTHIKSKHGNNLPYKCEHCPQAFGDERELQRHLDLFQGHKTHQCPHCDHKSTNSSDLKRHIISVHTKDFPHKCEVCDKGFHRPSELKKHSDIHKGRKIHQCRHCDFKTSDPFILSGHILSVHTKDQPLKCKRCKRGFRQQNELKKHMKTHTGRKIYQCEYCEYSTTDASGFKRHVISIHTKDYPHRCEFCKKGFRRPSEKNQHIMRHHKEALM

SEQ ID NO: 101170 - protein, 807 aa, Homo sapiens
  Payload ID: 20150
  Gene Name: zinc finger protein 711
  Uniprot ID: Q9Y462
  ENSP ID: ENSP00000353922
MDSGGGSLGLHTPDSRMAHTMIMQDFVAGMAGTAHIDGDHIVVSVPEAVLVSDVVTDDGITLDHGLAAEVVHGPDIITETDVVTEGVIVPEAVLEADVAIEEDLEEDDGDHILTSELITETVRVPEQVFVADLVTGPNGHLEHVVQDCVSGVDSPTMVSEEVLVTNSDTETVIQAAGGVPGSTVTIKTEDDDDDDVKSTSEDYLMISLDDVGEKLEHMGNTPLKIGSDGSQEDAKEDGFGSEVIKVYIFKAEAEDDVEIGGTEIVTESEYTSGHSVAGVLDQSRMQREKMVYMAVKDSSQEEDDISCAEIADEVYMEVIVGEEEGTSLPEIQLEDSDVNKTVVPVVWAAAYGDERRVSRRYEDCQASGNTLDSALESRSSTAAQYLQICDGINTNKVLKQKAKKRRRGETRQWQTAVIIGPDGQPLTVYPCHICTKKFKSRGFLKRHMKNHPDHLMRKKYQCTDCDFTTNKKVSFHNHLESHKLINKVDKTHEFTEYTRRYREASPLSSNKLILRDKEPKMHKCKYCDYETAEQGLLNRHLLAVHSKNFPHVCVECGKGFRHPSELKKHMRTHTGEKPYQCQYCIFRCADQSNLKTHIKSKHGNNLPYKCEHCPQAFGDERELQRHLDLFQGHKTHQCPHCDHKSTNSSDLKRHIISVHTKDFPHKCEVCDKGFHRPSELKKHSDIHKGRKIHQCRHCDFKTSDPFILSGHILSVHTKDQPLKCKRCKRGFRQQNELKKHMKTHTGRKIYQCEYCEYSTTDASGFKRHVISIHTKDYPHRCEFCKKGFRRPSEKNQHIMRHHKEALM

SEQ ID NO: 101171 - protein, 761 aa, Homo sapiens; identical to SEQ ID NO: 101169
  Payload ID: 20150
  Gene Name: zinc finger protein 711
  Uniprot ID: Q9Y462
  ENSP ID: ENSP00000362260

SEQ ID NO: 101172 - protein, 443 aa, Homo sapiens
  Payload ID: 20151
  Gene Name: zinc finger protein 713
  ENSP ID: ENSP00000416662
MPSQNAVFSQEGNMEEEEMNDGSQMVRSQESLTFQDVAVDFTREEWDQLYPAQKNLYRDVMLENYRNLVALGYQLCKPEVIAQLELEEEWVIERDSLLDTHPDGENRPEIKKSTTSQNISDENQTHEMIMERLAGDSFWYSILGGLWDFDYHPEFNQENHKRYLGQVTLTHKKITQERSLECNKFAENCNLNSNLMQQRIPSIKIPLNSDTQGNSIKHNSDLIYYQGNYVRETPYEYSECGKIFNQHILLTDHIHTAEKPSECGKAFSHTSSLSQPQMLLTGEKPYKCDECGKRFSQRIHLIQHQRIHTGEKPFICNGCGKAFRQHSSFTQHLRIHTGEKPYKCNQCGKAFSRITSLTEHHRLHTGEKPYECGFCGKAFSQRTHLNQHERTHTGEKPYKCNECGKAFSQSAHLNQHRKIHTREKLCEYKCEQTVRHSPSFSST

SEQ ID NO: 101173 - protein, 51 aa, Homo sapiens
  Payload ID: 20151
  Gene Name: zinc finger protein 713
  ENSP ID: ENSP00000416974
MPSQNAVFSQEGNMEEEEMNDGSQMVRSQMWRSVCSPLDLGKAVTGGCKAL

SEQ ID NO: 101174 - protein, 430 aa, Homo sapiens
  Payload ID: 20151
  Gene Name: zinc finger protein 713
  Uniprot ID: Q8N859
  ENSP ID: ENSP00000487818
MEEEEMNDGSQMVRSQESLTFQDVAVDFTREEWDQLYPAQKNLYRDVMLENYRNLVALGYQLCKPEVIAQLELEEEWVIERDSLLDTHPDGENRPEIKKSTTSQNISDENQTHEMIMERLAGDSFWYSILGGLWDFDYHPEFNQENHKRYLGQVTLTHKKITQERSLECNKFAENCNLNSNLMQQRIPSIKIPLNSDTQGNSIKHNSDLIYYQGNYVRETPYEYSECGKIFNQHILLTDHIHTAEKPSECGKAFSHTSSLSQPQMLLTGEKPYKCDECGKRFSQRIHLIQHQRIHTGEKPFICNGCGKAFRQHSSFTQHLRIHTGEKPYKCNQCGKAFSRITSLTEHHRLHTGEKPYECGFCGKAFSQRTHLNQHERTHTGEKPYKCNECGKAFSQSAHLNQHRKIHTREKLCEYKCEQTVRHSPSFSST

SEQ ID NO: 101175 - protein, 84 aa, Homo sapiens
  Payload ID: 20152
  Gene Name: zinc finger protein 714
  ENSP ID: ENSP00000459573
MNVMLENYKNLVFLGIAVSKQDPITSLEQEKEPWNMKICEMVDESPGYMCRMCSYVFFFYQRPLARARHKRFFSTSDTEKTWQM

SEQ ID NO: 101176 - protein, 110 aa, Homo sapiens
  Payload ID: 20152
  Gene Name: zinc finger protein 714
  ENSP ID: ENSP00000469616
MNVMLENYKNLVFLGIAVSKQDPITSLEQEKEPWNMKICEMVDESPGQVWCLTPVIPALWEARAGGLLEPRSLRPAWSTWKIPVSTKKKKKSQLGMGMVVHACNPSYSRG

SEQ ID NO: 101177 - protein, 555 aa, Homo sapiens
  Payload ID: 20152
  Gene Name: zinc finger protein 714
  ENSP ID: ENSP00000477828
MNVMLENYKNLVFLAGIAVSKQDPITSLEQEKEPWNMKICEMVDESPAMCSSFTRDLWPEQDIKDSFQQVILRRHGKCEHENLQLRKGSANVVECKVYKKGYNELNQCLTTTQSKIFPCDKYIKVFHKIFNSNRHKTRHTGEKPFKCKKCDESFCMLLHLHQHKRIHIRENSYQCEECDKVFKRFSTLTRHKRVHTGEKPFKCEECGKAFKHSSTLTTHKMIHTGEKPYRCEECGKAFYHSSHLTTHKVIHTGEKPFKCEECGKAFNHPSALTTHKFIHVKEKPYKCEECDKAFNRFSYLTKHKIIHSGEKSYKCEQCGKGFNWSSTLTKHKRIHTGEKPYKCEECGKAFNVSSHLTTHKMIHTGEKPYKCEECGKAFNHSSKLTIHKIIHTGEKPYKCEECGKAFNQSSNLTKHKIIHTGEKLYKCEECGKAFNRSSNLTTHKRIHTGEKPYKCEECGKAFNRSSNLTKHNIIHTGEKSYKCEECGKAFNQSSTLTKHRKIQQGMVAHACNPNTLRGLGEQIARSGVQDQPGQHGKTPSLLKIQKFAGCGGRRL

SEQ ID NO: 101178 - protein, 555 aa, Homo sapiens; identical to SEQ ID NO: 101177
  Payload ID: 20152
  Gene Name: zinc finger protein 714
  ENSP ID: ENSP00000478345

SEQ ID NO: 101179 - protein, 28 aa, Homo sapiens
  Payload ID: 20152
  Gene Name: zinc finger protein 714
  ENSP ID: ENSP00000479085
MLLHLHQHKRIHIRENSYQCEECDKVFK

SEQ ID NO: 101180 - protein, 55 aa, Homo sapiens
  Payload ID: 20152
  Gene Name: zinc finger protein 714
  ENSP ID: ENSP00000480816
MNVMLENYKNLVFLAGIAVSKQDPITSLEQEKEPWNMKICEMVDESPETFGQSKT

SEQ ID NO: 101181 - protein, 84 aa, Homo sapiens; identical to SEQ ID NO: 101175
  Payload ID: 20152
  Gene Name: zinc finger protein 714
  ENSP ID: ENSP00000482783

SEQ ID NO: 101182 - protein, 148 aa, Homo sapiens
  Payload ID: 20152
  Gene Name: zinc finger protein 714
  ENSP ID: ENSP00000484530
MPEPCSAEFIYECDVRELQKPGLLGDLWPEQDIKDSFQQVILRRHGKCEHENLQLRKGSANVVECKVYKKGYNELNQCLTTTQSKIFPCDKYIKVFHKIFNSNRHKTRHTGEKPFKCKKCDESFCMLLHLHQHKRIHIRENSYQCEEC

SEQ ID NO: 101183 - protein, 139 aa, Homo sapiens
  Payload ID: 20152
  Gene Name: zinc finger protein 714
  ENSP ID: ENSP00000484576
MNVMLENYKNLVFLGIAVSKQDPITSLEQEKEPWNMKICEMVDESPAMCSSFTRDLWPEQDIKDSFQQVILRRHGKCEHENLQLRKGSANVVECKVYKKGYNELNQCLTTTQSKIFPCDKYIKVFHKIFNSNRHKTRHT

SEQ ID NO: 101184 - protein, 495 aa, Homo sapiens
  Payload ID: 20153
  Gene Name: zinc finger protein 716
  Uniprot ID: A6NP11
  ENSP ID: ENSP00000394248
MAKRPGPPGSREMGLLTFRDIAIEFSLAEWQCLDHAQQNLYRDVMLENYRNLVSLGIAVSKPDLITCLEQNKEPQNIKRNEMVAKHPVTCSHFTQDLQSEQGIKDSLQKVILRRYGKCGQEDLQVKKCCKSVGECEVHKGGYNYVNQCLSATQNKTFQTHKCVKVFGKFSNSNRHKTRHTGKKHFKCKNDGKSFCMLSRLNQHQIIHTREKSYKCEECGKSFNCSSTLTRHKRIHTGEKPYRCEECGKAFSWSASLTKHKRIHTGEKPYTCEERGKVFSRSTLTNYKRIHTGEKPYTCEECGKAFSRSSTLTNHKRIHTGERPYKCEECGKAFSLSSTLKKHKIVHTGEKLYTCEECGKAFTFSSTLNTHKRIHTGEKPYTCEECGKAFSLPSTFTYHKRTHTGEKPYKCEECGKAFNCSSTLKKHKIIHTGEKLYKCKECGKAFTFSSTLNTHKRIHTGEKPYKCEECDQTFKWHSSLANHKNMHTGEKPYKYE

SEQ ID NO: 101185 - protein, 114 aa, Homo sapiens
  Payload ID: 20154
  Gene Name: zinc finger protein 717
  ENSP ID: ENSP00000417902
MFPVFSGCFQELQEKNKSLELVSFEEVAVHFTWEEWQDLDDAQRTLYRDVMLETYSSLVSLGHYITKPEMIFKLEQGAEPWIVEETPNLRLSGGSKKQVFSGICHRSLVELQEV

SEQ ID NO: 101186 - protein, 110 aa, Homo sapiens
  Payload ID: 20154
  Gene Name: zinc finger protein 717
  ENSP ID: ENSP00000418187
MFPVFSGCFQELQEKNKSLELVSFEEVAVHFTWEEWQDLDDAQRTLYRDVMLETYSSLVSLGHYITKPEMIFKLEQGAEPWIVEETPNLRLSAVQIIDDLIERSHESHDR

SEQ ID NO: 101187 - protein, 864 aa, Homo sapiens
  Payload ID: 20154
  Gene Name: zinc finger protein 717
  ENSP ID: ENSP00000419377
MLETYSSLVSLGHYITKPEMIFKLEQGAEPWIVEETPNLRLSAVQIIDDLIERSHESHDRFFWQIVITNSNTSTQERVELGKTFNLNSNHVLNLIINNGNSSGMKPGQFNDCQNMLFPIKPGETQSGEKPHVCDITRRSHRHHEHLTQHHKIQTLLQTFQCNEQGKTFNTEAMFFIHKRVHIVQTFGKYNEYEKACNNSAVIVQVITQVGQPTCCRKSDFTKHQQTHTGEKPYECVECEKPSISKSDLMLQCKMPTEEKPYACNWCEKLFSYKSSLIIHQRIHTGEKPYGCNECGKTFRRKSFLTLHERTHTGDKPYKCIECGKTFHCKSLLTLHHRTHSGEKPYQCSECGKTFSQKSYLTIHHRTHTGEKPYACDHCEEAFSHKSRLTVHQRTHTGEKPYECNECGKPFINKSNLRLHQRTHTGEKPYECNECGKTFHRKSFLTIHQWTHTGEKPYECNECGKTFRCKSFLTVHQRTHAGEKPYACNECGKTYSHKSYLTVHHRTHTGEKPYECNECGKSFHCKSFLTIHQRTHAGKKPYECNECEKTFINKLNLGIHKRTHTGERPYECNECGKTFRQKSNLSTHQGTHTGEKPYVCNECGKTFHRKSFLTIHQRTHTGKNRMDVMNVEKLFVRNHTLLYIRELTPGKSPMNVMNVENPFIRRQIFRSIKVFTRGRNPMNVANVEKPCQKSVLTVHHRTHTGEKPYECNECGKTFCHKSNLSTHQGTHSGEKPYECDECRKTFYDKTVLTIHQRTHTGEKPFECKECRKTFSQKSKLFVHHRTHTGEKPFRCNECRKTFSQKSGLSIHQRTHTGEKPYECKECGKTFCQKSHLSRHQQTHIGEKSDVAEAGYVFPQNHSFFP

SEQ ID NO: 101188 - protein, 60 aa, Homo sapiens
  Payload ID: 20154
  Gene Name: zinc finger protein 717
  ENSP ID: ENSP00000420241
MLETYSSLVSLGHYITKPEMIFKLEQGAEPWIVEETPNLRLSAVQIIDDLIERSHESHDR

SEQ ID NO: 101189 - protein, 446 aa, Homo sapiens
  Payload ID: 20155
  Gene Name: zinc finger protein 718
  ENSP ID: ENSP00000476435
MLENYRNLVSLGVSISNPDLVTSLEQRKEPYNLKIHETAARPPAVCSHFTQNLWTVQGIEDSFHKLIPKGHEKRGHENLRKTCKSINECKVQKGGYNRINQCLLTTQKKTIQSNICVKVFHKFSNSNKDKIRYTGDKTFKCKECGKSFHVLSRLTQHKRIHTGENPYTCEECGKAFNWSSILTKHKRIHAREKFYKCEECGKGFTRSSHLTKHKRIHTGEKPYICEKCGKAFNQSSTLNLHKRIHSAQKYYKCEECGKAFKWSSSLNEHKRIHAGEKPFSCEECGNVFTTSSDFAKHKRIHTGEKPYKCEECGKSFNRSTTLTTHKRIHTGEKPYTCEECGKAFNWSSTLNVHKRIHSGKNPYKCEDCGKAFKVFANLHNHKKIHTGEKPYICKQCGKAFKQSSHLNKHKKIHTVDKPYKCKECGKAFKQYSNLPQHKRTHTGGKF

SEQ ID NO: 101190 - protein, 478 aa, Homo sapiens
  Payload ID: 20155
  Gene Name: zinc finger protein 718
  ENSP ID: ENSP00000480556
MELLTFKDVAIEFSPEEWKCLDTSQQNLYRDVMLENYRNLVSLGVSISNPDLVTSLEQRKEPYNLKIHETAARPPAVCSHFTQNLWTVQGIEDSFHKLIPKGHEKRGHENLRKTCKSINECKVQKGGYNRINQCLLTTQKKTIQSNICVKVFHKFSNSNKDKIRYTGDKTFKCKECGKSFHVLSRLTQHKRIHTGENPYTCEECGKAFNWSSILTKHKRIHAREKFYKCEECGKGFTRSSHLTKHKRIHTGEKPYICEKCGKAFNQSSTLNLHKRIHSAQKYYKCEECGKAFKWSSSLNEHKRIHAGEKPFSCEECGNVFTTSSDFAKHKRIHTGEKPYKCEECGKSFNRSTTLTTHKRIHTGEKPYTCEECGKAFNWSSTLNVHKRIHSGKNPYKCEDCGKAFKVFANLHNHKKIHTGEKPYICKQCGKAFKQSSHLNKHKKIHTVDKPYKCKECGKAFKQYSNLPQHKRTHTGGKF

SEQ ID NO: 101191 - protein, 126 aa, Homo sapiens
  Payload ID: 20156
  Gene Name: zinc finger protein 720
  Uniprot ID: Q7Z2F6
  ENSP ID: ENSP00000319222
MGLLTFRDVAIEFSREEWEHLDSDQKLLYGDVMLENYGNLVSLGLAVSKPDLITFLEQRKEPWNVKSAETVAIQPDIFSHDTQGLLRKKLIEASFQKVILDGYGSCGPQNLNLRKEWESEGKIILW

SEQ ID NO: 101192 - protein, 82 aa, Homo sapiens
  Payload ID: 20156
  Gene Name: zinc finger protein 720
  ENSP ID: ENSP00000381694
MGLLTFRDVAIEFSREEWEHLDSDQKLLYGDVMLENYGNLVSLGLAVSKPDLITFLEQRKEPWNVKSAETVAIQPEVKVNTH

SEQ ID NO: 101193 - protein, 118 aa, Homo sapiens
  Payload ID: 20156
  Gene Name: zinc finger protein 720
  ENSP ID: ENSP00000431546
MVSFTERGLDKEERPSEEKIRHSLLIPVRATCKARIRVQLRWGNSRKREIHSMDSCQDRAGQHQGHEPKVQKDCLTLEKKPKASDTVHISEMRRPMMPAVGDPQRPTPGTASGPDLSL

SEQ ID NO: 101194 - protein, 52 aa, Homo sapiens
  Payload ID: 20156
  Gene Name: zinc finger protein 720
  ENSP ID: ENSP00000434091
MVNVPGTVDIQGCGHRILSGGVGTPGLRSEAFIWGCDVRELRKPGLSGSRCL

SEQ ID NO: 101195 - protein, 146 aa, Homo sapiens
  Payload ID: 20156
  Gene Name: zinc finger protein 720
  ENSP ID: ENSP00000435171
MVNVPGRGSPEEGEGRSEAAGTLFEVTEHLTGWAPAPVPSVEGLLTFRDVAIEFSREEWEHLDSDQKLLYGDVMLENYGNLVSLGLAVSKPDLITFLEQRKEPWNVKSAETVAIQPDIFSHDTQGLLRKKLIEASFQKVILDGYGS

SEQ ID NO: 101196 - protein, 130 aa, Homo sapiens
  Payload ID: 20156
  Gene Name: zinc finger protein 720
  ENSP ID: ENSP00000437310
MGLLTFRDVAIEFSREEWEHLDSDQKLLYGDVMLENYGNLVSLGLAVSKPDLITFLEQRKEPWNVKSAETVAIQPDIFSHDTQGLLRKKLIEASFQKVILDGYGSCGPQNLNLRKEWESEEKNQYNKSDT

SEQ ID NO: 101197 - protein, 56 aa, Homo sapiens
  Payload ID: 20156
  Gene Name: zinc finger protein 720
  ENSP ID: ENSP00000441893
MVNVPDIFSHDTQGLLRKKLIEASFQKVILDGYGSCGPQNLNLRKEWESEGKIILW

SEQ ID NO: 101198 - protein, 178 aa, Homo sapiens
  Payload ID: 20156
  Gene Name: zinc finger protein 720
  Uniprot ID: Q7Z2F6
  ENSP ID: ENSP00000443758
MVNVPDIFSHDTQGLLRKKLIEASFQKVILDGYGSCGPQNLNLRKEWESEGKCEGHNGYYDGHTKCKTTTYNKNLTVTGGQKHEKTQFMSVAFSKPCVSVSKCQHQFLKLTFSFKGNLDNPNSDLVHVSNNHLNQLKYRTGVNVQSNISEKERFKNEEVISKYDQFDGSLLKVCFTNK

SEQ ID NO: 101199 - protein, 52 aa, Homo sapiens; identical to SEQ ID NO: 101194
  Payload ID: 20156
  Gene Name: zinc finger protein 720
  ENSP ID: ENSP00000445614

SEQ ID NO: 101200 - protein, 911 aa, Homo sapiens
  Payload ID: 20157
  Gene Name: zinc finger protein 721
  Uniprot ID: Q8TF20
  ENSP ID: ENSP00000340524
MCSHFTQDFLPVQGIEDSFHKLILRRYEKCGHDNLQLRKGCKSMNVCKVQKGVYNGINKCLSNTQSKIFQCNARVKVFSKFANSNKDKTRHTGEKHFKCNECGKSFQKFSDLTQHKGIHAGEKPYTCEERGKDFGWYTDLNQHKKIHTGEKPYKCEECGKAFNRSTNLTAHKRIHNREKAYTGEDRDRAFGWSTNLNEYKKIHTGDKPYKCKECGKAFMHSSHLNKHEKIHTGEKPYKCKECGKVISSSSSFAKHKRIHTGEKPFKCLECGKAFNISTTLTKHRRIHTGEKPYTCEVCGKAFRQSANLYVHRRIHTGEKPYTCGECGKTFRQSANLYVHRRIHTGEKPYKCEDCGKAFGRYTALNQHKKIHTGEKPYKCEECGKAFNSSTNLTAHKRIHTREKPYTCEDRGRAFGLSTNLNEYKKIHTGDKPYKCKECGKAFIHSLHLNKHEKIHTGKKPYKCKQCGKVITSSSSFAKHKRIHTGEKPFECLECGKAFTSSTTLTKHRRIHTGEKPYTCEVCGKAFRQSAILYVHRRIHTGEKPYTCEECGKTFRQSANLYVHRRIHTGEKPYKCEECGKAFGRYTDLNQHKKIHTGEKLYKCEECGKDFVWYTDLNQQKKIYTGEKPYKCEECGKAFAPSTDLNQHTKILTGEQSYKCEECGKAFGWSIALNQHKKIHTGEKPYKCEECGKAFSRSRNLTTHRRVHTREKPYKCEDRGRSFGWSTNLNEYKKIHTGDKLYKCKECGKVFKQSSHLNRHEKIHTGKKPYKCKECGKVITSSSSFAKHKRIHTGEKPFKCLECGKAFTSSTTLTKHRRIHTGEKPYTCEECGKAFRQSAILYVHRRIHTGEKPYTCGECGKTFRQSANLYAHKKIHTGEKPYTCGDCGKTFRQSANLYAHKKIHTGDKTIQV

SEQ ID NO: 101201 - protein, 160 aa, Homo sapiens
  Payload ID: 20157
  Gene Name: zinc finger protein 721
  ENSP ID: ENSP00000421325
MEPLTFRDVAIEFSPEEWKCLDPAQQNLYRDVMLENYRNLVSLAMCSHFTQDFLPVQGIEDSFHKLILRRYEKCGHDNLQLRKGCKSMNVCKVQKGVYNGINKCLSNTQSKIFQCNARVKVFSKFANSNKDKTRHTGEKHFKCNECGKSFQKFSDLTQHK

SEQ ID NO: 101202 - protein, 132 aa, Homo sapiens
  Payload ID: 20157
  Gene Name: zinc finger protein 721
  ENSP ID: ENSP00000423586
MEPLTFRDVAIEFSPEEWKCLDPAQQNLYRDVMLENYRNLVSLAMCSHFTQDFLPVQGIEDSFHKLILRRYEKFSSLISSCRVISHGLSRGRNRATEKNDLLTTEEPVVKHRFDLQYPEEMWRNTVVQKGRK

SEQ ID NO: 101203 - protein, 923 aa, Homo sapiens
  Payload ID: 20157
  Gene Name: zinc finger protein 721
  Uniprot ID: Q8TF20
  ENSP ID: ENSP00000428878
MLENYRNLVSLAMCSHFTQDFLPVQGIEDSFHKLILRRYEKCGHDNLQLRKGCKSMNVCKVQKGVYNGINKCLSNTQSKIFQCNARVKVFSKFANSNKDKTRHTGEKHFKCNECGKSFQKFSDLTQHKGIHAGEKPYTCEERGKDFGWYTDLNQHKKIHTGEKPYKCEECGKAFNRSTNLTAHKRIHNREKAYTGEDRDRAFGWSTNLNEYKKIHTGDKPYKCKECGKAFMHSSHLNKHEKIHTGEKPYKCKECGKVISSSSSFAKHKRIHTGEKPFKCLECGKAFNISTTLTKHRRIHTGEKPYTCEVCGKAFRQSANLYVHRRIHTGEKPYTCGECGKTFRQSANLYVHRRIHTGEKPYKCEDCGKAFGRYTALNQHKKIHTGEKPYKCEECGKAFNSSTNLTAHKRIHTREKPYTCEDRGRAFGLSTNLNEYKKIHTGDKPYKCKECGKAFIHSLHLNKHEKIHTGKKPYKCKQCGKVITSSSSFAKHKRIHTGEKPFECLECGKAFTSSTTLTKHRRIHTGEKPYTCEVCGKAFRQSAILYVHRRIHTGEKPYTCEECGKTFRQSANLYVHRRIHTGEKPYKCEECGKAFGRYTDLNQHKKIHTGEKLYKCEECGKDFVWYTDLNQQKKIYTGEKPYKCEECGKAFAPSTDLNQHTKILTGEQSYKCEECGKAFGWSIALNQHKKIHTGEKPYKCEECGKAFSRSRNLTTHRRVHTREKPYKCEDRGRSFGWSTNLNEYKKIHTGDKLYKCKECGKVFKQSSHLNRHEKIHTGKKPYKCKECGKVITSSSSFAKHKRIHTGEKPFKCLECGKAFTSSTTLTKHRRIHTGEKPYTCEECGKAFRQSAILYVHRRIHTGEKPYTCGECGKTFRQSANLYAHKKIHTGEKPYTCGDCGKTFRQSANLYAHKKIHTGDKTIQV

SEQ ID NO: 101204 - protein, 61 aa, Homo sapiens
  Payload ID: 20157
  Gene Name: zinc finger protein 721
  ENSP ID: ENSP00000430163
MEPLTFRDVAIEFSPEEWKCLDPAQQNLYRDVMLENYRNLVSLEEGTEPQRKMTCSQQKSQ

SEQ ID NO: 101205 - protein, 619 aa, Homo sapiens
  Payload ID: 20158
  Gene Name: zinc finger protein 724, pseudogene
  Uniprot ID: A8MTY0
  ENSP ID: ENSP00000413411
MGPLTFMDVAIEFSVEEWQCLDTAQQNLYRNVMLENYRNLVFLGIAVSKPDLITCLEQGKEPWNMERHEMVAKPPGMCCYFAQDLRPEQSIKASLQRIILRKYEKCGHHNLQLKKGYKSVDEYKVHKGSYNGFNQCLTTTQSKIFQCDKYVKDFHKFSNSNRHKTEKNPFKCKECGKSFCVLSHLTQHKRIHTTVNSYKLEECGKAFNVSSTLSQHKRIHTGQKHYKCEECGIAFNKSSHLNTHKIIHTGEKSYKREECGKAFNISSHLTTHKIIHTGENAYKCKECGKAFNQSSTLTRHKIIHAGEKPYICEHCGRAFNQSSNLTKHKRIHTGDKPYKCEECGKAFNVSSTLTQHKRIHTGEKPYKCEECGKAFNVSSTLTQHKRIHTGEKPYKCEECGKAFNTSSHLTTHKRIHTGEKPYKCEECGKAFNQFSQLTTHKIIHTGEKPYKCKECGKAFKRSSNLTEHRIIHTGEKPYKCEECGKAFNLSSHLTTHKKIHTGEKPYKCKECGKAFNQSSTLARHKIIHAGEKPYKCEECGKAFYQYSNLTQHKIIHTGEKPYKCEECGKAFNWSSTLTKHKVIHTGEKPYKCKECGKAFNQCSNLTTHKKIHAVEKSDK

SEQ ID NO: 101206 - protein, 77 aa, Homo sapiens
  Payload ID: 20158
  Gene Name: zinc finger protein 724, pseudogene
  ENSP ID: ENSP00000471547
MGPLTFMDVAIEFSVEEWQCLDTAQQNLYRNVMLENYRNLVFLGIAVSKPDLITCLEQGKEPWNMERHEMVAKPPGR

SEQ ID NO: 101207 - protein, 99 aa, Homo sapiens
  Payload ID: 20158
  Gene Name: zinc finger protein 724, pseudogene
  ENSP ID: ENSP00000473253
MDVAIEFSVEEWQCLDTAQQNLYRNVMLENYRNLVFLGIAVSKPDLITCLEQGKEPWNMERHEMVAKPPGMCCYFAQDLRPEQSIKASLQRIILRKYEK

SEQ ID NO: 101208 - protein, 738 aa, Homo sapiens [sequence omitted]

SEQ ID NO: 101209 - protein, 108 aa, Homo sapiens
  Payload ID: 20159
  Gene Name: zinc finger protein 726
  ENSP ID: ENSP00000334762
MGLLTFRDVAIEFSLEEWQCLDTAQKNLYRNVMLENYRNLAFLGIAVSKPDLIICLEKEKEPWNMKRDEMVDEPPGLAVSNPDLISCLEQIKEPWNVKRHETVVKYSG

SEQ ID NO: 101210 - protein, 77 aa, Homo sapiens
  Payload ID: 20159
  Gene Name: zinc finger protein 726
  Uniprot ID: A6NNF4
  ENSP ID: ENSP00000432583
MGLLTFRDVAIEFSLEEWQCLDTAQKNLYRNVMLENYRNLAFLGIAVSKPDLIICLEKEKEPWNMKRDEMVDEPPGR

SEQ ID NO: 101211 - protein, 89 aa, Homo sapiens
  Payload ID: 20159
  Gene Name: zinc finger protein 726
  ENSP ID: ENSP00000433319
MGLLTFRDVAIEFSLEEWQCLDTAQKNLYRNVMLENYRNLAFLGIAVSKPDLIICLEKEKEPWNMKRDEMVDEPPDGVSLCHPGWSAVA

SEQ ID NO: 101212 - protein, 109 aa, Homo sapiens
  Payload ID: 20159
  Gene Name: zinc finger protein 726
  ENSP ID: ENSP00000461349
MGLLTFRDVAIEFSLEEWQCLDTAQKNLYRNVMLENYRNLAFLGIAVSKPDLIICLEKEKEPWNMKRDEMVDEPPGLAVSNPDLISCLEQIKEPWNVKRHETVVKYSGR

SEQ ID NO: 101213 - protein, 616 aa, Homo sapiens
  Payload ID: 20159
  Gene Name: zinc finger protein 726
  Uniprot ID: A6NNF4
  ENSP ID: ENSP00000471516
MGLLTFRDVAIEFSLEEWQCLDTAQKNLYRNVMLENYRNLAFLGIAVSKPDLIICLEKEKEPWNMKRDEMVDEPPGICPHFAQDIWPEQGVEDSFQKVILRRFEKCGHENLQLRKGCKSVDECKVHKEGYNGLNQCFTTTQGKASQCGKYLKVFYKFINLNRYKIRHTRKKPFKCKNCVKSFCMFSHKTQHKSIYTTEKSYKCKECGKTFNWSSTLTNHKKTHTEEKPYKCEEYGKAFNQSSNYTTHKVTHTGEKPYKCEECGKAFSQSSTLTIHKRIHTGEKPCKCEECGKAFSQPSALTIHKRMHIGEKPYKCEECGKAFVWSSTLTRHKRLHSGEKPYKCEECAKAFSQFGHLTTHRIIHTGEKPYKCEECGKAFIWPSTLTKHKRIHTGEKPYKCEECGKAFHRSSNLTKHKIIHTGEKPYKCEECGKAFIWSSNLTEHKKIHTREKPYKCEECSKAFSRSSALTTHKRMHTGEKPYKCEECGKAFSQSSTLTAHKIIHTGEKPYKCEECGKAFILSSTLSKHKRIHTGEKPYKCEECGKTFNQSSNLSTHKIIHTGEKPYKCEECGKAFNRSSNLSTHKIIHTGEKPYKCDECGKSFIWSSTLFKHKRIHT

SEQ ID NO: 101214 - protein, 499 aa, Homo sapiens
  Payload ID: 20160
  Gene Name: zinc finger protein 727
  Uniprot ID: A8MUV8
  ENSP ID: ENSP00000485448
MRVLTFRDVAVEFSPEEWECLDSAQQRLYRDVMLENYGNLFSLGLAIFKPDLITYLEQRKEPWNARRQKTVAKHPAGSLHFTAEILLEHDINDSFQKVILRKSGSCDLNTLRLKKDYQRVGNCKGQKSSYNGIHQCLSATRSKTCQYNKCGKAFGLCSIFTEHKKIFSREKCYKCEECGKDCRLSDFTIQKRIHTADRSYKCEECGKACKKFSNLTEHNRVHTGKKPYKCEECGKTFTCSSALTKHKRNHTGDRPYKCEECHKAFRCCSDLTKHKRIHTGEKPYKCKECHKAFRCCSDLTKHKRIHTGEKPYKCNECGKAFMWISALSQHNRIHTGEKPYICEECGKAFTYSSTLISHKRIHMELRPYKCEECGKTFKWFSDLTNHKRIHTGEKPYKCEECGKSFTCSSNLIKHKRIHMEVRPYKCEECGKTFKWFPDLTNHKRIHTGEKPYKCEECGKTFTCSSSLIKHKRSHTGDRPTSAKNVAKPLGGSQTLLNIR

SEQ ID NO: 101215 - protein, 76 aa, Homo sapiens
  Payload ID: 20161
  Gene Name: zinc finger protein 728
  ENSP ID: ENSP00000470208
  MOD_RES (1)..(1): Any amino acid
XEQGKEPWNMKRHELVKEPPGRTGHELWLRKLELSLGTAIGTKVCRPASIALNGYHSPGLWKTQDLSQTVAGRSLG

SEQ ID NO: 101216 - protein, 622 aa, Homo sapiens
  Payload ID: 20161
  Gene Name: zinc finger protein 728
  Uniprot ID: P0DKX0
  ENSP ID: ENSP00000471593
MGSLTFRDVAIQFSLEEWQCLDTAQQNLYRNVMLENYRNLVFLGIAAPKPDLIIFLEQGKEPWNMKRHELVKEPPVICSHFAQDLWPEQGREDSFQKVILRRYEKCGHENLQLKIGCTNVDECKVHKKGYNKLNQSLTTTQSKVFQCGKYANIFHKCSNSKRHKIRHTGKKLLKCKEYVRSFCMLSHLSQHKRIYTRENSYKSEEHGKAFNWSSALTYKRIHTGEKPCKCEECGKAFSKFSILTKHKVIHTGEKHYKCEECGKAFTRSSSLIEHKRSHAGEKPYKCEECGKAFSKASTLTAHKTIHAGEKPYKCEECGKAFNRSSNLMEHKRIHTGEKPCKCEECGKAFGNFSTLTKHKVIHTGEKPYKCEECGKAFSWPSSLTEHKRIHAGDKPYKCEECGKTFKWSSTLTKHKIIHTGEKPYKCEECGKAFTTFSSLTKHKVIHTGEKHYKCEECGKVFSWSSSLTTHKAIHAGEKLYKCEECGKAFKWSSNLMEHKRIHTGEKPYKCEECGKAFSKVANLTKHKVIHTGEKQYKCEECGKAFIWSSRLSEHKRIHTGEKPYKCEECGKAFSWVSVLNKHKKIHAGKKFYKCEECGKDFNQSSHLTTHKRIHTGGKTLQM

SEQ ID NO: 101217 - protein, 1252 aa, Homo sapiens
  Payload ID: 20162
  Gene Name: zinc finger protein 729
  Uniprot ID: A6NN14
  ENSP ID: ENSP00000469582
MPGAPGSLEMGPLTFRDVTIEFSLEEWQCLDTVQQNLYRDVMLENYRNLVFLGMAVFKPDLITCLKQGKEPWNMKRHEMVTKPPVMRSHFTQDLWPDQSTKDSFQEVILRTYARCGHKNLRLRKDCKSANEGKMHKEGYNKLNQCRTATQRKIFQCNKHMKVFHKYSNRNKVRHTKKKTFKCIKCSKSFFMLSCLIRHKRIHIRQNIYKCEERGKAFKSFSTLTKHKIIHTEDKPYKYKKCGNAFKFSSTFTKHKRIHTGETPFRCEECGKAFNQSSNLTDHKRIHTGEKTYKCEECGKAFKGSSNFNAHKVIHTAEKPYKCEDCGKTFNHFSALRKHKIIHTGKKPYKREECGKAFSQSSTLRKHEIIHTGEKPYKCEECGKAFKWSSKLTVHKVVHTGEKPYKCEECGKAFSQFSTLKKHKIIHTGKKPYKCEECGKAFNSSSTLMKHKIIHTGEKPYKCEECGKAFRQSSHLTRHKAIHTGEKPYKCEECGKAFNHFSDLRRHKIIHTGKKPYKCEECGKAFSQSSTLRNHQIIHTGEKPYKCEECGKAFKWSSKLTVHKVIHTGEKPCKCEECGKAFKHFSALRKHKVIHTREKLYKCEECGKAFNNSSILAKHKIIHTGKKPYKCEECGKAFRQSSHLTRHKAIHTGEKPYKCEECGKAFSHFSALRRHKIIHTGKKPYKCEECGKAFSHFSALRRHKIIHTGEKPYKCEECGKAFKWSSKLTVHKVIHTAEKPCKCEECGKSFKHFSALRKHKVIHTREKLYKCEECVKAFNSFSALMKHKVIHTGEKPYKCEECGKAFKWSSKLTVHKVIHTGEKPCKCEECGKAFKHFSALRKHKVIHTGKKPYKCEECGKAFSQSSSLRKHEIIHSGEKPYKCEECGKAFKWLSKLTVHKVIHTAEKPCKCEECGKAFKHFSALRKHKIIHTGKKPYKCEECGKAFNDSSTLMKHKIIHTGKKPYKCAECGKAFKQSSHLTRHKAIHTGEKPYKCEECGKDFNNSSTLKKHKLIHTREKLYKCEECVKAFNNFSALMKHKIIHTGEKPYKCEECGKAFKWSSKLTEHKVIHTGEKPCKCEECDKAFKHFSALRKHKVIHTGKKPYQCDECGKAFNNSSTLTKHKIIHTGEKPYKCEECGKAFSQSSILTKHKIIHSVEKPYKCEECGKAFNQSSHLTRHKTIHTGEKPYKCEECGKAFIQCSYLIRHKTIHTREKPTNVKKVPKLLSNPHTLLDKTIHTGEKPYKCEECAKAF

SEQ ID NO: 101218 - protein, 10 aa, Homo sapiens
  Payload ID: 20162
  Gene Name: zinc finger protein 729
  ENSP ID: ENSP00000485572
MPGAPGSLEM

SEQ ID NO: 101219 - protein, 80 aa, Homo sapiens
  Payload ID: 20163
  Gene Name: zinc finger protein 730
  ENSP ID: ENSP00000469805
  MOD_RES (1)..(1): Any amino acid
XRNLVFLGIAVSKPDLITCLEQEKEPWNLKTHDMVAKPPGTAFSIFYMFVKFYKYMQCQYTFSEFGYFGTSFFHFSGQIC

SEQ ID NO: 101220 - protein, 45 aa, Homo sapiens
  Payload ID: 20163
  Gene Name: zinc finger protein 730
  ENSP ID: ENSP00000469853
MLDNYRNLVFLGIAVSKPDLITCLEQEKEPWNLKTHDMVAKPPGR

SEQ ID NO: 101221 - protein, 503 aa, Homo sapiens
  Payload ID: 20163
  Gene Name: zinc finger protein 730
  Uniprot ID: Q6ZMV8
  ENSP ID: ENSP00000472959
MGALTFRDVAIEFSLEEWQCLDTEQQNLYRNVMLDNYRNLVFLGIAVSKPDLITCLEQEKEPWNLKTHDMVAKPPVICSHIAQDLWPEQGIKDYFQEVILRQYKKCRHENLLLRKGCKNVDEFKMHKKGYNRHNQCLTTSHSKIFQCDKYVKVFHKFSNSNRHKIRHTSKKPFKCKECGKLFCILSHLAQHKKIHTGEKSYKCEEYGKAFNESSNCTTHKRITEKKPYKCKECGKAFNWFSHFTTHKRIHTGEKPYQCEKCGKFFNQSTNLTTHKRIHTGEKPYKCEECGKAFNQSSNLTEHKKIHTKEQPYKCEKCGKAFKWSSTLTKHKRIHNGEKPYKCEECGKAFNRSSTLNRHKITHTGGKPYKYKECGKAFNQSSTLTIHKIIHTVEKFYKCEECGKAFSRISHLTTHKRIHTGEKPYKCEECGRAFNQSSTLTTHKRIHTGEKPYECEECGKAFNRSSTLTTHKIIHSGEKIYKCKECGKAFRRFSHLTRHKTIHT

SEQ ID NO: 101222 - protein, 585 aa, Homo sapiens
  Payload ID: 20164
  Gene Name: zinc finger protein 732
  Uniprot ID: B4DXR9
  ENSP ID: ENSP00000415774
MELLTFRDVAIEFSPEEWKCLDPAQQNLYRDVMLENYRNLISLGVAISNPDLVIYLEQRKEPYKVKIHETVAKHPAVCSHFTQDFLPVQGIEDSFHKLILRRYEKCGHENLELRKSCKRKVQKGGYNEFNQCLSTIQSKIFQCNVHVKVFSTFSNSNQRRIRHTGEKHFKECGKSFQKFSDLTQHQGIHAGEKPYTCEECGKDFKWYLIFNEYEIIHTGEKPFTCEECGNIFTTSSNFAKHKVHTGEKSYKYEECGKAFNRSSTLTKHKRIHAEEKPFTCEECGKIITSSSNVAKHKKIHTGEKLYKCQECGKVFNRSTTLTKHNRIHTGEKPYTCEECGKAFSRSSVLNEHKRIHTGEKPYKCEQCGKAFRQSATLNKHKSIHTGEKPYTCEECGKAFSRFTTLNEHKRIHTGERPHKCEECGKAFGWSTDLNKHKIIHTGEKPYKCEECGKAFGWSAYLSKHKKIHTGEKPYRCEECGKAFLCSRALNKHKTIHTGEKPYECEECGKAFGWSTYLSKHKKIHTGEKPYRCEECGKAFRRSRVLNKYKTIHTGDKTPKCKGCGKAFKWSSYLNQHNKIYTGEKL

SEQ ID NO: 101223 - protein, 584 aa, Homo sapiens [sequence omitted]

SEQ ID NO: 101224 - protein, 412 aa, Homo sapiens
  Payload ID: 20165
  Gene Name: zinc finger protein 735
  Uniprot ID: P0CB33
  ENSP ID: ENSP00000485547
MAKRPGPPGSREMGLLTFRDIAIEFSLAEWQCLDHAQQNLYRDVMLENYRNLFSLGMTVSKPDLIACLEQNKEPQNIKRNEMAAKHPVTCSHFNQDLQPEQSIKDSLQKVIPRTYGKCGHENLQLKKCCKRVDECEVHKGGYNDLNQCLSNTQNKIFQTHKCVKVFSKFSNSNRHNARYTGKKHLKCKKYGKSFCMFSHLNQHQIIHTKEKSYKCEECGKSFNHSSSGTTHKRILTGEKPYRCEECGKAFRWPSNLTRHKRIHTGEKPYACEECGQAFRRSSTLTNHKRIHTGERPYKCEECGKAFSVSSALIYHKRIHTGEKPYTCEECGKAFNCSSTLKTHKIIHTGEKPYTCEECGRTFNCSSTVKAHKRIHTGEKPYKCEECDKAFKWHSSLAKHKIIHTGEKPYKCK

SEQ ID NO: 101225 - protein, 427 aa, Homo sapiens
  Payload ID: 20166
  Gene Name: zinc finger protein 736
  Uniprot ID: B4DX44
  ENSP ID: ENSP00000347210
MGVLTFRDVAVEFSPEEWECLDSAQQRLYRDVMLENYGNLVSLGLAIFKPDLMTCLEQRKEPWKVKRQEAVAKHPAGSFHFTAEILPDHDIKDSFQKVILRKYGSCDLNNLHLKKDYQSVGNCKGQKSSYNGLHQCLSATHSKTCQCNKCGRGFQLCSIFTEHKDIFSREKCHKCEECGKDCRLFSDFTRHKKIHTVERCYKCEECGKAFKKFSNLTEHKRVHTGEKPYKCEGCGKTFTCSSTLVKHKRNHTGDRPYKCEECGKAFKCFSDLTNHKRIHTGEKPYKCEECNKAYRWFSDLAKHKIIHTGDKPYTCNECGKAFKWFSALSKHKRIHTGEKPYICEECGKAFTRSSTLFNHKRIHMEERPYKCEECSKTFKCFSDLTNHKRIHTGEKPYKCEECGKASSWFSHLIRHKRIHTREKLHKC

SEQ ID NO: 101226 - protein, 10 aa, Homo sapiens
  Payload ID: 20166
  Gene Name: zinc finger protein 736
  ENSP ID: ENSP00000391083
MGVLTFRDVA

SEQ ID NO: 101227 - protein, 427 aa, Homo sapiens; identical to SEQ ID NO: 101225
  Payload ID: 20166
  Gene Name: zinc finger protein 736
  Uniprot ID: B4DX44
  ENSP ID: ENSP00000400852

SEQ ID NO: 101228 - protein, 536 aa, Homo sapiens
  Payload ID: 20167
  Gene Name: zinc finger protein 737
  Uniprot ID: O75373
  ENSP ID: ENSP00000395733
MGPLQFRDVAIEFSLEEWHCLDTAQRNLYRNVMLENYRNLVFLGIVVSKPDLITCLEQGKKPLTMKKHEMVANPSVTCSHFARDLWPEQSIKDSFQKVTLRRYENYGHDNLQFKKGCESVDECKVHKRGYNGLNQYLTTTQSKIFQCDKYVKVIHKFSNSNRHKIRHTGKKPFKCIECGKAFNQSSTLTTHKKIHTGEKPFKCEECGKAFNWSSHLTTHKRIHTGEKRYKCEDCGKAFSRFSYLTAHKIIHSGEKPYKCEECGKAFKRSSNLTTHKIIHTGEKPYKCEECGKAFKRSSILTAHKIIHSGEKPYKCEECGKAFKHPSVLTTHKRIHTGEKPYKCEECGRAFKYFSSLTTHKIIHSGEKPYKCEECGKAFNWSSHLTTHKRIHTGEKPYKCEECGEAFKYSSSLTTHKIIHTGQQPFKCEECGKAFKCFSILTTHKRIHTGEKPYKCEECGKAFNSSSHLTAHKRIHTGEKPYKCERCGKAFKRSFILTRHKRIHTGEKPYKCEECGKGFKCPSTLTTHKVIHTGEKL

SEQ ID NO: 101229 - protein, 43 aa, Homo sapiens
  Payload ID: 20167
  Gene Name: zinc finger protein 737
  ENSP ID: ENSP00000470737
MVGVQWRDLGLLQPPPPGFKQFSCLSLLSSWDYRGHCNLETWP

SEQ ID NO: 101230 - protein, 233 aa, Homo sapiens
  Payload ID: 20167
  Gene Name: zinc finger protein 737
  ENSP ID: ENSP00000471784
MKKHEMVANPSVTCSHFARDLWPEQSIKDSFQKVTLRRYENYGHDNLQFKKGCESVDECKVHKRGYNGLNQYLTTTQSKIFQCDKYVKVIHKFSNSNRHKIRHTGKKPFKCIECGKAFNQSSTLTTHKKIHTGEKPFKCEECGKAFNWSSHLTTHKRIHTGEKRYKCEDCGKAFSRFSYLTAHKIIHSGEKPYKCEECGKAFKRSSNLTTHKIIHTGEKPYKCEECGKAFKRS

SEQ ID NO: 101231 - protein, 131 aa, Homo sapiens
  Payload ID: 20167
  Gene Name: zinc finger protein 737
  ENSP ID: ENSP00000471973
MGPLQFRDVAIEFSLEEWHCLDTAQRNLYRNVMLENYRNLVFLGIVVSKPDLITCLEQGKKPLTMKKHEMVANPSETGFHHVGKGGLKLLTSDDLPASASQSTGITGMRHPARPNCVGFYVGRTDHKLWLR

SEQ ID NO: 101232 - protein, 53 aa, Homo sapiens
  Payload ID: 20167
  Gene Name: zinc finger protein 737
  ENSP ID: ENSP00000471995
  MOD_RES (1)..(1): Any amino acid
XHKRIHTGEKPYKCEECGKGFKCPSTLTTHKFFVYCREVAVLLENCYSHLYPH

SEQ ID NO: 101233 - protein, 137 aa, Homo sapiens
  Payload ID: 20168
  Gene Name: zinc finger protein 738
  Uniprot ID: Q8NE65
  ENSP ID: ENSP00000311957
MDDLRYGVYPVKGASGYPGAERNLLEYSYFEKGPLTFRDVVIEFSQEEWQCLDTAQQDLYRKVMLENFRNLVFLGIDVSKPDLITCLEQGKDPWNMKRHSMVATPPESGVLKFPTIIILLSRCFFQSVNICFIYLEP

SEQ ID NO: 101234 - protein, 117 aa, Homo sapiens
  Payload ID: 20168
  Gene Name: zinc finger protein 738
  ENSP ID: ENSP00000370252
MDDLRYGVYPVKGASGYPGAERNLLEYSYFEKGPLTFRDVVIEFSQEEWQCLDTAQQDLYRKVMLENFRNLVFLGIDVSKPDLITCLEQGKDPWNMKRHSMVATPPDGVSLLFPRPE

SEQ ID NO: 101235 - protein, 68 aa, Homo sapiens
  Payload ID: 20168
  Gene Name: zinc finger protein 738
  ENSP ID: ENSP00000470939
MDDLRYGVYPVKGASGYPGAERNLLEYSYFEKTEFRSCCPGWSAMARSQLTSTSASRVQAILLPQPSE

SEQ ID NO: 101236 - protein, 129 aa, Homo sapiens
  Payload ID: 20168
  Gene Name: zinc finger protein 738
  ENSP ID: ENSP00000471336
MDDLRYGVYPVKGASGYPGAERNLLEYSYFEKGPLTFRDVVIEFSQEEWQCLDTAQQDLYRKVMLENFRNLVFLGIDVSKPDLITCLEQGKDPWNMKRHSMVATPPGIFFVVRGGLHKTFKRYNVFQSS

SEQ ID NO: 101237 - protein, 44 aa, Homo sapiens
  Payload ID: 20168
  Gene Name: zinc finger protein 738
  ENSP ID: ENSP00000473241
MMESRSVSQAGVQWRDLGSPQPPPPGFKQFSHFSLLSSWDYRTT

SEQ ID NO: 101238 - protein, 572 aa, Homo sapiens
  Payload ID: 20169
  Gene Name: zinc finger protein 74
  ENSP ID: ENSP00000349098
MLENYQNLLALGPPLHKPDVISHLERGEEPWSMQREVPRGPCPEWELKAVPSQQQGICKEEPAQEPIMERPLGGAQAWGRQAGALQRSQAAPGRRTCHGLGRPVEEFPLRCPLFAQQRVPEGGPLLDTRKNVQATEGRTKAPARLCAGENASTPSEPEKFPQVRRQRGAGAGEGEFVCGECGKAFRQSSSLTLHRRWHSREKAYKCDECGKAFTWSTNLLEHRRIHTGEKPFFCGECGKAFSCHSSLNVHQRIHTGERPYKCSACEKAFSCSSLLSMHLRVHTGEKPYRCGECGKAFNQRTHLTRHHRIHTGEKPYQCGSCGKAFTCHSSLTVHEKIHSGDKPFKCSDCEKAFNSRSRLTLHQRTHTGEKPFKCADCGKGFSCHAYLLVHRRIHSGEKPFKCNECGKAFSSHAYLIVHRRIHTGEKPFDCSQCWKAFSCHSSLIVHQRIHTGEKPYKCSECGRAFSQNHCLIKHQKIHSGEKSFKCEKCGEMFNWSSHLTEHQRLHSEGKPLAIQFNKHLLSTYYVPGSLLGAGDAGLRDVDPIDALDVAKLLCVVPPRAGRNFSLGSKPRN

SEQ ID NO: 101239 - protein, 212 aa, Homo sapiens
  Payload ID: 20169
  Gene Name: zinc finger protein 74
  ENSP ID: ENSP00000350101
MAPGRGTLGLALVSERGSFLSGSCSFPERESRGYIGLGSSRSQVQGIGEFQGCGCGLHPGGVGSTRLPSEGLVPGCDVGELPEPSCPRTSTAQARCDLSSGTRRGAMEHAEGSPQRALSRMGAEGGALSTAGHLQRRTGPGAHHGAAPRRGAGVGAPGRCSAEESGCALGARTCHGLGRPCRGIPPQVSPLRPATRSRGGTLAGHTQERPGH

SEQ ID NO: 101240 - protein, 644 aa, Homo sapiens
  Payload ID: 20169
  Gene Name: zinc finger protein 74
  Uniprot ID: Q16587
  ENSP ID: ENSP00000383301
MEIPAPEPEKTALSSQDPALSLKENLEDISGWGLPEARSKESVSFKDVAVDFTQEEWGQLDSPQRALYRDVMLENYQNLLALGPPLHKPDVISHLERGEEPWSMQREVPRGPCPEWELKAVPSQQQGICKEEPAQEPIMERPLGGAQAWGRQAGALQRSQAAPWAPAPAMVWDVPVEEFPLRCPLFAQQRVPEGGPLLDTRKNVQATEGRTKAPARLCAGENASTPSEPEKFPQVRRQRGAGAGEGEFVCGECGKAFRQSSSLTLHRRWHSREKAYKCDECGKAFTWSTNLLEHRRIHTGEKPFFCGECGKAFSCHSSLNVHQRIHTGERPYKCSACEKAFSCSSLLSMHLRVHTGEKPYRCGECGKAFNQRTHLTRHHRIHTGEKPYQCGSCGKAFTCHSSLTVHEKIHSGDKPFKCSDCEKAFNSRSRLTLHQRTHTGEKPFKCADCGKGFSCHAYLLVHRRIHSGEKPFKCNECGKAFSSHAYLIVHRRIHTGEKPFDCSQCWKAFSCHSSLIVHQRIHTGEKPYKCSECGRAFSQNHCLIKHQKIHSGEKSFKCEKCGEMFNWSSHLTEHQRLHSEGKPLAIQFNKHLLSTYYVPGSLLGAGDAGLRDVDPIDALDVAKLLCVVPPRAGRNFSLGSKPRN

SEQ ID NO: 101241 - protein, 178 aa, Homo sapiens
  Payload ID: 20169
  Gene Name: zinc finger protein 74
  Uniprot ID: Q16587
  ENSP ID: ENSP00000384750
MEIPAPEPEKTGIGEFQGCGCGLHPGGVGSTRLPSEGLVPGCDVGELPEPSCPRTSTAQARCDLSSGTRRGAMEHAEGSPQRALSRMGAEGGALSTAGHLQRRTGPGAHHGAAPRRGAGVGAPGRCSAEESGCALGARTCHGLGRPCRGIPPQVSPLRPATRSRGGTLAGHTQERPGH

SEQ ID NO: 101242 - protein, 612 aa, Homo sapiens
  Payload ID: 20169
  Gene Name: zinc finger protein 74
  Uniprot ID: Q16587
  ENSP ID: ENSP00000385855
MEIPAPEPEKTALSSQDPALSLKENLEDISGWGLPEARSKESVSFKDVAVDFTQEEWGQLDSPQRALYRDVMLENYQNLLALEWELKAVPSQQQGICKEEPAQEPIMERPLGGAQAWGRQAGALQRSQAAPWAPAPAMVWDVPVEEFPLRCPLFAQQRVPEGGPLLDTRKNVQATEGRTKAPARLCAGENASTPSEPEKFPQVRRQRGAGAGEGEFVCGECGKAFRQSSSLTLHRRWHSREKAYKCDECGKAFTWSTNLLEHRRIHTGEKPFFCGECGKAFSCHSSLNVHQRIHTGERPYKCSACEKAFSCSSLLSMHLRVHTGEKPYRCGECGKAFNQRTHLTRHHRIHTGEKPYQCGSCGKAFTCHSSLTVHEKIHSGDKPFKCSDCEKAFNSRSRLTLHQRTHTGEKPFKCADCGKGFSCHAYLLVHRRIHSGEKPFKCNECGKAFSSHAYLIVHRRIHTGEKPFDCSQCWKAFSCHSSLIVHQRIHTGEKPYKCSECGRAFSQNHCLIKHQKIHSGEKSFKCEKCGEMFNWSSHLTEHQRLHSEGKPLAIQFNKHLLSTYYVPGSLLGAGDAGLRDVDPIDALDVAKLLCVVPPRAGRNFSLGSKPRN

SEQ ID NO: 101243 - protein, 69 aa, Homo sapiens
  Payload ID: 20169
  Gene Name: zinc finger protein 74
  ENSP ID: ENSP00000395437
MEIPAPEPEKTALSSQDPALSLKENLEDISGWGLPEARSKSLALVTQAGVQWRNLGSLQPPPLGFKQFS

SEQ ID NO: 101244 - protein, 50 aa, Homo sapiens
  Payload ID: 20169
  Gene Name: zinc finger protein 74
  ENSP ID: ENSP00000397011
MEIPAPEPEKTEWELKAVPSQQQGICKEEPAQEPIMERPLGGAQAWGRQA

SEQ ID NO: 101245 - protein, 644 aa, Homo sapiens; identical to SEQ ID NO: 101240
  Payload ID: 20169
  Gene Name: zinc finger protein 74
  Uniprot ID: Q16587
  ENSP ID: ENSP00000483077

SEQ ID NO: 101246 - protein, 193 aa, Homo sapiens
  Payload ID: 20170
  Gene Name: zinc finger protein 740
  Uniprot ID: Q8NDX6
  ENSP ID: ENSP00000409463
MAQASLLACEGLAGVSLVPTAASKKMMLSQIASKQAENGERAGSPDVLRCSSQGHRKDSDKSRSRKDDDSLSEASHSKKTVKKVVVVEQNGSFQVKIPKNFVCEHCFGAFRSSYHLKRHILIHTGEKPFECDICDMRFIQKYHLERHKRVHSGEKPYQCERCHQCFSRTDRLLRHKRMCQGCQSKTSDGQFSL

SEQ ID NO: 101247 - protein, 644 aa, Homo sapiens
  Payload ID: 20171
  Gene Name: zinc finger protein 746
  Uniprot ID: Q6NUN9
  ENSP ID: ENSP00000345140
MAEAVAAPISPWTMAATIQAMERKIESQAARLLSLEGRTGMAEKKLADCEKTAVEFGNQLEGKWAVLGTLLQEYGLLQRRLENVENLLRNRNFWILRLPPGSKGESPKEWGKLEDWQKELYKHVMRGNYETLVSLDYAISKPEVLSQIEQGKEPCNWRRPGPKIPDVPVDPSPGSGPPVPAPDLLMQIKQEGELQLQEQQALGVEAWAAGQPDIGEEPWGLSQLDSGAGDISTDATSGVHSNFSTTIPPTSWQTDLPPHHPSSACSDGTLKLNTAASTEDVKIVIKTEVQEEEVVATPVHPTDLEAHGTLFGPGQATRFFPSPAQEGAWESQGSSFPSQDPVLGLREPARPERDMGELSPAVAQEETPPGDWLFGGVRWGWNFRCKPPVGLNPRTGPEGLPYSSPDNGEAILDPSQAPRPFNEPCKYPGRTKGFGHKPGLKKHPAAPPGGRPFTCATCGKSFQLQVSLSAHQRSCGAPDGSGPGTGGGGSGSGGGGGGSGGGSARDGSALRCGECGRCFTRPAHLIRHRMLHTGERPFPCTECEKRFTERSKLIDHYRTHTGVRPFTCTVCGKSFIRKDHLRKHQRNHAAGAKTPARGQPLPTPPAPPDPFKSPASKGPLASTDLVTDWTCGLSVLGPTDGGDM

SEQ ID NO: 101248 - protein, 645 aa, Homo sapiens
  Payload ID: 20171
  Gene Name: zinc finger protein 746
  Uniprot ID: Q6NUN9
  ENSP ID: ENSP00000395007
MAEAVAAPISPWTMAATIQAMERKIESQAARLLSLEGRTGMAEKKLADCEKTAVEFGNQLEGKWAVLGTLLQEYGLLQRRLENVENLLRNRNFWILRLPPGSKGESPKEWGKLEDWQKELYKHVMRGNYETLVSLDYAISKPEVLSQIEQGKEPCNWRRPGPKIPDVPVDPSPGSGPPVPAPDLLMQIKQEGELQLQEQQALGVEAWAAGQPDIGEEPWGLSQLDSGAGDISTDATSGVHSNFSTTIPPTSWQTDLPPHHPSSACSDGTLKLNTAASTEADVKIVIKTEVQEEEVVATPVHPTDLEAHGTLFGPGQATRFFPSPAQEGAWESQGSSFPSQDPVLGLREPARPERDMGELSPAVAQEETPPGDWLFGGVRWGWNFRCKPPVGLNPRTGPEGLPYSSPDNGEAILDPSQAPRPFNEPCKYPGRTKGFGHKPGLKKHPAAPPGGRPFTCATCGKSFQLQVSLSAHQRSCGAPDGSGPGTGGGGSGSGGGGGGSGGGSARDGSALRCGECGRCFTRPAHLIRHRMLHTGERPFPCTECEKRFTERSKLIDHYRTHTGVRPFTCTVCGKSFIRKDHLRKHQRNHAAGAKTPARGQPLPTPPAPPDPFKSPASKGPLASTDLVTDWTCGLSVLGPTDGGDM

SEQ ID NO: 101249 - protein, 187 aa, Homo sapiens
  Payload ID: 20171
  Gene Name: zinc finger protein 746
  ENSP ID: ENSP00000420329
MAEAVAAPISPWTMAATIQAMERKIESQAARLLSLEGRTGMAEKKLADCEKTAVEFGNQLEGKWAVLGTLLQEYGLLQRRLENVENLLRNRNFWILRLPPGSKGESPKEWGKLEDWQKELYKHVMRGNYETLVSLDYAISKPEVLSQIEQGKEPCNWRRPGPKIPDVPVDPSPDISVSDFPGASQHL

SEQ ID NO: 101250 - protein, 191 aa, Homo sapiens
  Payload ID: 20172
  Gene Name: zinc finger protein 747
  Uniprot ID: Q9BV97
  ENSP ID: ENSP00000252799
MTDPSLGLTVPMAPPLAPLPPRDPNGAGSEWRKPGAVSFADVAVYFSREEWGCLRPAQRALYRDVMRETYGHLGALGESPTCLPGPCASTGPAAPLGAACGVGGPGAGQAASSQRGVCVLLPQESEAASRRSSPGWRRRPNCGIRLPRIRRWRSVRQKRTQQIPETRKRKDKGKGREPWRSPTLWPPGLLG

SEQ ID NO: 101251 - protein, 190 aa, Homo sapiens
  Payload ID: 20172
  Gene Name: zinc finger protein 747
  Uniprot ID: Q9BV97
  ENSP ID: ENSP00000378528
MTDPSLGLTVPMAPPLAPLPPRDPNGAGSEWRKPGAVSFADVAVYFSREEWGCLRPAQRALYRDVMRETYGHLGALGESPTCLPGPCASTGPAAPLGAACGVGGPGAGQAASSQRGVCVLLPQESEAASRRSSPGWRRRPNCGIRLPRIRRWRSVRQKRTQIPETRKRKDKGKGREPWRSPTLWPPGLLG

SEQ ID NO: 101252 - protein, 330 aa, Homo sapiens; identical to SEQ ID NO: 949
  Payload ID: 20172
  Gene Name: zinc finger protein 747
  ENSP ID: ENSP00000457274

SEQ ID NO: 101253 - protein, 778 aa, Homo sapiens
  Payload ID: 20173
  Gene Name: zinc finger protein 749
  Uniprot ID: O43361
  ENSP ID: ENSP00000333980
MNLTEDCMVFEDVAIYFSQEEWGILNDAQRHLHSNVMLENFALLSSVGCWHGAKDEEVPSKQCVSVRVLQVTIPKPALSTLKAQPCKMCSSILKDILHLAEHDGTHPEQGLYTCAAEHDLHQKEQIREKLTRSDEWRPSFVNHSAHVGERNFTCTQGGKDFTASSDLLQQQVLNSGWKLYRDTQDGEAFQGEQNDFNSSQGGKDFCHQHGLFEHQKTHNGERPYEFSECGELFRYNSNLIKYQQNHAGERPYEGTEYGKTFIRKSNLVQHQKIHSEGFLSKRSDPIEHQEILSRPTPYECTQCGKAFLTQAHLVGHQKTHTGEQPYECNKCGKFFMYNSKLIRHQKVHTGERRYECSECGKLFMDSFTLGRHQRVHTGERPFECSICGKFFSHRSTLNMHQRVHAGKRLYKCSECGKAFSLKHNVVQHLKIHTGERPYECTECEKAFVRKSHLVQHQKIHTDAFSKRSDLIQHKRIDIRPRPYTCSECGKAFLTQAHLVGHQKIHTGERPYECTQCAKAFVRKSHLVQHEKIHTDAFSKRSDLIQHKRIDLRPRPYVCSECGKAFLTQAHLDGHQKIQTGERRYECNECGKFFLDSYKLVIHQRIHTGEKPYKCSKCGKFFRYRCTLSRHQKVHTGERPYECSECGKFFRDSYKLIIHQRVHTGEKPYECSNCGKFLRYRSTFIKHHKVCTGEKPHECSKCRELFRTKSSLIIHQQSHTGESPFKLRECGKDFNKCNTGQRQKTHTGERSYECGESSKVFKYNSSLIKHQIIHTGKRP

SEQ ID NO: 101254 - protein, 66 aa, Homo sapiens
  Payload ID: 20173
  Gene Name: zinc finger protein 749
  ENSP ID: ENSP00000397745
MCSSILKDILHLAEHDGTHPEQGLYTCAAEHDLHQKEQIREKLTRSDEWRPSFVNHSAHVGERNFT

SEQ ID NO: 101255 - protein, 723 aa, Homo sapiens
  Payload ID: 20174
  Gene Name: zinc finger protein 750
  Uniprot ID: Q32MQ0
  ENSP ID: ENSP00000269394
MSLLKERKPKKPHYIPRPPGKPFKYKCFQCPFTCNEKSHLFNHMKYGLCKNSITLVSEQDRVPKCPKSNSLDPKQTNQPDATAKPASSKSVANGLSAFDSKLQHSSAREDIKENLELQARGTHRCLGQKPALHRASPCKSPAPEAALGAQPALEGAARPSAFVPVGEHRLKGPDNAEAPETLALHNPTAKAVSFHTKSAFHTPGYPWKAGSPFLPPEFPHKISSTKGLGAISPYMHPTIPEYPPHFYTEHGLATIYSPYLLAGSSPECDAPLLSVYGTQDPRHFLPHPGPIPKHLAPSPATYDHYRFFQQYPSNLPIPYGFYRPESAFSSYGLRLPPVTGLTRDQSSHLLEEATLVYPASSPSRLNPSDPNRKHVEFESPIPEAKDSSKAGQRDTEGSKMSPRAGSAATGSPGRPSPTDFMQTSQTCEGLYDLSNKAASSALGRLYPPEQSLTAFRPVKKSTECLPAQAAETTAESPVSLNVVNGDPPAPTGSASLVSEAAPSSPDDSSGMGPLNLSKKSEINLAATHEPTYQGSPQAETASFSELQDLPLNLSVKDPCNTQAPRPAFPGRPRAAEPAAAVPQKTGTEGSEDGPSHPETKPGSLDGDGAPPTGPGEEAPDACAVDSSEEQKQTAAVALCQLAAYSPRNIRVGDGDAAAPEPACRQDTPTLSSMESQEAQCDLRPKGQKRTSLRDAGKSQQGAKKAKLQDTARVFTLRRRARVS

SEQ ID NO: 101256 - protein, 324 aa, Homo sapiens
  Payload ID: 20174
  Gene Name: zinc finger protein 750
  ENSP ID: ENSP00000458389
MSPRAGSAATGSPGRPSPTDFMQTSQTCEGLYDLSNKAASSALGRLYPPEQSLTAFRPVKKSTECLPAQAAETTAESPVSLNVVNGDPPAPTGSASLVSEAAPSSPDDSSGMGPLNLSKKSEINLAATHEPTYQGSPQAETASFSELQDLPLNLSVKDPCNTQAPRPAFPGRPRAAEPAAAVPQKTGTEGSEDGPSHPETKPGSLDGDGAPPTGPGEEAPDACAVDSSEEQKQTAAVALCQLAAYSPRNIRVGDGDAAAPEPACRQDTPTLSSMESQEAQCDLRPKGQKRTSLRDAGKSQQGAKKAKLQDTARVFTLRRRARVS

SEQ ID NO: 101257 - protein, 296 aa, Homo sapiens
  Payload ID: 20175
  Gene Name: zinc finger protein 75a
  Uniprot ID: Q96N20
  ENSP ID: ENSP00000459566
MYFSQEEWELLDPTQKALYNDVMQENYETVISLALFVLPKPKVISCLEQGEEPWVQVSPEFKDSAGKSPTGLKLKNDTENHQPVSLSDLEIQASAGVISKKAKVKVPQKTAGKENHFDMHRVGKWHQDFPVKKRKKLSTWKQELLKLMDRHKKDCAREKPFKCQECGKTFRVSSDLIKHQRIHTEEKPYKCQQCDKRFRWSSDLNKHLTTHQGIKPYKCSWCGKSFSQNTNLHTHQRTHTGEKPFTCHECGKKFSQNSHLIKHRRTHTGEQPYTCSICRRNFSRRSSLLRHQKLHL

SEQ ID NO: 101258 - protein, 37 aa, Homo sapiens
  Payload ID: 20175
  Gene Name: zinc finger protein 75a
  ENSP ID: ENSP00000459707
MYFSQEEWELLDPTQKALYNDVMQENYETVISLALFV

SEQ ID NO: 101259 - protein, 296 aa, Homo sapiens; identical to SEQ ID NO: 101257
  Payload ID: 20175
  Gene Name: zinc finger protein 75a
  Uniprot ID: Q96N20
  ENSP ID: ENSP00000482769

SEQ ID NO: 101260 - protein, 153 aa, Homo sapiens
  Payload ID: 20175
  Gene Name: zinc finger protein 75a
  ENSP ID: ENSP00000483325
MMMVDLKVAAYLDPQIRALWETKGPARESSGQSKKSPQMDCLDPKSSCWHFRNFTYDEAGGPREAVSKLQELCHLWLKPEIHSKEQILELLVLEQFLTILPRETQTQMQKHHPQSIEEAVALVEHLQRESGQTWNGVRRKIPDMYSEIGCRWI

SEQ ID NO: 101261 - protein, 415 aa, Homo sapiens
  Payload ID: 20176
  Gene Name: zinc finger protein 75D
  Uniprot ID: P51815
  ENSP ID: ENSP00000359800
MAMRELNADSCSSPQMGAMWETSGSVKENSSQSKKYSTKIENLGPESACRHFWSFRYHEATGPLETISQLQKLCHQWLRPEIHSKEQILEMLVLEQFLSILPKETQNWVQKHHPQNVKQALVLVEFLQREPDGTKNESLLTFEDVAVYFSEEEWQLLNPLEKTLYNDVMQDIYETVISLGLKLKNDTGNDHPISVSTSEIQTSGCEVSKKTRMKIAQKTMGRENPGDTHSVQKWHRAFPRKKRKKPATCKQELPKLMDLHGKGPTGEKPFKCQECGKSFRVSSDLIKHHRIHTGEKPYKCQQCDRRFRWSSDLNKHFMTHQGIKPYRCSWCGKSFSHNTNLHTHQRIHTGEKPFKCDECGKRFIQNSHLIKHQRTHTGEQPYTCSLCKRNFSRRSSLLRHQKLHRRREACLVSPN

SEQ ID NO: 101262 - protein, 510 aa, Homo sapiens
  Payload ID: 20176
  Gene Name: zinc finger protein 75D
  Uniprot ID: P51815
  ENSP ID: ENSP00000359802
MAMRELNADSCSSPQMGAMWETSGSVKENSSQSKKYSTKIENLGPESACRHFWSFRYHEATGPLETISQLQKLCHQWLRPEIHSKEQILEMLVLEQFLSILPKETQNWVQKHHPQNVKQALVLVEFLQREPDGTKNEVTAHELGKEAVLLGGTAVAPGFKWKPAEPQPMGVFQKEYWNTYRVLQEQLGWNTHKETQPVYERAVHDQQMLALSEQKRIKHWKMASKLILPESLSLLTFEDVAVYFSEEEWQLLNPLEKTLYNDVMQDIYETVISLGLKLKNDTGNDHPISVSTSEIQTSGCEVSKKTRMKIAQKTMGRENPGDTHSVQKWHRAFPRKKRKKPATCKQELPKLMDLHGKGPTGEKPFKCQECGKSFRVSSDLIKHHRIHTGEKPYKCQQCDRRFRWSSDLNKHFMTHQGIKPYRCSWCGKSFSHNTNLHTHQRIHTGEKPFKCDECGKRFIQNSHLIKHQRTHTGEQPYTCSLCKRNFSRRSSLLRHQKLHRRREACLVSPN

SEQ ID NO: 101263 - protein, 151 aa, Homo sapiens
  Payload ID: 20177
  Gene Name: zinc finger protein 76
  ENSP ID: ENSP00000229405
MESLGLHTVTLSDGTTAYVQQAVKGEKLLEGQVIQLEDGTTAYIHQVTVQKEALSFEDGQPVQLEDGSMAYIHRTPREGYDPSTLEAVQLEDGSTAYIHHPVAVPSESTILAVQTEVGLEDLAAEDDEGFSADAVVALEQYASKTFPPGSS

SEQ ID NO: 101264 - protein, 515 aa, Homo sapiens
  Payload ID: 20177
  Gene Name: zinc finger protein 76
  Uniprot ID: P36508
  ENSP ID: ENSP00000344097
MESLGLHTVTLSDGTTAYVQQAVKGEKLLEGQVIQLEDGTTAYIHQVTVQKEALSFEDGQPVQLEDGSMAYIHRTPREGYDPSTLEAVQLEDGSTAYIHHPVAVPSESTILAVQTEVGLEDLAAEDDEGFSADAVVALEQYASKVLHDSQIPRNGKGQQVGDRAFRCGYKGCGRLYTTAHHLKVHERAHTGDRPYRCDFPSCGKAFATGYGLKSHVRTHTGEKPYKCPEELCSKAFKTSGDLQKHVRTHTGERPFQCPFEGCGRSFTTSNIRKVHVRTHTGERPYTCPEPHCGRGFTSATNYKNHVRIHTGEKPYVCTVPGCGKRFTEYSSLYKHHVVHTHCKPYTCSTCGKTYRQTSTLAMHKRSAHGELEATEESEQALYEQQQLEAASAAEESPPPKRPRIAYLSEVKEERDDIPAQVAMVTEEDGAPQVALITQDGAQQVTIITSGAVVAEDSSVASLRHQQVALLATANGTHIAVQLEEQQTLEEAINVATAAMQQGAVTLETTVSESGC

SEQ ID NO: 101265 - protein, 570 aa, Homo sapiens
  Payload ID: 20177
  Gene Name: zinc finger protein 76
  Uniprot ID: P36508
  ENSP ID: ENSP00000363064
MESLGLHTVTLSDGTTAYVQQAVKGEKLLEGQVIQLEDGTTAYIHQVTVQKEALSFEDGQPVQLEDGSMAYIHRTPREGYDPSTLEAVQLEDGSTAYIHHPVAVPSESTILAVQTEVGLEDLAAEDDEGFSADAVVALEQYASKVLHDSQIPRNGKGQQVGDRAFRCGYKGCGRLYTTAHHLKVHERAHTGDRPYRCDFPSCGKAFATGYGLKSHVRTHTGEKPYKCPEELCSKAFKTSGDLQKHVRTHTGERPFQCPFEGCGRSFTTSNIRKVHVRTHTGERPYTCPEPHCGRGFTSATNYKNHVRIHTGEKPYVCTVPGCGKRFTEYSSLYKHHVVHTHCKPYTCSTCGKTYRQTSTLAMHKRSAHGELEATEESEQALYEQQQLEAASAAEESPPPKRPRIAYLSEVKEERDDIPAQVAMVTEEDGAPQVALITQDGAQQVSLSPEDLQALGSAISMVTQHGSTTLTIPSPDADLATSGTHTVTMVSADGTQTQPVTIITSGAVVAEDSSVASLRHQQVALLATANGTHIAVQLEEQQTLEEAINVATAAMQQGAVTLETTVSESGC

SEQ ID NO: 101266 - protein, 101 aa, Homo sapiens
  Payload ID: 20177
  Gene Name: zinc finger protein 76
  ENSP ID: ENSP00000418749
  MOD_RES (1)..(1): Any amino acid
XLTIPSPDADLATSGTHTVTMVSADGTQTQPVTIITSGAVVAEDSSVASLRHQQVALLATANGTHIAVQVSRDLGGKGIPRPEKSTRNKGELDEDLEEKGI

SEQ ID NO: 101267 - protein, 340 aa, Homo sapiens
  Payload ID: 20177
  Gene Name: zinc finger protein 76
  ENSP ID: ENSP00000419106
MESLGLHTVTLSDGTTAYVQQAVKGEKLLEGQVIQLEDGTTAYIHQVTVQKEALSFEDGQPVQLEDGSMAYIHRTPREGYDPSTLEAVQLEDGSTAYIHHPVAVPSESTILAVQTEVGLEDLAAEDDEGFSADAVVALEQYASKVLHDSQIPRNGKGQQVGDRAFRCGYKGCGRLYTTAHHLKVHERAHTGDRPYRCDFPSCGKAFATGYGLKSHVRTHTGEKPYKCPEELCSKAFKTSGDLQKHVRTHTGERPFQCPFEGCGRSFTTSNIRKVHVRTHTGERPYTCPEPHCGRGFTSATNYKNHVRIHTGEKPYVCTVPGCGKRFTEYSSLYKHHVVHT

SEQ ID NO: 101268 - protein, 746 aa, Homo sapiens
  Payload ID: 20178
  Gene Name: zinc finger protein 761
  ENSP ID: ENSP00000480218
MAFSQGLLTFRDVAIEFSQEEWKCLDPAQRTLYRDVMLENYRNLVSLDISSKCTMKEFLSTAQGNREVFHAGTLQIHESHHNGDFCYQDVDKDIHDYEFQWQEDERNGHEAPMTKIKKLTGITERYDQSHARNKPIKDQLGSSFHSHLPEMHIFQTEEKIDNQVVKSVHDASLVSTAQRISCRPKTHISNNHGNNFWNSSLLTQKQEVHMREKSFQCNESGKAFNYSSLLRKHQIIHLADKYKCDVCGKLFNQKRNLACHRRCHTGENPYKCNECGKTFSQTSSLTCHRRLHTGEKPYKCEECDKAFHFKSILERHRIIHTEEKPYKCNECGKTFRQKSILTRHHRLHTGEKPYKCNECGKTFSHKSSLTCHHRLHTGEKPYKCNECGKTFSHKSSLTCHRRLHTGEKPYKCEECDKAYSFRSNFEIHRKIHTEDNAYKCNECGKTFSRTSSLTCHRRRHTGEQPYKCEECDKAFRFKSNLERHRRIHTGEKPYKCNECGKTFSRKSYLTCHHRLHTGEKAYKCNECGKTFSWKSSLTCHRRLHSGEKPYKCKECGKTFNQQLTLKRHRRLHSGENPYKCEDSDKAYSFKSNLEIHQKIHTEENPYKCNECGKTFSRTSSLTCHRRLHTGEKPYKCEECDKAFRVKSNLEGHRRIHTGEKPYKCNECGKTFSRKSYFICHHRLHTGEKPYKCNECGKNFSQKSSLICHHRLHTGEKPYKCNECGKTFSQKSNLTCHRRLHTGEKQV

SEQ ID NO: 101269 - protein, 70 aa, Homo sapiens
  Payload ID: 20178
  Gene Name: zinc finger protein 761
  ENSP ID: ENSP00000481271
MAFSQGLLTFRDVAIEFSQEEWKCLDPAQRTLYRDVMLENYRNLVSLGSCCVVEIHLDLLSSRDPPQSPK

SEQ ID NO: 101270 - protein, 746 aa, Homo sapiens; identical to SEQ ID NO: 101268
  Payload ID: 20178
  Gene Name: zinc finger protein 761
  ENSP ID: ENSP00000481272

SEQ ID NO: 101271 - protein, 54 aa, Homo sapiens
  Payload ID: 20178
  Gene Name: zinc finger protein 761
  ENSP ID: ENSP00000481316
MAFSQGLLTFRDVAIEFSQEEWKCLDPAQRTLYRDVMLENYRNLVSLDRVLLCC

SEQ ID NO: 101272 - protein, 19 aa, Homo sapiens
  Payload ID: 20178
  Gene Name: zinc finger protein 761
  ENSP ID: ENSP00000482214
  MOD_RES (1)..(1): Any amino acid
XVEIHLDLLSSRDPPQSPK

SEQ ID NO: 101273 - protein, 397 aa, Homo sapiens
  Payload ID: 20179
  Gene Name: zinc finger protein 763
  Uniprot ID: Q0D2J5
  ENSP ID: ENSP00000369774
MMFQDPVACEDVAVNFTQEEWALLDISQRKLYREVMLETFRNLTSIGKKWKDQNIEYEYQNPRRNFRSLIEGNVNEIKEDSHCGETFTQVPDDRLNFQEKKASPEAKSCDNFVCGEVGIGNSSFNMNIRGDIGHKAYEYQDYAPKPYKCQQPKKAFRYHPSFRTQERNHTGEKPYACKECGKTFISHSGIRRRMVMHSGDGPYKCKFCGKAVHCLRLYLIHERTHTGEKPYECKQCVKSFSYSATHRIHERTHTGEKPYECQQCGKAFHSSSSFQAHKRTHTGGKPYECKQCGKSFSWCHSFQIHERTHTGEKPCECSKCNKAFRSYRSYLRHKRSHTGEKPYQCKECRKAFTYPSSLRRHERTHSAKKPYECKQCGKALSYKFSNTPKNALWRKTL

SEQ ID NO: 101274 - protein, 394 aa, Homo sapiens
  Payload ID: 20179
  Gene Name: zinc finger protein 763
  Uniprot ID: Q0D2J5
  ENSP ID: ENSP00000402017
MDPVACEDVAVNFTQEEWALLDISQRKLYREVMLETFRNLTSIGKKWKDQNIEYEYQNPRRNFRSLIEGNVNEIKEDSHCGETFTQVPDDRLNFQEKKASPEAKSCDNFVCGEVGIGNSSFNMNIRGDIGHKAYEYQDYAPKPYKCQQPKKAFRYHPSFRTQERNHTGEKPYACKECGKTFISHSGIRRRMVMHSGDGPYKCKFCGKAVHCLRLYLIHERTHTGEKPYECKQCVKSFSYSATHRIHERTHTGEKPYECQQCGKAFHSSSSFQAHKRTHTGGKPYECKQCGKSFSWCHSFQIHERTHTGEKPCECSKCNKAFRSYRSYLRHKRSHTGEKPYQCKECRKAFTYPSSLRRHERTHSAKKPYECKQCGKALSYKFSNTPKNALWRKTL

SEQ ID NO: 101275 - protein, 46 aa, Homo sapiens
  Payload ID: 20179
  Gene Name: zinc finger protein 763
  ENSP ID: ENSP00000465057
MDPVACEDVAVNFTQEEWALLDISQRKLYREVMLETFRNLTSIGVS

SEQ ID NO: 101276 - protein, 80 aa, Homo sapiens
  Payload ID: 20179
  Gene Name: zinc finger protein 763
  ENSP ID: ENSP00000465145
MNIRGDIGHKAYEYQDYAPKPYKCQQPKKAFRYHPSFRTQERNHTGEKPYACKECGKTFISHSGIRRRMVMHSGDGPYKC

SEQ ID NO: 101277 - protein, 148 aa, Homo sapiens
  Payload ID: 20179
  Gene Name: zinc finger protein 763
  ENSP ID: ENSP00000468692
MFGVHGNFLGIESRPPLLSLSPSLLYTCEMFQDPVACEDVAVNFTQEEWALLDISQRKLYREVMLETFRNLTSIGKKWKDQNIEYEYQNPRRNFRSLIEGNVNEIKEDSHCGETFTQVPDDRLNFQEKKASPEAKSCDNFVCGEVGIG

SEQ ID NO: 101278 - protein, 408 aa, Homo sapiens
  Payload ID: 20180
  Gene Name: zinc finger protein 764
  Uniprot ID: Q96H86
  ENSP ID: ENSP00000252797
MAPPLAPLPPRDPNGAGPEWREPGAVSFADVAVYFCREEWGCLRPAQRALYRDVMRETYGHLSALGIGGNKPALISWVEEEAELWGPAAQDPEVAKCQTQTDPADSRNKKKERQREGTGALEKPDPVAAGSPGLKSPQAPSAGPPYGWEQLSKAPHRGRPSLCAHPPVPRADQRHGCYVCGKSFAWRSTLVEHVYSHTGEKPFHCTDCGKGFGHASSLSKHRAIHRGERPHRCLECGRAFTQRSALTSHLRVHTGEKPYGCADCGRRFSQSSALYQHRRVHSGETPFPCPDCGRAFAYPSDLRRHVRTHTGEKPYPCPDCGRCFRQSSEMAAHRRTHSGEKPYPCPQCGRRFGQKSAVAKHQWVHRPGAGGHRGRVAGRLSVTLTPGHGDLDPPVGFQLYPEIFQECG

SEQ ID NO: 101279 - protein, 407 aa, Homo sapiens
  Payload ID: 20180
  Gene Name: zinc finger protein 764
  Uniprot ID: Q96H86
  ENSP ID: ENSP00000378526
MAPPLAPLPPRDPNGAGPEWREPGAVSFADVAVYFCREEWGCLRPAQRALYRDVMRETYGHLSALGIGGNKPALISWVEEEAELWGPAAQDPEVAKCQTQTDPDSRNKKKERQREGTGALEKPDPVAAGSPGLKSPQAPSAGPPYGWEQLSKAPHRGRPSLCAHPPVPRADQRHGCYVCGKSFAWRSTLVEHVYSHTGEKPFHCTDCGKGFGHASSLSKHRAIHRGERPHRCLECGRAFTQRSALTSHLRVHTGEKPYGCADCGRRFSQSSALYQHRRVHSGETPFPCPDCGRAFAYPSDLRRHVRTHTGEKPYPCPDCGRCFRQSSEMAAHRRTHSGEKPYPCPQCGRRFGQKSAVAKHQWVHRPGAGGHRGRVAGRLSVTLTPGHGDLDPPVGFQLYPEIFQECG

SEQ ID NO: 101280 - protein, 523 aa, Homo sapiens
  Payload ID: 20181
  Gene Name: zinc finger protein 765
  Uniprot ID: Q7L2R6
  ENSP ID: ENSP00000379689
MALPQGLLTFRDVAIEFSQEEWKCLDPAQRTLYRDVMLENYRNLVSLDISSKCMMKEFSSTAQGNREVFHAGTSQRHESHHNGDFCFQDIDKDIHDIEFQWQEDERNGHEALMTKIKKLTGSTERYDQNYAGNKPVKYQLGFSFHSHLPELHIFHTEEKIDNQVVKSIHDASLVSTAQRISCRPETHISNDYGNNFLNSSLFTQKQEVHMREKSFQCNDSGKAYNCSSLLRKHQLIHLGEKQYKCDICGKVFNSKRYVARHRRCHTGEKPYKCNECGKTFSQTYYLTCHRRLHTGEKPYKCEECDKAFHFKSKLQIHRRIHTGEKPYKCNECGKTFSQKSYLTCHRRLHTGEKPYKCNECGKTFSRKSHFTCHHRVHTGEKPYKCNECSKTFSHKSSLTYHRRLHTEEKPYKCNECGKTFNQQLTLNICRLHSGEKPYKCEECDKAYSFKSNLEIHQKIHTEENPYKCNECGKTFSRTSSLTYHHRLHTGQKPYKCEDCDEAFSFKSNLERHRRIYTGEKLHV

SEQ ID NO: 101281 - protein, 128 aa, Homo sapiens
  Payload ID: 20181
  Gene Name: zinc finger protein 765
  ENSP ID: ENSP00000421579
MMKEFSSTAQGNREVFHAGTSQRHESHHNGDFCFQDIDKDIHDIEFQWQEDERNGHEALMTKIKKLTGSTERYDQNYAGNKPVKYQLGFSFHSHLPELHIFHTEEKIDNQVVKSIHDASLVSTAQRIS

SEQ ID NO: 101282 - protein, 60 aa, Homo sapiens
  Payload ID: 20181
  Gene Name: zinc finger protein 765
  Uniprot ID: Q7L2R6
  ENSP ID: ENSP00000424395
MALPQGLLTFRDVAIEFSQEEWKCLDPAQRTLYRDVMLENYRNLVSLELSGECPLAAPAS

SEQ ID NO: 101283 - protein, 85 aa, Homo sapiens
  Payload ID: 20181
  Gene Name: zinc finger protein 765
  ENSP ID: ENSP00000425657
MALPQSCQGSVHWQHLPPECLPGHHHQPQELRWAELKGNAPKHAGSCVFLSWLLPGQYHCSHARDRQVEQQKYHEDKRSGILFCC

SEQ ID NO: 101284 - protein, 60 aa, Homo sapiens; identical to SEQ ID NO: 101282
  Payload ID: 20181
  Gene Name: zinc finger protein 765
  Uniprot ID: Q7L2R6
  ENSP ID: ENSP00000470468

SEQ ID NO: 101285 - protein, 468 aa, Homo sapiens
  Payload ID: 20182
  Gene Name: zinc finger protein 766
  Uniprot ID: Q5HY98
  ENSP ID: ENSP00000409652
MAQLRRGHLTFRDVAIEFSQEEWKCLDPVQKALYRDVMLENYRNLVSLGICLPDLSIISMMKQRTEPWTVENEMKVAKNPDRWEGIKDINTGRSCAVRSKAGNKPITNQLGLTFQLPLPELEIFQGEGKIYECNQVQKFISHSSSVSPLQRIYSGVKTHIFNKHRNDFVDFPLLSQEQKAHIRRKPYECNEQGKVFRVSSSLPNHQVIHTADKPNRCHECGKTVRDKSGLAEHWRIRTGEKPYKCKECGKLFNRIAYLARHEKVHTGESPYKCNECGKVFSRITYLVRHQKIHTREKPHKCNKCGKVYSSSSYLAQHWRIHTGEKLYKCNKCGKEFSGHSSLTTHLLIHTGEKPYKCKECDKAFRHKFSLTVHQRNHNGEKPYKCHECGKVFTQVSHLARHQKIHTGEKPYKCNECGKVFTQNSHLANHQRIHTGEKPYKCHVCGKVFRHSSWFVQHQRSVHERVLTN

SEQ ID NO: 101286 - protein, 471 aa, Homo sapiens
  Payload ID: 20182
  Gene Name: zinc finger protein 766
  ENSP ID: ENSP00000468950
MLCEGEAQKRKAEESGMPLTQGHLTFRDVAIEFSQEEWKCLDPVQKALYRDVMLENYRNLVSLGICLPDLSIISMMKQRTEPWTVENEMKVAKNPDRWEGIKDINTGRSCAVRSKAGNKPITNQLGLTFQLPLPELEIFQGEGKIYECNQVQKFISHSSSVSPLQRIYSGVKTHIFNKHRNDFVDFPLLSQEQKAHIRRKPYECNEQGKVFRVSSSLPNHQVIHTADKPNRCHECGKTVRDKSGLAEHWRIRTGEKPYKCKECGKLFNRIAYLARHEKVHTGESPYKCNECGKVFSRITYLVRHQKIHTREKPHKCNKCGKVYSSSSYLAQHWRIHTGEKLYKCNKCGKEFSGHSSLTTHLLIHTGEKPYKCKECDKAFRHKFSLTVHQRNHNGEKPYKCHECGKVFTQVSHLARHQKIHTGEKPYKCNECGKVFTQNSHLANHQRIHTGEKPYKCHVCGLSLWSGKESVR

SEQ ID NO: 101287 - protein, 159 aa, Homo sapiens
  Payload ID: 20182
  Gene Name: zinc finger protein 766
  ENSP ID: ENSP00000469186
MMKQRTEPWTVENEMKVAKNPDRWEGIKDINTGRSCAVRSKAGNKPITNQLGLTFQLPLPELEIFQGEGKIYECNQVQKFISHSSSVSPLQRIYSGVKTHIFNKHRNDFVDFPLLSQEQKAHIRRKPYECNEQGKVFRVSSSLPNHQVIHTADKPNRCH

SEQ ID NO: 101288 - protein, 83 aa, Homo sapiens
  Payload ID: 20182
  Gene Name: zinc finger protein 766
  ENSP ID: ENSP00000471620
MLENYRNLVSLGICLPDLSIISMMKQRTEPWTVENEMKVAKNPDRWEGIKDINTGRSCAVRSKAGNKPITNQLGLTFQLPLPE

SEQ ID NO: 101289 - protein, 105 aa, Homo sapiens
  Payload ID: 20182
  Gene Name: zinc finger protein 766
  ENSP ID: ENSP00000471965
MAQLRRGHLTFRDVAIEFSQEEWKCLDPVQKALYRDVMLENYRNLVSLGICLPDLSIISMMKQRTEPWTVENEMKVAKNPDRWEGIKDINTDGVLFCRPGWSTVV

SEQ ID NO: 101290 - protein, 115 aa, Homo sapiens
  Payload ID: 20182
  Gene Name: zinc finger protein 766
  ENSP ID: ENSP00000472041
MLENYRNLVSLGICLPDLSIISMMKQRTEPWTVENEMKVAKNPDRWEGIKDINTGRSCAVRSKAGNKPITNQLGLTFQLPLPELEIFQGEGKIYECNQVQKFISHSSSVSPLQRI

SEQ ID NO: 101291 - protein, 100 aa, Homo sapiens
  Payload ID: 20182
  Gene Name: zinc finger protein 766
  ENSP ID: ENSP00000472708
MGHLTFRDVAIEFSQEEWKCLDPVQKALYRDVMLENYRNLVSLGICLPDLSIISMMKQRTEPWTVENEMKVAKNPDRWEGIKDINTDGVLFCRPGWSTVV

SEQ ID NO: 101292 - protein, 74 aa, Homo sapiens
  Payload ID: 20182
  Gene Name: zinc finger protein 766
  ENSP ID: ENSP00000472743
MLCEGEAQKRKAEESGMPLTQGHLTFRDVAIEFSQEEWKCLDPVQKALYRDVMLENYRNLVSLGICLPDLSIIS

SEQ ID NO: 101293 - protein, 540 aa, Homo sapiens
  Payload ID: 20183
  Gene Name: zinc finger protein 768
  Uniprot ID: Q9H5H4
  ENSP ID: ENSP00000369777
MEREALPWGLEPQDVQSSDEMRSPEGYLRGNMSENEEEEISQQEGSGDYEVEEIPFGLEPQSPGFEPQSPEFEPQSPRFEPESPGFESRSPGLVPPSPEFAPRSPESDSQSPEFESQSPRYEPQSPGYEPRSPGYEPRSPGYESESSRYESQNTELKTQSPEFEAQSSKFQEGAEMLLNPEEKSPLNISVGVHPLDSFTQGFGEQPTGDLPIGPPFEMPTGALLSTPQFEMLQNPLGLTGALRGPGRRGGRARGGQGPRPNICGICGKSFGRGSTLIQHQRIHTGEKPYKCEVCSKAFSQSSDLIKHQRTHTGERPYKCPRCGKAFADSSYLLRHQRTHSGQKPYKCPHCGKAFGDSSYLLRHQRTHSHERPYSCTECGKCYSQNSSLRSHQRVHTGQRPFSCGICGKSFSQRSALIPHARSHAREKPFKCPECGKRFGQSSVLAIHARTHLPGRTYSCPDCGKTFNRSSTLIQHQRSHTGERPYRCAVCGKGFCRSSTLLQHHRVHSGERPYKCDDCGKAFSQSSDLIRHQRTHAAGRR

SEQ ID NO: 101294 - protein, 509 aa, Homo sapiens
  Payload ID: 20183
  Gene Name: zinc finger protein 768
  ENSP ID: ENSP00000456527
MSENEEEEISQQEGSGDYEVEEIPFGLEPQSPGFEPQSPEFEPQSPRFEPESPGFESRSPGLVPPSPEFAPRSPESDSQSPEFESQSPRYEPQSPGYEPRSPGYEPRSPGYESESSRYESQNTELKTQSPEFEAQSSKFQEGAEMLLNPEEKSPLNISVGVHPLDSFTQGFGEQPTGDLPIGPPFEMPTGALLSTPQFEMLQNPLGLTGALRGPGRRGGRARGGQGPRPNICGICGKSFGRGSTLIQHQRIHTGEKPYKCEVCSKAFSQSSDLIKHQRTHTGERPYKCPRCGKAFADSSYLLRHQRTHSGQKPYKCPHCGKAFGDSSYLLRHQRTHSHERPYSCTECGKCYSQNSSLRSHQRVHTGQRPFSCGICGKSFSQRSALIPHARSHAREKPFKCPECGKRFGQSSVLAIHARTHLPGRTYSCPDCGKTFNRSSTLIQHQRSHTGERPYRCAVCGKGFCRSSTLLQHHRVHSGERPYKCDDCGKAFSQSSDLIRHQRTHAAGRR

SEQ ID NO: 101295 - protein, 545 aa, Homo sapiens
  Payload ID: 20184
  Gene Name: zinc finger protein 77
  Uniprot ID: Q15935
  ENSP ID: ENSP00000319053
MDCVIFEEVAVNFTPEEWALLDHAQRSLYRDVMLETCRNLASLDCYIYVRTSGSSSQRDVFGNGISNDEEIVKFTGSDSWSIFGENWRFDNTGDQHQIPQRHLRSQLGRLCESNEGHQCGETLSQTANLLVHKSYPTEAKPSECTKCGKAFENRQRSHTGQRPCKECGQACSCLSCQSPPMKTQTVEKPCNCQDSRTASVTYVKSLSSKKSYECQKCGKAFICPSSFRGHVNSHHGQKTHACKVCGKTFMYYSYLTRHVRTHTGEKPYECKECGKAFSCPSYFREHVRTHTGEKPYECKHCGKSFSCYSSFRDHVRTHTGEKPCQCKHCGKAFTCYSSLREHGRTHSGEKPYECKECGKAFRYPSSLRAHMRMHTGEKPYVCKQCGKAFGCPTYFRRHVKTHSGVKPYQCKECGKAYSFSSSLRIHVRTHTGEKPFECKHCGKAFSCHSSLREHVRTHSGEKPYECNQCGKAFSHAQYFQKHVRSHSGVKPYECTECGKAYSCSSSLRVHVRTHTGERPYECKQCGKTFRYLASLQAHVRTHAGA

SEQ ID NO: 101296 - protein, 691 aa, Homo sapiens
  Payload ID: 20185
  Gene Name: zinc finger protein 770
  Uniprot ID: Q6IQ21
  ENSP ID: ENSP00000348673
MMAENNLKMLKIQQCVVANKLPRNRPYVCNICFKHFETPSKLARHYLIHTGQKPFECDVCHKTFRQLVHLERHQLTHSLPFKCSICQRHFKNLKTFVKHQQLHNETYQNNVKQVRRLLEAKQEKSMYGVYNTFTTEERWALHPCSKSDPMYSMKRRKNIHACTICGKMFPSQSKLDRHVLIHTGQRPFKCVLCTKSFRQSTHLKIHQLTHSEERPFQCCFCQKGFKIQSKLLKHKQIHTRNKAFRALLLKKRRTESRPLPNKLNANQGGFENGEIGESEENNPLDVHSIYIVPFQCPKCEKCFESEQILNEHSCFAARSGKIPSRFKRSYNYKTIVKKILAKLKRARSKKLDNFQSEKKVFKKSFLRNCDLISGEQSSEQTQRTFVGSLGKHGTYKTIGNRKKKTLTLPFSWQNMGKNLKGILTTENILSIDNSVNKKDLSICGSSGEEFFNNCEVLQCGFSVPRENIRTRHKICPCDKCEKVFPSISKLKRHYLIHTGQRPFGCNICGKSFRQSAHLKRHEQTHNEKSPYASLCQVEFGNFNNLSNHSGNNVNYNASQQCQAPGVQKYEVSESDQMSGVKAESQDFIPGSTGQPCLPNVLLESEQSNPFCSYSEHQEKNDVFLYRCSVCAKSFRSPSKLERHYLIHAGQKPFECSVCGKTFRQAPHWKRHQLTHFKERPQGKVVALDSVM

SEQ ID NO: 101297 - protein, 132 aa, Homo sapiens
  Payload ID: 20185
  Gene Name: zinc finger protein 770
  ENSP ID: ENSP00000453474
MMAENNLKMLKIQQCVVANKLPRNRPYVCNICFKHFETPSKLARHYLIHTGQKPFECDVCHKTFRQLVHLERHQLTHSLPFKCSICQRHFKNLKTFVKHQQLHNETYQNNVKQVRRLLEAKQEKSMYGVYNT

SEQ ID NO: 101298 - protein, 317 aa, Homo sapiens
  Payload ID: 20186
  Gene Name: zinc finger protein 771
  Uniprot ID: Q7L3S4
  ENSP ID: ENSP00000323945
MPGEQQAEEEEEEEMQEEMVLLVKGEEDEGEEKYEVVKLKIPMDNKEVPGEAPAPSADPARPHACPDCGRAFARRSTLAKHARTHTGERPFGCTECGRRFSQKSALTKHGRTHTGERPYECPECDKRFSAASNLRQHRRRHTGEKPYACAHCGRRFAQSSNYAQHLRVHTGEKPYACPDCGRAFGGSSCLARHRRTHTGERPYACADCGTRFAQSSALAKHRRVHTGEKPHRCAVCGRRFGHRSNLAEHARTHTGERPYPCAECGRRFRLSSHFIRHRRAHMRRRLYICAGCGRDFKLPPGATAATATERCPECEGS

SEQ ID NO: 101299 - protein, 317 aa, Homo sapiens; identical to SEQ ID NO: 101298
  Payload ID: 20186
  Gene Name: zinc finger protein 771
  Uniprot ID: Q7L3S4
  ENSP ID: ENSP00000416197

SEQ ID NO: 101300 - protein, 62 aa, Homo sapiens
  Payload ID: 20186
  Gene Name: zinc finger protein 771
  ENSP ID: ENSP00000456456
MPGEQQAEEEEEEEMQEEMVLLVKGEEDEGEEKYEVVKLKIPMDNKERHDLALSPRLECSGT

SEQ ID NO: 101301 - protein, 52 aa, Homo sapiens
  Payload ID: 20186
  Gene Name: zinc finger protein 771
  ENSP ID: ENSP00000460549
MPGEQQAEEEEEEEMQEEMVLLVKGEEDEGEEKYEVVKLKIPMDNKEEAECP

SEQ ID NO: 101302 - protein, 489 aa, Homo sapiens
  Payload ID: 20187
  Gene Name: zinc finger protein 772
  Uniprot ID: Q68DY9
  ENSP ID: ENSP00000341165
MAAAEPMGPAQVPMNSEVIVDPIQGQVNFEDVFVYFSQEEWVLLDEAQRLLYRDVMLENFALMASLGHTSFMSHIVASLVMGSEPWVPDWVDMTLAVATETPGGSDPGCWHGMEDEEIPFEQSFSIGMSQIRIPKGGPSTQKAYPCGTCGLVLKDILHLAEHQETHPGQKPYMCVLCGKQFCFSANLHQHQKQHSGEKPFRSDKSRPFLLNNCAVQSMEMSFVTGEACKDFLASSSIFEHHAPHNEWKPHSNTKCEEASHCGKRHYKCSECGKTFSRKDSLVQHQRVHTGERPYECGECGKTFSRKPILAQHQRIHTGEMPYECGICGKVFNHSSNLIVHQRVHTGARPYKCSECGKAYSHKSTLVQHESIHTGERPYECSECGKYFGHKYRLIKHWSVHTGARPYECIACGKFFSQSSDLIAHQRVHNGEKPYVCSECGKAFSHKHVLVQHHRIHTGERPYKCSECGKAFRQRASLIRHWKIHTGERP

SEQ ID NO: 101303 - protein, 448 aa, Homo sapiens
  Payload ID: 20187
  Gene Name: zinc finger protein 772
  Uniprot ID: Q68DY9
  ENSP ID: ENSP00000348992
MAAAEPMGPAQVPMNSEVIVDPIQGQVNFEDVFVYFSQEEWVLLDEAQRLLYRDVMLENFALMASLGCWHGMEDEEIPFEQSFSIGMSQIRIPKGGPSTQKAYPCGTCGLVLKDILHLAEHQETHPGQKPYMCVLCGKQFCFSANLHQHQKQHSGEKPFRSDKSRPFLLNNCAVQSMEMSFVTGEACKDFLASSSIFEHHAPHNEWKPHSNTKCEEASHCGKRHYKCSECGKTFSRKDSLVQHQRVHTGERPYECGECGKTFSRKPILAQHQRIHTGEMPYECGICGKVFNHSSNLIVHQRVHTGARPYKCSECGKAYSHKSTLVQHESIHTGERPYECSECGKYFGHKYRLIKHWSVHTGARPYECIACGKFFSQSSDLIAHQRVHNGEKPYVCSECGKAFSHKHVLVQHHRIHTGERPYKCSECGKAFRQRASLIRHWKIHTGERP

SEQ ID NO: 101304 - protein, 377 aa, Homo sapiens
  Payload ID: 20187
  Gene Name: zinc finger protein 772
  Uniprot ID: Q68DY9
  ENSP ID: ENSP00000395967
MEDEEIPFEQSFSIGMSQIRIPKGGPSTQKAYPCGTCGLVLKDILHLAEHQETHPGQKPYMCVLCGKQFCFSANLHQHQKQHSGEKPFRSDKSRPFLLNNCAVQSMEMSFVTGEACKDFLASSSIFEHHAPHNEWKPHSNTKCEEASHCGKRHYKCSECGKTFSRKDSLVQHQRVHTGERPYECGECGKTFSRKPILAQHQRIHTGEMPYECGICGKVFNHSSNLIVHQRVHTGARPYKCSECGKAYSHKSTLVQHESIHTGERPYECSECGKYFGHKYRLIKHWSVHTGARPYECIACGKFFSQSSDLIAHQRVHNGEKPYVCSECGKAFSHKHVLVQHHRIHTGERPYKCSECGKAFRQRASLIRHWKIHTGERP

SEQ ID NO: 101305 - protein, 72 aa, Homo sapiens
  Payload ID: 20187
  Gene Name: zinc finger protein 772
  ENSP ID: ENSP00000400754
MAAAEPMGPAQVPMNSEVIVDPIQVRGECPCSHRSHPHPIRSPALWCYIEHSPATLRSLGSEDSGEAPSPGS

SEQ ID NO: 101306 - protein, 42 aa, Homo sapiens
  Payload ID: 20187
  Gene Name: zinc finger protein 772
  ENSP ID: ENSP00000415214
MAAAEPMGPAQVPMNSEVIVDPIQVVGMEWRMKRYLLSRAFL

SEQ ID NO: 101307 - protein, 38 aa, Homo sapiens
  Payload ID: 20187
  Gene Name: zinc finger protein 772
  ENSP ID: ENSP00000471079
MAAAEPMGPAQVPMNSEVIVDPIQEHELNNYSCKKAHS

SEQ ID NO: 101308 - protein, 25 aa, Homo sapiens
  Payload ID: 20187
  Gene Name: zinc finger protein 772
  ENSP ID: ENSP00000471647
MAAAEPMGPAQEHELNNYSCKKAHS

SEQ ID NO: 101309 - protein, 417 aa, Homo sapiens
  Payload ID: 20187
  Gene Name: zinc finger protein 772
  ENSP ID: ENSP00000477730
MNSEVIVDPIQGQVNFEDVFVYFSQEEWVLLDEAQRLLYRDVMLENFALMASLGHTSFMSHIVASLVMGSEPWVPDWVDMTLAVATETPGGSCWHGMEDEEIPFEQSFSIGIANLHQHQKQHSGEKPFRSDKSRPFLLNNCAVQSMEMSFVTGEACKDFLASSSIFEHHAPHNEWKPHSNTKCEEASHCGKRHYKCSECGKTFSRKDSLVQHQRVHTGERPYECGECGKTFSRKPILAQHQRIHTGEMPYECGICGKVFNHSSNLIVHQRVHTGARPYKCSECGKAYSHKSTLVQHESIHTGERPYECSECGKYFGHKYRLIKHWSVHTGARPYECIACGKFFSQSSDLIAHQRVHNGEKPYVCSECGKAFSHKHVLVQHHRIHTGERPYKCSECGKAFRQRASLIRHWKIHTGERP

SEQ ID NO: 101310 - protein, 414 aa, Homo sapiens
  Payload ID: 20187
  Gene Name: zinc finger protein 772
  ENSP ID: ENSP00000480278
MAAAEPMGPAQGQVNFEDVFVYFSQEEWVLLDEAQRLLYRDVMLENFALMASLGHTSFMSHIVASLVMGSEPWVPDWVDMTLAVATGCWHGMEDEEIPFEQSFSIGIFSANLHQHQKQHSGEKPFRSDKSRPFLLNNCAVQSMEMSFVTGEACKDFLASSSIFEHHAPHNEWKPHSNTKCEEASHCGKRHYKCSECGKTFSRKDSLVQHQRVHTGERPYECGECGKTFSRKPILAQHQRIHTGEMPYECGICGKVFNHSSNLIVHQRVHTGARPYKCSECGKAYSHKSTLVQHESIHTGERPYECSECGKYFGHKYRLIKHWSVHTGARPYECIACGKFFSQSSDLIAHQRVHNGEKPYVCSECGKAFSHKHVLVQHHRIHTGERPYKCSECGKAFRQRASLIRHWKIHTGERP

SEQ ID NO: 101311 - protein, 442 aa, Homo sapiens
  Payload ID: 20188
  Gene Name: zinc finger protein 773
  Uniprot ID: Q6PK81
  ENSP ID: ENSP00000282292
MAAATLRDPAQQGYVTFEDVAVYFSQEEWRLLDDAQRLLYRNVMLENFTLLASLGLASSKTHEITQLESWEEPFMPAWEVVTSAILRGSWQGAKAEAAAEQSASVEVPSSNVQQHQKQHCGEKPLKRQEGRVPVLRSCRVHLSEKSLQSREVGKDLLTSSGVLKHQVTHTGEKSHRSSKSREAFHAGKRHYKCSECGKAFGQKYLLVQHQRLHTGEKPYECSECGKLFSHKSNLFIHQIVHTGERPYGCSDCGKSFSRNADLIQHQRVHTGEKPFTCSECGKAFRHNSTLVQHHRIHTGVRPYECSECGKLFSFNSSLMKHQRVHTGERPYKCSECGKFYSHKSSLINHWRVHTGERPYECSECGKFFSQSSSLMQHRKVHTGEKPFKCNECGRFFSENSSLVKHQRVHTGAKPYECRECGKFFRHSSSLVKHRRIHTGEIQ

SEQ ID NO: 101312 - protein, 117 aa, Homo sapiens
  Payload ID: 20188
  Gene Name: zinc finger protein 773
  ENSP ID: ENSP00000468846
MAAATLRDPAQQGYVTFEDVAVYFSQEEWRLLDDAQRLLYRNVMLENFTLLASLGLASSKTHEITQLESWEEPFMPAWEVVTSAILRVWLRNRSANLLTQIFFPNRQPQVAPEQGRE

SEQ ID NO: 101313 - protein, 117 aa, Homo sapiens; identical to SEQ ID NO: 101312
  Payload ID: 20188
  Gene Name: zinc finger protein 773
  ENSP ID: ENSP00000469199

SEQ ID NO: 101314 - protein, 441 aa, Homo sapiens
  Payload ID: 20188
  Gene Name: zinc finger protein 773
  Uniprot ID: Q6PK81
  ENSP ID: ENSP00000469416
MAAATLRDPAQGYVTFEDVAVYFSQEEWRLLDDAQRLLYRNVMLENFTLLASLGLASSKTHEITQLESWEEPFMPAWEVVTSAILRGSWQGAKAEAAAEQSASVEVPSSNVQQHQKQHCGEKPLKRQEGRVPVLRSCRVHLSEKSLQSREVGKDLLTSSGVLKHQVTHTGEKSHRSSKSREAFHAGKRHYKCSECGKAFGQKYLLVQHQRLHTGEKPYECSECGKLFSHKSNLFIHQIVHTGERPYGCSDCGKSFSRNADLIQHQRVHTGEKPFTCSECGKAFRHNSTLVQHHRIHTGVRPYECSECGKLFSFNSSLMKHQRVHTGERPYKCSECGKFYSHKSSLINHWRVHTGERPYECSECGKFFSQSSSLMQHRKVHTGEKPFKCNECGRFFSENSSLVKHQRVHTGAKPYECRECGKFFRHSSSLVKHRRIHTGEIQ

SEQ ID NO: 101315 - protein, 101 aa, Homo sapiens
  Payload ID: 20188
  Gene Name: zinc finger protein 773
  ENSP ID: ENSP00000470189
MAAATLRDPAQGYVTFEDVAVYFSQEEWRLLDDAQRLLYRNVMLENFTLLASLGLASSKTHEITQLESWEEPFMPAWEVVTSAILRVPNRQPQVAPEQGRE

SEQ ID NO: 101316 - protein, 483 aa, Homo sapiens
  Payload ID: 20189
  Gene Name: zinc finger protein 774
  Uniprot ID: Q6NX45
  ENSP ID: ENSP00000346348
MWLGTSGKSGLPGHCLENPLQECHPAQLEEWALKGISRPSVISQPEQKEEPWVLPLQNFEARKIPRESHTDCEHQVAKLNQDNSETAEQCGTSSERTNKDLSHTLSWGGNWEQGLELEGQHGTLPGEGQLESFSQERDLNKLLDGYVGEKPMCAECGKSFNQSSYLIRHLRTHTGERPYTCIECGKGFKQSSDLVTHRRTHTGEKPYQCKGCEKKFSDSSTLIKHQRTHTGERPYECPECGKTFGRKPHLIMHQRTHTGEKPYACLECHKSFSRSSNFITHQRTHTGVKPYRCNDCGESFSQSSDLIKHQRTHTGERPFKCPECGKGFRDSSHFVAHMSTHSGERPFSCPDCHKSFSQSSHLVTHQRTHTGERPFKCENCGKGFADSSALIKHQRIHTGERPYKCGECGKSFNQSSHFITHQRIHLGDRPYRCPECGKTFNQRSHFLTHQRTHTGEKPFHCSKCNKSFRQKAHLLCHQNTHLI

SEQ ID NO: 101317 - protein, 87 aa, Homo sapiens
  Payload ID: 20189
  Gene Name: zinc finger protein 774
  ENSP ID: ENSP00000368383
MWLGTSGKSGLPGHCLENPLQECHPAQLEEWALKGISRPSVISQPEQKEEPWVLPLQNFEARKIPRESHTGPSRLCTSTFLHSIEIN

SEQ ID NO: 101318 - protein, 44 aa, Homo sapiens
  Payload ID: 20189
  Gene Name: zinc finger protein 774
  ENSP ID: ENSP00000453202
MWLGTSGKSGLPGHCLENPLQECHPAQLEEWALKGLGWTLTSAT

SEQ ID NO: 101319 - protein, 78 aa, Homo sapiens
  Payload ID: 20189
  Gene Name: zinc finger protein 774
  ENSP ID: ENSP00000454184
MWLGTSGKSGLPGHCLENPLQECHPAQLEEWALKGISRPSVISQPEQKEEPWVLPLQNFEARKIPRESHTDCEHQVAK

SEQ ID NO: 101320 - protein, 537 aa, Homo sapiens
  Payload ID: 20190
  Gene Name: zinc finger protein 775
  Uniprot ID: Q96BV0
  ENSP ID: ENSP00000330838
MESGLAGNGTGAGLVMKVKQEKPERLLQTLAPQAMLVEKDKENIFQQHRGLPPRQTMGRPRALGGQEESGSPRWAPPTEQDAGLAGRAPGSASGPLSPSLSSGEGHFVCLDCGKRFSWWSSLKIHQRTHTGEKPYLCGKCGKSFSQKPNLARHQRHHTGERPFCCPECARRFSQKQHLLKHQKTHSRPATHSCPECERCFRHQVGLRIHQRAHARDRQGSRAGLHELIQDAAARRACRLQPGPPRGRPEWAWLGLCQGWWGQPGARAAVSGPEGPGEPRQFICNECGKSFTWWSSLNIHQRIHTGERPYACPECGRRFSQKPNLTRHLRNHTGERPHPCPHCGRGFRQKQHLLKHLRTHLPGAQAAPCPSCGKSCRSRAALRAHQRAHAVAEPAVPAGEPGDQPQAEAIPGLAARPRSSQRSPGARDTLWGRGQAGLAGPGEPRQFICNECGKSFSWWSALTIHQRIHTGERPYPCPECGRRFSQKPNLTRHRRNHTGERPYLCPACGRGFSQKQHLLKHQRVHRAAPACSPKEEAR

SEQ ID NO: 101321 - protein, 166 aa, Homo sapiens
  Payload ID: 20190
  Gene Name: zinc finger protein 775
  ENSP ID: ENSP00000417483
MESGLAGNGTGAGLVMKVKQEKPERLLQTLAPQAMLVEKDKENIFQQHRGLPPRQTMGRPRALGGQEESGSPRWAPPTEQDAGLAGRAPGSASGPLSPSLSSGEGHFVCLDCGKRFSWWSSLKIHQRTHTGEKPYLCGKCGKSFSQKPNLARHQRHHTGERPFCCP

SEQ ID NO: 101322 - protein, 144 aa, Homo sapiens
  Payload ID: 20190
  Gene Name: zinc finger protein 775
  ENSP ID: ENSP00000419336
MESGLAGNGTGAGLVMKVKQEKPERLLQTLAPQAMLVEKDKENIFQQHRGLPPRQTMGRPRALGGQEESGSPRWAPPTEQDAGLAGRAPGSASGPLSPSLSSGEGHFVCLDCGKRFSWWSSLKIHQRTHTGEKPYLCGKCGKSF

SEQ ID NO: 101323 - protein, 518 aa, Homo sapiens
  Payload ID: 20191
  Gene Name: zinc finger protein 776
  Uniprot ID: Q68DI1
  ENSP ID: ENSP00000321812
MAAAALRPPAQGTVTFEDVAVNFSQEEWSLLSEAQRCLYHDVMLENLTLISSLGCWYGAKDETPSKQTLSIQQESPLRTHWTGVCTKKVHLWGMCGPLLGDILHQGTQHNQKLNGFGAYEKKLDDDANHHQDQKQHIGEKSYRSNAKGTSFVKNCKFHMSHEPFIFHEVGKDFLSSLRLLQQEDIHTSGKSNFETKHGIPLQGGKTHYICGESTIPFSNKHSLVLHQRLLPREGPYVCSDSGKFTSKSNSFNNHQGVRTGKRPYQCGQCDESFWYKAHLTEHQRVHTGERPYECGECDKSFSHKHSLVDHQRVHTGERPYECDECGKSFSHKRSLVHHQRVHTGERPYQCGECGKSFNHKCNLIQHQRVHTGERPFECTACGKLFRSNSHLKEHQRVHTGERPYECKECRKSFRYKSHLTEHQRVHTGERPYECRECGKCFHQKGSLIQHQQIHSGERPHECGECGKCFHQKGSLIRHQQIHSGERPHECGECGKCFRQKGNLIKHQRVHTGERHHEC

SEQ ID NO: 101324 - protein, 58 aa, Homo sapiens
  Payload ID: 20191
  Gene Name: zinc finger protein 776
  ENSP ID: ENSP00000405772
MAAAALRPPAQGTVTFEDVAVNFSQEEWSLLSEAQRCLYHDVMLENLTLISSLAFYFF

SEQ ID NO: 101325 - protein, 38 aa, Homo sapiens
  Payload ID: 20191
  Gene Name: zinc finger protein 776
  ENSP ID: ENSP00000416901
  MOD_RES (1)..(1): Any amino acid
XVAVNFSQEEWSLLSEAQRCLYHDVMLENLTLISSLGK

SEQ ID NO: 101326 - protein, 831 aa, Homo sapiens
  Payload ID: 20192
  Gene Name: zinc finger protein 777
  Uniprot ID: Q9ULD5
  ENSP ID: ENSP00000247930
MENQRSSPLSFPSVPQEETLRQAPAGLPRETLFQSRVLPPKEIPSLSPTIPRQGSLPQTSSAPKQETSGRMPHVLQKGPSLLCSAASEQETSLQGPLASQEGTQYPPPAAAEQEVSLLSHSPHHQEAPVHSPEAPEKDPLTLSPTVPETDMDPLLQSPVSQKDTPFQISSAVQKEQPLPTAEITRLAVWAAVQAVERKLEAQAMRLLTLEGRTGTNEKKIADCEKTAVEFANHLESKWVVLGTLLQEYGLLQRRLENMENLLKNRNFWILRLPPGSNGEVPKVPVTFDDVAVHFSEQEWGNLSEWQKELYKNVMRGNYESLVSMDYAISKPDLMSQMERGERPTMQEQEDSEEGETPTDPSAAHDGIVIKIEVQTNDEGSESLETPEPLMGQVEEHGFQDSELGDPCGEQPDLDMQEPENTLEESTEGSSEFSELKQMLVQQRNCTEGIVIKTEEQDEEEEEEEEDELPQHLQSLGQLSGRYEASMYQTPLPGEMSPEGEESPPPLQLGNPAVKRLAPSVHGERHLSENRGASSQQQRNRRGERPFTCMECGKSFRLKINLIIHQRNHIKEGPYECAECEISFRHKQQLTLHQRIHRVRGGCVSPERGPTFNPKHALKPRPKSPSSGSGGGGPKPYKCPECDSSFSHKSSLTKHQITHTGERPYTCPECKKSFRLHISLVIHQRVHAGKHEVSFICSLCGKSFSRPSHLLRHQRTHTGERPFKCPECEKSFSEKSKLTNHCRVHSRERPHACPECGKSFIRKHHLLEHRRIHTGERPYHCAECGKRFTQKHHLLEHQRAHTGERPYPCTHCAKCFRYKQSLKYHLRTHTGE

SEQ ID NO: 101327 - protein, 687 aa, Homo sapiens
  Payload ID: 20193
  Gene Name: zinc finger protein 778
  Uniprot ID: Q96MU6
  ENSP ID: ENSP00000305203
MLENYENLASVGHHLFQPSVIYWLEQEEELRAGRRAVLQEWRLKTKGPALRQDRSWFRASNETQTARSHNGGQLCDRTQCGEAFSEHSGLSTHVRTQNTGDSCVSNHYERDFFIPCQKTLFKIGEQFSVLGQCGKAFSSTPNVVSQQACTRDRSLDYSSCGEVFLNQSYLQARAGSHNGEETWKWKPCGKALTHSMGCATPVEMHAVRNPHVCRECGKAFRYTAYLTGRVQVHPGEKPCELEECGKASPVSSSLTQHVRIHAAEKPCECKECGKAFTGLSGLSKHVQTDPGQKPYECKDCGKACGGFYLLNEHGKTHTREKPFACVVCGKYFRNSSCLNNHVRIHTGIKPYTCSYCGKAFTVRCGLTRHVRTHTGEKPYTCKDCGKAFCTSSGLTEHVRTHTGEKPYECKDCGKSFTVSSSLTEHARIHTGEKPYECKQCGKAFTGRSGLTKHMRTHTGEKPYECKDCGKAYNRVYLLNEHVKTHTEEKPFICTVCRKSFRNSSCLNKHIQIHTGIKPYECKDCGKTFTVSSSLTEHIRTHTGEKPYECKVCGKAFTTSSHLIVHIRTHTGEKPYICKECGKAFASSSHLIEHRRTHTGEKPYICNECGKAFRASSHLHKHGRIHTGQKPYKCKECGKAYNRFYLLKEHLKTYTEEQVFVCKDCGKSFKNSSCLNHHTQIHTDEKPF

SEQ ID NO: 101328 - protein, 757 aa, Homo sapiens
  Payload ID: 20193
  Gene Name: zinc finger protein 778
  ENSP ID: ENSP00000405289
MAAPDLAHGGHVSRDSVCLHEEQTQAAGMVAGWLINCYQDAVTFDDVAVDFTQEEWTLLDPSQRDLYRDVMLENYENLASVGHHLFQPSVIYWLEQEEELRAGRRAVLQEWRLKTKGPALRQDRSWFRASNETQTARSHNGGQLCDRTQCGEAFSEHSGLSTHVRTQNTGDSCVSNHYERDFFIPCQKTLFKIGEQFSVLGQCGKAFSSTPNVVSQQACTRDRSLDYSSCGEVFLNQSYLQARAGSHNGEETWKWKPCGKALTHSMGCATPVEMHAVRNPHVCRECGKAFRYTAYLTGRVQVHPGEKPCELEECGKASPVSSSLTQHVRIHAAEKPCECKECGKAFTGLSGLSKHVQTDPGQKPYECKDCGKACGGFYLLNEHGKTHTREKPFACVVCGKYFRNSSCLNNHVRIHTGIKPYTCSYCGKAFTVRCGLTRHVRTHTGEKPYTCKDCGKAFCTSSGLTEHVRTHTGEKPYECKDCGKSFTVSSSLTEHARIHTGEKPYECKQCGKAFTGRSGLTKHMRTHTGEKPYECKDCGKAYNRVYLLNEHVKTHTEEKPFICTVCRKSFRNSSCLNKHIQIHTGIKPYECKDCGKTFTVSSSLTEHIRTHTGEKPYECKVCGKAFTTSSHLIVHIRTHTGEKPYICKECGKAFASSSHLIEHRRTHTGEKPYICNECGKAFRASSHLHKHGRIHTGQKPYKCKECGKAYNRFYLLKEHLKTYTEEQVFVCKDCGKSFKNSSCLNHHTQIHTDEKPF

SEQ ID NO: 101329 - protein, 47 aa, Homo sapiens
  Payload ID: 20193
  Gene Name: zinc finger protein 778
  ENSP ID: ENSP00000456655
MAAPDLAHGGHVSRDSVCLHEEQTQAAGMVAGWLINCYQDITCSNPV

SEQ ID NO: 101330 - protein, 81 aa, Homo sapiens
  Payload ID: 20193
  Gene Name: zinc finger protein 778
  ENSP ID: ENSP00000457800
MAAPDLAHGGHVSRDSVCLHEEQTQAAGMVAGWLINCYQDAVTFDDVAVDFTQEEWTLLDPSQRDLYRDVMLENYENLASV

SEQ ID NO: 101331 - protein, 729 aa, Homo sapiens
  Payload ID: 20193
  Gene Name: zinc finger protein 778
  Uniprot ID: Q96MU6
  ENSP ID: ENSP00000481538
MAAPDLAHGGHVSRDSVCLHEEQTQAAGMVAGWLINCYQDAVTFDDVAVDFTQEEWTLLDPSQRDLYRDVMLENYENLASVEWRLKTKGPALRQDRSWFRASNETQTARSHNGGQLCDRTQCGEAFSEHSGLSTHVRTQNTGDSCVSNHYERDFFIPCQKTLFKIGEQFSVLGQCGKAFSSTPNVVSQQACTRDRSLDYSSCGEVFLNQSYLQARAGSHNGEETWKWKPCGKALTHSMGCATPVEMHAVRNPHVCRECGKAFRYTAYLTGRVQVHPGEKPCELEECGKASPVSSSLTQHVRIHAAEKPCECKECGKAFTGLSGLSKHVQTDPGQKPYECKDCGKACGGFYLLNEHGKTHTREKPFACVVCGKYFRNSSCLNNHVRIHTGIKPYTCSYCGKAFTVRCGLTRHVRTHTGEKPYTCKDCGKAFCTSSGLTEHVRTHTGEKPYECKDCGKSFTVSSSLTEHARIHTGEKPYECKQCGKAFTGRSGLTKHMRTHTGEKPYECKDCGKAYNRVYLLNEHVKTHTEEKPFICTVCRKSFRNSSCLNKHIQIHTGIKPYECKDCGKTFTVSSSLTEHIRTHTGEKPYECKVCGKAFTTSSHLIVHIRTHTGEKPYICKECGKAFASSSHLIEHRRTHTGEKPYICNECGKAFRASSHLHKHGRIHTGQKPYKCKECGKAYNRFYLLKEHLKTYTEEQVFVCKDCGKSFKNSSCLNHHTQIHTDEKPF

SEQ ID NO: 101332 - protein, 641 aa, Homo sapiens
  Payload ID: 20194
  Gene Name: zinc finger protein 780A
  Uniprot ID: O75290
  ENSP ID: ENSP00000341507
MVHGSVTFRDVAIDFSQEEWECLQPDQRTLYRDVMLENYSHLISLGSSISKPDVITLLEQEKEPWMVVRKETSRRYPDLELKYGPEKVSPENDTSEVNLPKQVIKQISTTLGIEAFYFRNDSEYRQFEGLQGYQEGNINQKMISYEKLPTHTPHASLICNTHKPYECKECGKYFSRSANLIQHQSIHTGEKPFECKECGKAFRLHIQFTRHQKFHTGEKPFECNECGKAFSLLTLLNRHKNIHTGEKLFECKECGKSFNRSSNLVQHQSIHSGVKPYECKECGKGFNRGAHLIQHQKIHSNEKPFVCKECGMAFRYHYQLIEHCQIHTGEKPFECKECGKAFTLLTKLVRHQKIHTGEKPFECRECGKAFSLLNQLNRHKNIHTGEKPFECKECGKSFNRSSNLVQHQSIHAGIKPYECKECGKGFNRGAHLIQHQKIHSNEKPFVCRECEMAFRYHCQLIEHSRIHTGDKPFECQDCGKAFNRGSSLVQHQSIHTGEKPYECKECGKAFRLYLQLSQHQKTHTGEKPFECKECGKFFRRGSNLNQHRSIHTGKKPFECKECGKAFRLHMHLIRHQKLHTGEKPFECKECGKAFRLHMQLIRHQKLHTGEKPFECKECGKVFSLPTQLNRHKNIHTGEKAS

SEQ ID NO: 101333 - protein, 607 aa, Homo sapiens
  Payload ID: 20194
  Gene Name: zinc finger protein 780A
  ENSP ID: ENSP00000387705
MLENYSHLISLGSSISKPDVITLLEQEKEPWMVVRKETSRRYPDLELKYGPEKVSPENDTSEVNLPKQVIKQISTTLGIEAFYFRNDSEYRQFEGLQGYQEGNINQKMISYEKLPTHTPHASLICNTHKPYECKECGKYFSRSANLIQHQSIHTGEKPFECKECGKAFRLHIQFTRHQKFHTGEKPFECNECGKAFSLLTLLNRHKNIHTGEKLFECKECGKSFNRSSNLVQHQSIHSGVKPYECKECGKGFNRGAHLIQHQKIHSNEKPFVCKECGMAFRYHYQLIEHCQIHTGEKPFECKECGKAFTLLTKLVRHQKIHTGEKPFECRECGKAFSLLNQLNRHKNIHTGEKPFECKECGKSFNRSSNLVQHQSIHAGIKPYECKECGKGFNRGAHLIQHQKIHSNEKPFVCRECEMAFRYHCQLIEHSRIHTGDKPFECQDCGKAFNRGSSLVQHQSIHTGEKPYECKECGKAFRLYLQLSQHQKTHTGEKPFECKECGKFFRRGSNLNQHRSIHTGKKPFECKECGKAFRLHMHLIRHQKLHTGEKPFECKECGKAFRLHMQLIRHQKLHTGEKPFECKECGKVFSLPTQLNRHKNIHTGEKAS

SEQ ID NO: 101334 - protein, 642 aa, Homo sapiens
  Payload ID: 20194
  Gene Name: zinc finger protein 780A
  Uniprot ID: O75290
  ENSP ID: ENSP00000400997
MVHGSVTFRDVAIDFSQEEWECLQPDQRTLYRDVMLENYSHLISLAGSSISKPDVITLLEQEKEPWMVVRKETSRRYPDLELKYGPEKVSPENDTSEVNLPKQVIKQISTTLGIEAFYFRNDSEYRQFEGLQGYQEGNINQKMISYEKLPTHTPHASLICNTHKPYECKECGKYFSRSANLIQHQSIHTGEKPFECKECGKAFRLHIQFTRHQKFHTGEKPFECNECGKAFSLLTLLNRHKNIHTGEKLFECKECGKSFNRSSNLVQHQSIHSGVKPYECKECGKGFNRGAHLIQHQKIHSNEKPFVCKECGMAFRYHYQLIEHCQIHTGEKPFECKECGKAFTLLTKLVRHQKIHTGEKPFECRECGKAFSLLNQLNRHKNIHTGEKPFECKECGKSFNRSSNLVQHQSIHAGIKPYECKECGKGFNRGAHLIQHQKIHSNEKPFVCRECEMAFRYHCQLIEHSRIHTGDKPFECQDCGKAFNRGSSLVQHQSIHTGEKPYECKECGKAFRLYLQLSQHQKTHTGEKPFECKECGKFFRRGSNLNQHRSIHTGKKPFECKECGKAFRLHMHLIRHQKLHTGEKPFECKECGKAFRLHMQLIRHQKLHTGEKPFECKECGKVFSLPTQLNRHKNIHTGEKAS

SEQ ID NO: 101335 - protein, 158 aa, Homo sapiens
  Payload ID: 20194
  Gene Name: zinc finger protein 780A
  Uniprot ID: O75290
  ENSP ID: ENSP00000416294
MGRSPRKIDQFCNSSNMVHGSVTFRDVAIDFSQEEWECLQPDQRTLYRDVMLENYSHLISLGSSISKPDVITLLEQEKEPWMVVRKETSRRYPDLELKYGPEKVSPENDTSEVNLPKQISSLASKPSFTAIHIQRRIHCRICIAFGYLSLVYCSLEIL

SEQ ID NO: 101336 - protein, 156 aa, Homo sapiens
  Payload ID: 20194
  Gene Name: zinc finger protein 780A
  ENSP ID: ENSP00000469407
MVHGSVTFRDVAIDFSQEEWECLQPDQRTLYRDVMLENYSHLISLGSSISKPDVITLLEQEKEPWMVVRKETSRRYPDLELKYGPEKVSPENDTSEVNLPKQVIKQISTTLGIEAFYFRNDSEYRQFEGLQGYQEGNINQKMISYEKLPTHTPHAS

SEQ ID NO: 101337 - protein, 109 aa, Homo sapiens
  Payload ID: 20194
  Gene Name: zinc finger protein 780A
  ENSP ID: ENSP00000469694
MVHGSVTFRDVAIDFSQEEWECLQPDQRTLYRDVMLENYSHLISLGSSISKPDVITLLEQEKEPWMVVRKETSRRYPDLELKYGPEKVSPENDTSEVNLPKQVIKQIST

SEQ ID NO: 101338 - protein, 642 aa, Homo sapiens; identical to SEQ ID NO: 101334
  Payload ID: 20194
  Gene Name: zinc finger protein 780A
  Uniprot ID: O75290
  ENSP ID: ENSP00000469786

SEQ ID NO: 101339 - protein, 90 aa, Homo sapiens
  Payload ID: 20194
  Gene Name: zinc finger protein 780A
  ENSP ID: ENSP00000469905
MVHGSVTFRDVAIDFSQEEWECLQPDQRTLYRDVMLENYSHLISLGSSISKPDVITLLEQEKEPWMVVRKETSRRYPDLELKYGPEKVSP

SEQ ID NO: 101340 - protein, 110 aa, Homo sapiens
  Payload ID: 20194
  Gene Name: zinc finger protein 780A
  ENSP ID: ENSP00000470265
MVHGSVTFRDVAIDFSQEEWECLQPDQRTLYRDVMLENYSHLISLAGSSISKPDVITLLEQEKEPWMVVRKETSRRYPDLELKYGPEKVSPENDTSEVNLPKQVIKQIST

SEQ ID NO: 101341 - protein, 641 aa, Homo sapiens; identical to SEQ ID NO: 101332
  Payload ID: 20194
  Gene Name: zinc finger protein 780A
  Uniprot ID: O75290
  ENSP ID: ENSP00000472189

SEQ ID NO: 101342 - protein, 106 aa, Homo sapiens
  Payload ID: 20194
  Gene Name: zinc finger protein 780A
  ENSP ID: ENSP00000472779
MVHGSVTFRDVAIDFSQEEWECLQPDQRTLYRDVMLENYSHLISLGSSISKPDVITLLEQEKEPWMVVRKETSRRYPDLELKYGPEKVSPENDTSEVNLPKQVIKQ

SEQ ID NO: 101343 - protein, 90 aa, Homo sapiens; identical to SEQ ID NO: 101339
  Payload ID: 20194
  Gene Name: Zinc finger protein 780A
  ENSP ID: ENSP00000485974

SEQ ID NO: 101344 - protein, 109 aa, Homo sapiens; identical to SEQ ID NO: 101337
  Payload ID: 20194
  Gene Name: Zinc finger protein 780A
  ENSP ID: ENSP00000486312

SEQ ID NO: 101345 - protein, 642 aa, Homo sapiens; identical to SEQ ID NO: 101334
  Payload ID: 20194
  Gene Name: Zinc finger protein 780A
  ENSP ID: ENSP00000486345

SEQ ID NO: 101346 - protein, 158 aa, Homo sapiens; identical to SEQ ID NO: 101335
  Payload ID: 20194
  Gene Name: Zinc finger protein 780A
  ENSP ID: ENSP00000486672

SEQ ID NO: 101347 - protein, 106 aa, Homo sapiens; identical to SEQ ID NO: 101342
  Payload ID: 20194
  Gene Name: Zinc finger protein 780A
  ENSP ID: ENSP00000486727

SEQ ID NO: 101348 - protein, 607 aa, Homo sapiens; identical to SEQ ID NO: 101333
  Payload ID: 20194
  Gene Name: Zinc finger protein 780A
  ENSP ID: ENSP00000486823

SEQ ID NO: 101349 - protein, 110 aa, Homo sapiens; identical to SEQ ID NO: 101340
  Payload ID: 20194
  Gene Name: Zinc finger protein 780A
  ENSP ID: ENSP00000486848

SEQ ID NO: 101350 - protein, 641 aa, Homo sapiens; identical to SEQ ID NO: 101332
  Payload ID: 20194
  Gene Name: Zinc finger protein 780A
  ENSP ID: ENSP00000487177

SEQ ID NO: 101351 - protein, 642 aa, Homo sapiens; identical to SEQ ID NO: 101334
  Payload ID: 20194
  Gene Name: Zinc finger protein 780A
  ENSP ID: ENSP00000487366

SEQ ID NO: 101352 - protein, 156 aa, Homo sapiens; identical to SEQ ID NO: 101336
  Payload ID: 20194
  Gene Name: Zinc finger protein 780A
  ENSP ID: ENSP00000487510

SEQ ID NO: 101353 - protein, 641 aa, Homo sapiens; identical to SEQ ID NO: 101332
  Payload ID: 20194
  Gene Name: Zinc finger protein 780A
  ENSP ID: ENSP00000487520

SEQ ID NO: 101354 - protein, 685 aa, Homo sapiens
  Payload ID: 20195
  Gene Name: zinc finger protein 780B
  ENSP ID: ENSP00000221355
MPAYTHASPIHNTHKPYECKECGKYFSCGSNLIQHQSIHTGEKPYKCKECGKAFQLHIQLTRHQKFHTGEKTFECKECGKAFNLPTQLNRHKNIHTVKKLFECKECGKSFNRSSNLTQHQSIHAGVKPYQCKECGKAFNRGSNLIQHQKIHSNEKPFVCRECEMAFRYHYQLIEHCRIHTGEKPFECKECRKAFTLLTKLVRHQKIHMGEKPFECRECGKAFSLLNQLNRHKNIHTGEKPFECKECGKSFNRSSNLIQHQSIHADVKPYECKECGKGFNRGANLIQHQKIHSNEKPFVCRECEMAFRYHYQLIQHCQIHTGGKPFECKECGKAFSLLTQLARHKNIHTGEKPFECKDCGKAFNRGSNLVQHQSIHTGEKPYECKECGKAFRLHLQLSQHEKTHTGEKPFECKECGKFFRRGSNLNQHRSIHTGKKPFECKECGKAFRLHMHLIRHQKFHTGEKPFECKECGKAFSLHTQLNHHKNIHTGEKPFKCKECGKSFNRVSNLVQHQSIHAGVKPYECKECGKGFSRVSNLIQHQKTHSSAKPFVCKECRKTFRYHYQLTEHYRIHTGEKPFECKECGKAFGLLTQLAQHQIIHTGEKPFKCKECGKAFNRGSNLVQPQSIHTGEKPYECKECGKAFRLHLQLSLHQKLVQVRNPLNVRNVGQPSDISSNLLNIRKFILG

SEQ ID NO: 101355 - protein, 833 aa, Homo sapiens
  Payload ID: 20195
  Gene Name: zinc finger protein 780B
  Uniprot ID: Q9Y6R6
  ENSP ID: ENSP00000391641
MVHGSVTFRDVAIDFSQEEWECLQPDQRTLYRDVMLENYSHLISLGSSISKPDVITLLEQEKEPWIVVSKETSRWYPDLESKYGPEKISPENDIFEINLPKHVIKQISKTLGLEAFYFRNDSEYRSRFEGRQGHQEGYINQKIISYEEMPAYTHASPIHNTHKPYECKECGKYFSCGSNLIQHQSIHTGEKPYKCKECGKAFQLHIQLTRHQKFHTGEKTFECKECGKAFNLPTQLNRHKNIHTVKKLFECKECGKSFNRSSNLTQHQSIHAGVKPYQCKECGKAFNRGSNLIQHQKIHSNEKPFVCRECEMAFRYHYQLIEHCRIHTGEKPFECKECRKAFTLLTKLVRHQKIHMGEKPFECRECGKAFSLLNQLNRHKNIHTGEKPFECKECGKSFNRSSNLIQHQSIHADVKPYECKECGKGFNRGANLIQHQKIHSNEKPFVCRECEMAFRYHYQLIQHCQIHTGGKPFECKECGKAFSLLTQLARHKNIHTGEKPFECKDCGKAFNRGSNLVQHQSIHTGEKPYECKECGKAFRLHLQLSQHEKTHTGEKPFECKECGKFFRRGSNLNQHRSIHTGKKPFECKECGKAFRLHMHLIRHQKFHTGEKPFECKECGKAFSLHTQLNHHKNIHTGEKPFKCKECGKSFNRVSNLVQHQSIHAGVKPYECKECGKGFSRVSNLIQHQKTHSSAKPFVCKECRKTFRYHYQLTEHYRIHTGEKPFECKECGKAFGLLTQLAQHQIIHTGEKPFKCKECGKAFNRGSNLVQPQSIHTGEKPYECKECGKAFRLHLQLSLHQKLVQVRNPLNVRNVGQPSDISSNLLNIRKFILG

SEQ ID NO: 101356 - protein, 76 aa, Homo sapiens
  Payload ID: 20195
  Gene Name: zinc finger protein 780B
  ENSP ID: ENSP00000471501
MVHGSVTFRDVAIDFSQEEWECLQPDQRTLYRDVMLENYSHLISLGSSISKPDVITLLEQEKEPWIVVSKETSRWY

SEQ ID NO: 101357 - protein, 87 aa, Homo sapiens
  Payload ID: 20195
  Gene Name: zinc finger protein 780B
  ENSP ID: ENSP00000471669
MVHGSVTFRDVAIDFSQEEWECLQPDQRTLYRDVMLENYSHLISLAGSSISKPDVITLLEQEKEPWIVIWSQNMDLRKYLQKMIFLK

SEQ ID NO: 101358 - protein, 109 aa, Homo sapiens
  Payload ID: 20195
  Gene Name: zinc finger protein 780B
  ENSP ID: ENSP00000471726
MVHGSVTFRDVAIDFSQEEWECLQPDQRTLYRDVMLENYSHLISLGSSISKPDVITLLEQEKEPWIVVSKETSRWYPDLESKYGPEKISPENDIFEINLPKHVIKQISK

SEQ ID NO: 101359 - protein, 833 aa, Homo sapiens; identical to SEQ ID NO: 101355
  Payload ID: 20195
  Gene Name: zinc finger protein 780B
  Uniprot ID: Q9Y6R6
  ENSP ID: ENSP00000484593

SEQ ID NO: 101360 - protein, 685 aa, Homo sapiens; identical to SEQ ID NO: 101354
  Payload ID: 20195
  Gene Name: Zinc finger protein 780B
  ENSP ID: ENSP00000486124

SEQ ID NO: 101361 - protein, 109 aa, Homo sapiens; identical to SEQ ID NO: 101358
  Payload ID: 20195
  Gene Name: Zinc finger protein 780B
  ENSP ID: ENSP00000486635

SEQ ID NO: 101362 - protein, 87 aa, Homo sapiens; identical to SEQ ID NO: 101357
  Payload ID: 20195
  Gene Name: Zinc finger protein 780B
  ENSP ID: ENSP00000487227

SEQ ID NO: 101363 - protein, 76 aa, Homo sapiens; identical to SEQ ID NO: 101356
  Payload ID: 20195
  Gene Name: Zinc finger protein 780B
  ENSP ID: ENSP00000487473

SEQ ID NO: 101364 - protein, 833 aa, Homo sapiens; identical to SEQ ID NO: 101355
  Payload ID: 20195
  Gene Name: Zinc finger protein 780B
  ENSP ID: ENSP00000487499

SEQ ID NO: 101365 - protein, 833 aa, Homo sapiens; identical to SEQ ID NO: 101355
  Payload ID: 20195
  Gene Name: Zinc finger protein 780B
  ENSP ID: ENSP00000487572

SEQ ID NO: 101366 - protein, 327 aa, Homo sapiens
  Payload ID: 20196
  Gene Name: zinc finger protein 781
  Uniprot ID: Q8N8C0
  ENSP ID: ENSP00000351391
MQRNAMYLKNVAETACNFQLTQYQISHANQKPYECQICGKPFRKRAHLTQHNRIHTGGKPYECKECGKVFICCSTLIQHKRTHTSEKPYECLECRKTFRRSAHLIRHQRIHTGEKPYKCKQCWKAFASVSDLIDIGKFTLMRDFTNVQNVGRHLTIAQLLFSIREFTLVRSPLNVRNVAKHSIIAQHLLNTRELILMRNLMNVRNVKRLLGKVHILLNIKEFILVRNHMSVSNVGRLSLVFLILIDIREFTLVKNPMNVKNVVELLTIVQLLFNTREFTLVRRLMNISSVGRFLSPVQHLFNIREHILMKNLMNVSNARRPSSIMHI

SEQ ID NO: 101367 - protein, 327 aa, Homo sapiens; identical to SEQ ID NO: 101366
  Payload ID: 20196
  Gene Name: zinc finger protein 781
  Uniprot ID: Q8N8C0
  ENSP ID: ENSP00000466370

SEQ ID NO: 101368 - protein, 205 aa, Homo sapiens
  Payload ID: 20197
  Gene Name: zinc finger protein 782
  ENSP ID: ENSP00000417577
MNTFQASVSFQDVTVEFSQEEWQHMGPVERTLYRDVMLENYSHLVSVGYCFTKPELIFTLEQGEDPWLLEKEKGFLSRNSPEDSQPDEISEKSPENQGKHLLQVLFTNKLLTTEQEISGKPHNRDINIFRARMMPCKCDIAGSACQGLSLMAPHCQYSKEKAHERNVCDKWLISIKDGRTNTQEKSFAYSKIVKTLHHKEEVIQH

SEQ ID NO: 101369 - protein, 688 aa, Homo sapiens
  Payload ID: 20197
  Gene Name: zinc finger protein 782
  ENSP ID: ENSP00000418686
  MOD_RES (1)..(1): Any amino acid
XFINVDQSARTRGRCVCGKTPSCGDRKSCINSSFITCYCFTKPELIFTLEQGEDPWLLEKEKGFLSRNSPEDSQPDEISEKSPENQGKHLLQVLFTNKLLTTEQEISGKPHNRDINIFRARMMPCKCDIAGSACQGLSLMAPHCQYSKEKAHERNVCDKWLISIKDGRTNTQEKSFAYSKIVKTLHHKEEVIQHQTIQTLGQDFEYNESRKAFLEKAALVTSNSTHPKGKSYNFNKFGENKYDKSTFIIPQNMNPEKSHYEFNDTGNCFCRITHKTLTGGKSFSQKSHIREHHRVHIGVKPFEYGKSFNRNSTLPVHQRTHATDKYSDYHPCTETFSYQSTFSVHQKVHIRAKPYEYNECGKSCSMNSHLIWPQKSHTGEKPYECPECGKAFSEKSRLRKHQRTHTGEKPYKCDGCDKAFSAKSGLRIHQRTHTGEKPFECHECGKSFNYKSILIVHQRTHTGEKPFECNECGKSFSHMSGLRNHRRTHTGERPYKCDECGKAFKLKSGLRKHHRTHTGEKPYKCNQCGKAFGQKSQLRGHHRIHTGEKPYKCNHCGEAFSQKSNLRVHHRTHTGEKPYQCEECGKTFRQKSNLRGHQRTHTGEKPYECNECGKAFSEKSVLRKHQRTHTGEKPYNCNQCGEAFSQKSNLRVHQRTHTGEKPYKCDKCGRTFSQKSSLREHQKAHPGD

SEQ ID NO: 101370 - protein, 699 aa, Homo sapiens
  Payload ID: 20197
  Gene Name: zinc finger protein 782
  Uniprot ID: Q6ZMW2
  ENSP ID: ENSP00000419397
MNTFQASVSFQDVTVEFSQEEWQHMGPVERTLYRDVMLENYSHLVSVGYCFTKPELIFTLEQGEDPWLLEKEKGFLSRNSPEDSQPDEISEKSPENQGKHLLQVLFTNKLLTTEQEISGKPHNRDINIFRARMMPCKCDIAGSACQGLSLMAPHCQYSKEKAHERNVCDKWLISIKDGRTNTQEKSFAYSKIVKTLHHKEEVIQHQTIQTLGQDFEYNESRKAFLEKAALVTSNSTHPKGKSYNFNKFGENKYDKSTFIIPQNMNPEKSHYEFNDTGNCFCRITHKTLTGGKSFSQKSHIREHHRVHIGVKPFEYGKSFNRNSTLPVHQRTHATDKYSDYHPCTETFSYQSTFSVHQKVHIRAKPYEYNECGKSCSMNSHLIWPQKSHTGEKPYECPECGKAFSEKSRLRKHQRTHTGEKPYKCDGCDKAFSAKSGLRIHQRTHTGEKPFECHECGKSFNYKSILIVHQRTHTGEKPFECNECGKSFSHMSGLRNHRRTHTGERPYKCDECGKAFKLKSGLRKHHRTHTGEKPYKCNQCGKAFGQKSQLRGHHRIHTGEKPYKCNHCGEAFSQKSNLRVHHRTHTGEKPYQCEECGKTFRQKSNLRGHQRTHTGEKPYECNECGKAFSEKSVLRKHQRTHTGEKPYNCNQCGEAFSQKSNLRVHQRTHTGEKPYKCDKCGRTFSQKSSLREHQKAHPGD

SEQ ID NO: 101371 - protein, 44 aa, Homo sapiens
  Payload ID: 20197
  Gene Name: zinc finger protein 782
  ENSP ID: ENSP00000419978
MPAAAEESPFINVDQSARTRGRCVCGKTPSCGDRKSCINSSFIT

SEQ ID NO: 101372 - protein, 699 aa, Homo sapiens; identical to SEQ ID NO: 101370
  Payload ID: 20197
  Gene Name: zinc finger protein 782
  Uniprot ID: Q6ZMW2
  ENSP ID: ENSP00000440624

SEQ ID NO: 101373 - protein, 323 aa, Homo sapiens
  Payload ID: 20198
  Gene Name: zinc finger protein 784
  Uniprot ID: Q8NCA9
  ENSP ID: ENSP00000320096
MAAARPEAQSRSSPTPESRSQEPLDLVLVPDDCRPGTPPSDLIEIQVVKVTDTTLVPEPPEPGSFHCALCPAAFRLVSELLFHEHGHLAGAEGGGQGGDPSRCHVCGHSCPGPASLRAHYSLHTGERPYRCALCPRAFKALAPLLRHQHRHGVEPGTSRRPPDTAAVAEQRPGVAPERAEVVMAAAAAGAAVGKPFACRFCAKPFRRSSDMRDHERVHTGERPYHCGICGKGFTQSSVLSGHARIHTGERPFRCTLCDRTFNNSSNFRKHQRTHFHGPGPGLGDSGGQLGSSAAEGSGSGCGVGDPAEEGRGETAKVKVEADQ

SEQ ID NO: 101374 - protein, 42 aa, Homo sapiens
  Payload ID: 20198
  Gene Name: zinc finger protein 784
  ENSP ID: ENSP00000467725
MAAARPEAQSRSSPTPESRSQEPLDLVRARKGPGRGARGPGA

SEQ ID NO: 101375 - protein, 405 aa, Homo sapiens
  Payload ID: 20199
  Gene Name: zinc finger protein 785
  Uniprot ID: A8K8V0
  ENSP ID: ENSP00000378642
MGPPLAPRPAHVPGEAGPRRTRESRPGAVSFADVAVYFSPEEWECLRPAQRALYRDVMRETFGHLGALGFSVPKPAFISWVEGEVEAWSPEAQDPDGESSAAFSRGQGQEAGSRDGNEEKERLKKCPKQKEVAHEVAVKEWWPSVACPEFCNPRQSPMNPWLKDTLTRRLPHSCPDCGRNFSYPSLLASHQRVHSGERPFSCGQCQARFSQRRYLLQHQFIHTGEKPYPCPDCGRRFRQRGSLAIHRRAHTGEKPYACSDCKSRFTYPYLLAIHQRKHTGEKPYSCPDCSLRFAYTSLLAIHRRIHTGEKPYPCPDCGRRFTYSSLLLSHRRIHSDSRPFPCVECGKGFKRKTALEAHRWIHRSCSERRAWQQAVVGRSEPIPVLGGKDPPVHFRHFPDIFQECG

SEQ ID NO: 101376 - protein, 390 aa, Homo sapiens
  Payload ID: 20199
  Gene Name: zinc finger protein 785
  Uniprot ID: A8K8V0
  ENSP ID: ENSP00000420340
MGPPLAPRPAHVPGEAGPRRTRESRPGAVSFADVAVYFSPEEWECLRPAQRALYRDVMRETFGHLGALGFSVPKPAFISWVEGEVEAWSPEAQDPDGSRDGNEEKERLKKCPKQKEVAHEVAVKEWWPSVACPEFCNPRQSPMNPWLKDTLTRRLPHSCPDCGRNFSYPSLLASHQRVHSGERPFSCGQCQARFSQRRYLLQHQFIHTGEKPYPCPDCGRRFRQRGSLAIHRRAHTGEKPYACSDCKSRFTYPYLLAIHQRKHTGEKPYSCPDCSLRFAYTSLLAIHRRIHTGEKPYPCPDCGRRFTYSSLLLSHRRIHSDSRPFPCVECGKGFKRKTALEAHRWIHRSCSERRAWQQAVVGRSEPIPVLGGKDPPVHFRHFPDIFQECG

SEQ ID NO: 101377 - protein, 81 aa, Homo sapiens
  Payload ID: 20199
  Gene Name: zinc finger protein 785
  ENSP ID: ENSP00000456097
  MOD_RES (1)..(1): Any amino acid
XLLLSHRRIHSDSRPFPCVECGKGFKRKTALEAHRWIHRSCSERRAWQQAVVGRSEPIPVLGGKDPPVHFRHFPDIFQECG

SEQ ID NO: 101378 - protein, 69 aa, Homo sapiens
  Payload ID: 20199
  Gene Name: zinc finger protein 785
  ENSP ID: ENSP00000458511
SPEEWECLRPAQRALYRDVMRETFGHLGALGEAGPSGRDPQIFSSQTRFYLVGGRRSGGVEPGGPGSRR

SEQ ID NO: 101379 - protein, 696 aa, Homo sapiens
  Payload ID: 20200
  Gene Name: zinc finger protein 786
  ENSP ID: ENSP00000313516
MHFDPGFEEQLFWGSQQAMNSGKTKSHFQLDPESQCSFGSFVSFRPDQGITLGSPQRHDARAPPPLACGPSESTLKEGIPGPRNLDLPGLWDVPAWESTQHPWPVCGESCWENNHLVMHQRGHSKDRTRRAWEKFNKRAETQMPWSSPRVQRHFRCGVCGKSFRRKLCLLRHLAAHTGRGPFRNADGEMCFRHELTHPSHRLPQQGEKPAQCTPCGKRSLPVDSTQARRCQHSREGPASWREGRGASSSVHSGQKPGSRLPQEGNSHQEGDTEALQHGAEGPCSCSECGERSPMSARLASPCRAHTGEKPFQCAHCTKRFRLRRLLQVHQHAHGGERPFSCRKCGKGFAKQCKLTEHIRVHSGEKPFRCAKCGRNFRQRGQLLRHQRLHTDEKPFQCPECGLSFRLESMLRAHRLRHGGERPFSCSECGRGFTHQCKLREHLRVHSGERPFQCLKCDKRFRLKGILKAHQHTHSKERPFSCGECGKGFTRQSKLTEHLRVHSGERPFQCPECNRSFRLKGQLLSHQRLHTGERPFQCPECDKRYRVKADMKAHQLLHSGEMPFSCECGKGFVKHSKLIEHIRTHTGEKPFQCPKCDKSFRLKAQLLSHQGLHTGERPFHCPECDKNFRERGHMLRHQRIHRPERPFACGDCGKGFIYKSKLAEHIRVHTKSCPAPNELDIKKRLSQLFAMIEADWS

SEQ ID NO: 101380 - protein, 351 aa, Homo sapiens
  Payload ID: 20200
  Gene Name: zinc finger protein 786
  ENSP ID: ENSP00000404984
MHFDPGFEEQLFWGSQQAMNSGKTKSHFQLDPESQCSFGSFVSFRPDQGITLGSPQRHDARAPPPLACGPSESTLKEGIPGPRNLDLPGLWDVPAWESTQHPWPVCGESCWENNHLVMHQRGHSKDRTRRAWEKFNKRAETQMPWSSPRVQRHFRCGVCGKSFRRKLCLLRHLAAHTGRGPFRNADGEMCFRHELTHPSHRLPQQGEKPAQCTPCGKRSLPVDSTQARRCQHSREGPASWREGRGASSSVHSGQKPGSRLPQEGNSHQEGDTEALQHGAEGPCSCSECGERSPMSARLASPCRAHTGEKPFQCAHCTKRFRLRRLLQVHQHAHGGETVLLQEVWQGLRQAV

SEQ ID NO: 101381 - protein, 782 aa, Homo sapiens
  Payload ID: 20200
  Gene Name: zinc finger protein 786
  Uniprot ID: Q8N393
  ENSP ID: ENSP00000417470
MAEPPRLPLTFEDVAIYFSEQEWQDLEAWQKELYKHVMRSNYETLVSLDDGLPKPELISWIEHGGEPFRKWRESQKSGNIICSSVDMHFDPGFEEQLFWGSQQAMNSGKTKSHFQLDPESQCSFGSFVSFRPDQGITLGSPQRHDARAPPPLACGPSESTLKEGIPGPRNLDLPGLWDVPAWESTQHPWPVCGESCWENNHLVMHQRGHSKDRTRRAWEKFNKRAETQMPWSSPRVQRHFRCGVCGKSFRRKLCLLRHLAAHTGRGPFRNADGEMCFRHELTHPSHRLPQQGEKPAQCTPCGKRSLPVDSTQARRCQHSREGPASWREGRGASSSVHSGQKPGSRLPQEGNSHQEGDTEALQHGAEGPCSCSECGERSPMSARLASPCRAHTGEKPFQCAHCTKRFRLRRLLQVHQHAHGGERPFSCRKCGKGFAKQCKLTEHIRVHSGEKPFRCAKCGRNFRQRGQLLRHQRLHTDEKPFQCPECGLSFRLESMLRAHRLRHGGERPFSCSECGRGFTHQCKLREHLRVHSGERPFQCLKCDKRFRLKGILKAHQHTHSKERPFSCGECGKGFTRQSKLTEHLRVHSGERPFQCPECNRSFRLKGQLLSHQRLHTGERPFQCPECDKRYRVKADMKAHQLLHSGEMPFSCECGKGFVKHSKLIEHIRTHTGEKPFQCPKCDKSFRLKAQLLSHQGLHTGERPFHCPECDKNFRERGHMLRHQRIHRPERPFACGDCGKGFIYKSKLAEHIRVHTKSCPAPNELDIKKRLSQLFAMIEADWS

SEQ ID NO: 101382 - protein, 126 aa, Homo sapiens
  Payload ID: 20201
  Gene Name: zinc finger protein 787
  ENSP ID: ENSP00000465647
MELREEAWSPGPLDSEDQQMASHENPGEQPEAFPADPAASHLTLASFASGWEETPLPCFPLLGPWDHPTLASPPALGLALLAVEGGLVLWLQVSFLLDDLGDPWGPPSLPDFLCPCPSSLGSTPVC

SEQ ID NO: 101383 - protein, 39 aa, Homo sapiens
  Payload ID: 20201
  Gene Name: zinc finger protein 787
  ENSP ID: ENSP00000471514
MELREEAWSPGPLDSEDQQMASHENPVDILIMDDDDVPS

SEQ ID NO: 101384 - protein, 382 aa, Homo sapiens
  Payload ID: 20201
  Gene Name: zinc finger protein 787
  ENSP ID: ENSP00000478557
MELREEAWSPGPLDSEDQQMASHENPVDILIMDDDDVPSWPPTKLSPPQSAPPAGPPPRPRPPAPYICNECGKSFSHWSKLTRHQRTHTGERPNACADCGKTFSQSSHLVQHRRIHTGEKPYACLECGKRFSWSSNLMQHQRIHTGEKPYTCPDCGRSFTQSKSLAKHRRSHSGLKPFVCPRCGRGFSQPKSLARHLRLHPELSGPGVAAKVLAASVRRAKGPEEAVAADGEIAIPVGDGEGIIVVGAPGEGAAAAAAMAGAGAKAAGPRSRRAPAPKPYVCLECGKGFGHGAGLLAHQRAQHGDGLGAAGGEEPAHICVECGEGFVQGAALRRHKKIHAVGAPSVCSSCGQSYYRAGGEEEDDDDEAAGGRCPECRGGEGR

SEQ ID NO: 101385 - protein, 425 aa, Homo sapiens
  Payload ID: 20202
  Gene Name: zinc finger protein 789
  Uniprot ID: Q5FWF6
  ENSP ID: ENSP00000331927
MFPPARGKELLSFEDVAMYFTREEWGHLNWGQKDLYRDVMLENYRNMVLLGFQFPKPEMICQLENWDEQWILDLPRTGNRKASGSACPGSEARHKMKKLTPKQKFSEDLESYKISVVMQESAEKLSEKLHKCKEFVDSCRLTFPTSGDEYSRGFLQNLNLIQDQNAQTRWKQGRYDEDGKPFNQRSLLLGHERILTRAKSYECSECGKVIRRKAWFDQHQRIHFLENPFECKVCGQAFRQRSALTVHKQCHLQNKPYRCHDCGKCFRQLAYLVEHKRIHTKEKPYKCSKCEKTFSQNSTLIRHQVIHSGEKRHKCLECGKAFGRHSTLLCHQQIHSKPNTHKCSECGQSFGRNVDLIQHQRIHTKEEFFQCGECGKTFSFKRNLFRHQVIHTGSQPYQCVICGKSFKWHTSFIKHQGTHKGQIST

SEQ ID NO: 101386 - protein, 62 aa, Homo sapiens
  Payload ID: 20202
  Gene Name: zinc finger protein 789
  Uniprot ID: Q5FWF6
  ENSP ID: ENSP00000369047
MFPPARGKELLSFEDVAMYFTREEWGHLNWGQKDLYRDVMLENYRNMVLLVYFQFDAAIPLC

SEQ ID NO: 101387 - protein, 55 aa, Homo sapiens
  Payload ID: 20202
  Gene Name: zinc finger protein 789
  ENSP ID: ENSP00000401255
MELLSFEDVAMYFTREEWGHLNWGQKDLYRDVMLENYRNMVLLVYFQFDAAIPLC

SEQ ID NO: 101388 - protein, 118 aa, Homo sapiens
  Payload ID: 20202
  Gene Name: zinc finger protein 789
  ENSP ID: ENSP00000405206
MELLSFEDVAMYFTREEWGHLNWGQKDLYRDVMLENYRNMVLLGFQFPKPEMICQLENWDEQWILDLPRTGNRKASGSACPAAPVFHIQGFSSMALLTFWADEFFGDRMGHVLCILGC

SEQ ID NO: 101389 - protein, 56 aa, Homo sapiens
  Payload ID: 20202
  Gene Name: zinc finger protein 789
  ENSP ID: ENSP00000417227
MELLSFEDVAMYFTREEWGHLNWGQKDLYRDVMLENYRNMVLLGRTRLEDWALSVF

SEQ ID NO: 101390 - protein, 56 aa, Homo sapiens
  Payload ID: 20202
  Gene Name: zinc finger protein 789
  ENSP ID: ENSP00000419500
MELLSFEDVAMYFTREEWGHLNWGQKDLYRDVMLENYRNMVLLDAAISQQFLPSRL

SEQ ID NO: 101391 - protein, 498 aa, Homo sapiens
  Payload ID: 20203
  Gene Name: zinc finger protein 79
  Uniprot ID: Q15937
  ENSP ID: ENSP00000362446
MLEEGVLPSPGPALPQEENTGEEGMAAGLLTAGPRGSTFFSSVTVAFAQERWRCLVSTPRDRFKEGIPGKSRSLVLLGLPVSQPGMNSQLEQREGAWMLEGEDLRSPSPGWKIISGSPPEQALSEASFQDPCVEMPPGDSDHGTSDLEKSFNLRPVLSPQQRVPVEARPRKCETHTESFKNSEILKPHRAKPYACNECGKAFSYCSSLSQHQKSHTGEKPYECSECGKAFSQSSSLIQHQRIHTGEKPYKCSECGRAFSQNANLTKHQRTHTGEKPYRCSECEKAFSDCSALVQHQRIHTGEKPYECSDCGKAFRHSANLTNHQRTHTGEKPYKCSECGKAFSYCAAFIQHQRIHTGEKPYRCAACGKAFSQSANLTNHQRTHTGEKPYKCSECGKAFSQSTNLIIHQKTHTGEKPYKCNECGKFFSESSALIRHHIIHTGEKPYECNECGKAFNQSSSLSQHQRIHTGVKPYECSECGKAFRCSSAFVRHQRLHAGE

SEQ ID NO: 101392 - protein, 474 aa, Homo sapiens
  Payload ID: 20203
  Gene Name: zinc finger protein 79
  ENSP ID: ENSP00000438418
MAAGLLTAGPRGSTFFSSVTVAFAQERWRCLVSTPRDRFKEGIPGKSRSLVLLGLPVSQPGMNSQLEQREGAWMLEGEDLRSPSPGWKIISGSPPEQALSEASFQDPCVEMPPGDSDHGTSDLEKSFNLRPVLSPQQRVPVEARPRKCETHTESFKNSEILKPHRAKPYACNECGKAFSYCSSLSQHQKSHTGEKPYECSECGKAFSQSSSLIQHQRIHTGEKPYKCSECGRAFSQNANLTKHQRTHTGEKPYRCSECEKAFSDCSALVQHQRIHTGEKPYECSDCGKAFRHSANLTNHQRTHTGEKPYKCSECGKAFSYCAAFIQHQRIHTGEKPYRCAACGKAFSQSANLTNHQRTHTGEKPYKCSECGKAFSQSTNLIIHQKTHTGEKPYKCNECGKFFSESSALIRHHIIHTGEKPYECNECGKAFNQSSSLSQHQRIHTGVKPYECSECGKAFRCSSAFVRHQRLHAGE

SEQ ID NO: 101393 - protein, 474 aa, Homo sapiens; identical to SEQ ID NO: 101392
  Payload ID: 20203
  Gene Name: zinc finger protein 79
  ENSP ID: ENSP00000478201

SEQ ID NO: 101394 - protein, 364 aa, Homo sapiens
  Payload ID: 20203
  Gene Name: zinc finger protein 79
  ENSP ID: ENSP00000484833
MPPGDSDHGTSDLEKSFNLRPVLSPQQRVPVEARPRKCETHTESFKNSEILKPHRAKPYACNECGKAFSYCSSLSQHQKSHTGEKPYECSECGKAFSQSSSLIQHQRIHTGEKPYKCSECGRAFSQNANLTKHQRTHTGEKPYRCSECEKAFSDCSALVQHQRIHTGEKPYECSDCGKAFRHSANLTNHQRTHTGEKPYKCSECGKAFSYCAAFIQHQRIHTGEKPYRCAACGKAFSQSANLTNHQRTHTGEKPYKCSECGKAFSQSTNLIIHQKTHTGEKPYKCNECGKFFSESSALIRHHIIHTGEKPYECNECGKAFNQSSSLSQHQRIHTGVKPYECSECGKAFRCSSAFVRHQRLHAGE

SEQ ID NO: 101395 - protein, 636 aa, Homo sapiens
  Payload ID: 20204
  Gene Name: zinc finger protein 790
  Uniprot ID: Q6PG37
  ENSP ID: ENSP00000349161
MAHLMMFRDVAVDFSQEEWECLDLEQRDLYRDVMLENYSNMVSLGFCIYQPEAFSLLEKGKEPWKILRDETRGPCPDMQSRCQTKKLLPKNGIFEREIAQLEIMRICKNHSLDCLCFRGDWEGNTQFQTLQDNQEECFKQVIRTCEKRPTFNQHTVFNLHQRLNTGDKLNEFKELGKAFISGSDHTQHQLIHTSEKFCGDKECGNTFLPDSEVIQYQTVHTVKKTYECKECGKSFSLRSSLTGHKRIHTGEKPFKCKDCGKAFRFHSQLSVHKRIHTGEKSYECKECGKAFSCGSDLTRHQRIHTGEKPYECNECRKAFSQRSHLIKHQRIHTGEKPYECKECGKAFTRGSHLTQHQRIHTGEKSHECKECGKAFIRGSNLAQHQNVHVGRKPYKCEKCGKAYIWSSHLARHQRIHTGRKPYECKQCGKTFTWASYLAQHEKIHNERKSYECKECGKTFLHGSEFNRHQKIHTGERNYECKECGKTFFRGSELNRHQKIHTGKRPYECEECGKAFLWGSQLTRHQRMHTGEEPYVCKECGKSFIWGSQLTRHKKIHTDAEPYGCKKSSHIFSHHSYFTEQKIHNSANLCEWTDYGNTFSHESNFAQHQNIYTFEKSYEFKDFEKAFSSSSHFISLL

SEQ ID NO: 101396 - protein, 135 aa, Homo sapiens
  Payload ID: 20204
  Gene Name: zinc finger protein 790
  ENSP ID: ENSP00000433389
MAHLMMFRDVAVDFSQEEWECLDLEQRDLYRDVMLENYSNMVSLGFCIYQPEAFSLLEKGKEPWKILRDETRGPCPDMQSRCQTKKLLPKNGIFEREIAQLEIMRICKNHSLDCLCFRGDWEGNTQFQTLQDNQE

SEQ ID NO: 101397 - protein, 49 aa, Homo sapiens
  Payload ID: 20204
  Gene Name: zinc finger protein 790
  ENSP ID: ENSP00000434537
MAHLMMFRDVAVDFSQEEWECLDLEQRDLYRDVMLENYSNMVSLGFCIY

SEQ ID NO: 101398 - protein, 179 aa, Homo sapiens
  Payload ID: 20204
  Gene Name: zinc finger protein 790
  ENSP ID: ENSP00000435944
MAHLMMFRDVAVDFSQEEWECLDLEQRDLYRDVMLENYSNMVSLGFCIYQPEAFSLLEKGKEPWKILRDETRGPCPDMQSRCQTKKLLPKNGIFEREIAQLEIMRICKNHSLDCLCFRGDWEGNTQFQTLQDNQEECFKQVIRTCEKRPTFNQHTVFNLHQRLNTGDKLNEFKELGKAF

SEQ ID NO: 101399 - protein, 140 aa, Homo sapiens
  Payload ID: 20204
  Gene Name: zinc finger protein 790
  ENSP ID: ENSP00000467684
MAHLMMFRDVAVDFSQEEWECLDLEQRDLYRDVMLENYSNMVSLGFCIYQPEAFSLLEKGKEPWKILRDETRGPCPDMQSRCQTKKLLPKNGIFEREIAQLEIMRICKNHSLDCLCFRGDWEGNTQFQTLQDNQEECFKQ

SEQ ID NO: 101400 - protein, 636 aa, Homo sapiens; identical to SEQ ID NO: 101395
  Payload ID: 20204
  Gene Name: zinc finger protein 790
  Uniprot ID: Q6PG37
  ENSP ID: ENSP00000478852

SEQ ID NO: 101401 - protein, 636 aa, Homo sapiens; identical to SEQ ID NO: 101395
  Payload ID: 20204
  Gene Name: zinc finger protein 790
  Uniprot ID: Q6PG37
  ENSP ID: ENSP00000480764

SEQ ID NO: 101402 - protein, 636 aa, Homo sapiens; identical to SEQ ID NO: 101395
  Payload ID: 20204
  Gene Name: zinc finger protein 790
  Uniprot ID: Q6PG37
  ENSP ID: ENSP00000480834

SEQ ID NO: 101403 - protein, 576 aa, Homo sapiens
  Payload ID: 20205
  Gene Name: zinc finger protein 791
  Uniprot ID: Q3KP31
  ENSP ID: ENSP00000342974
MDSVAFEDVSVSFSQEEWALLAPSQKKLYRDVMQETFKNLASIGEKWEDPNVEDQHKNQGRNLRSHTGERLCEGKEGSQCAENFSPNLSVTKKTAGVKPYECTICGKAFMRLSSLTRHMRSHTGYELFEKPYKCKECEKAFSYLKSFQRHERSHTGEKPYKCKQCGKTFIYHQPFQRHERTHIGEKPYECKQCGKALSCSSSLRVHERIHTGEKPYECKQCGKAFSCSSSIRVHERTHTGEKPYACKECGKAFISHTSVLTHMITHNGDRPYKCKECGKAFIFPSFLRVHERIHTGEKPYKCKQCGKAFRCSTSIQIHERIHTGEKPYKCKECGKSFSARPAFRVHVRVHTGEKPYKCKECGKAFSRISYFRIHERTHTGEKPYECKKCGKTFNYPLDLKIHKRNHTGEKPYECKECAKTFISLENFRRHMITHTGDGPYKCRDCGKVFIFPSALRTHERTHTGEKPYECKQCGKAFSCSSYIRIHKRTHTGEKPYECKECGKAFIYPTSFQGHMRMHTGEKPYKCKECGKAFSLHSSFQRHTRIHNYEKPLECKQCGKAFSVSTSLKKHMRMHNR

SEQ ID NO: 101404 - protein, 69 aa, Homo sapiens
  Payload ID: 20205
  Gene Name: zinc finger protein 791
  ENSP ID: ENSP00000412981
MDSVAFEDVSVSFSQEEWALLAPSQKKLYRDVMQETFKNLASIEAIRERDSVKVKKVVNVQKTSVPISV

SEQ ID NO: 101405 - protein, 35 aa, Homo sapiens
  Payload ID: 20205
  Gene Name: zinc finger protein 791
  ENSP ID: ENSP00000469996
MGSGCVAQADLELLGSSDPPPSASQSARIPGLSGF

SEQ ID NO: 101406 - protein, 83 aa, Homo sapiens
  Payload ID: 20205
  Gene Name: zinc finger protein 791
  ENSP ID: ENSP00000471179
MRLSSLTRHMRSHTGYELFEKPYKCKECEKAFSYLKSFQRHERSHTGEKPYKCKQCGKTFIYHQPFQRHERTHIGEKPYECKQ

SEQ ID NO: 101407 - protein, 44 aa, Homo sapiens
  Payload ID: 20205
  Gene Name: zinc finger protein 791
  ENSP ID: ENSP00000472685
MMGSGCVAQADLELLGSSDPPPSASQSARIPGMSYYYRPNILIF

SEQ ID NO: 101408 - protein, 632 aa, Homo sapiens
  Payload ID: 20206
  Gene Name: zinc finger protein 792
  Uniprot ID: Q3KQV3
  ENSP ID: ENSP00000385099
MAAAALRDPAQGCVTFEDVTIYFSQEEWVLLDEAQRLLYCDVMLENFALIASLGLISFRSHIVSQLEMGKEPWVPDSVDMTSAMARGAYGRPGSDFCHGTEGKDLPSEHNVSVEGVAQDRSPEATLCPQKTCPCDICGLRLKDILHLAEHQTTHPRQKPFVCEAYVKGSEFSANLPRKQVQQNVHNPIRTEEGQASPVKTCRDHTSDQLSTCREGGKDFVATAGFLQCEVTPSDGEPHEATEGVVDFHIALRHNKCCESGDAFNNKSTLVQHQRIHSRERPYECSKCGIFFTYAADLTQHQKVHNRGKPYECCECGKFFSQHSSLVKHRRVHTGESPHVCGDCGKFFSRSSNLIQHKRVHTGEKPYECSDCGKFFSQRSNLIHHKRVHTGRSAHECSECGKSFNCNSSLIKHWRVHTGERPYKCNECGKFFSHIASLIQHQIVHTGERPHGCGECGKAFSRSSDLMKHQRVHTGERPYECNECGKLFSQSSSLNSHRRLHTGERPYQCSECGKFFNQSSSLNNHRRLHTGERPYECSECGKTFRQRSNLRQHLKVHKPDRPYECSECGKAFNQRPTLIRHQKIHIRERSMENVLLPCSQHTPEISSENRPYQGAVNYKLKLVHPSTHPGEVP

SEQ ID NO: 101409 - protein, 565 aa, Homo sapiens
  Payload ID: 20206
  Gene Name: zinc finger protein 792
  ENSP ID: ENSP00000474130
MGKEPWVPDSVDMTSAMARGAYGRPGSDFCHGTEGKDLPSEHNVSVEGVAQDRSPEATLCPQKTCPCDICGLRLKDILHLAEHQTTHPRQKPFVCEAYVKGSEFSANLPRKQVQQNVHNPIRTEEGQASPVKTCRDHTSDQLSTCREGGKDFVATAGFLQCEVTPSDGEPHEATEGVVDFHIALRHNKCCESGDAFNNKSTLVQHQRIHSRERPYECSKCGIFFTYAADLTQHQKVHNRGKPYECCECGKFFSQHSSLVKHRRVHTGESPHVCGDCGKFFSRSSNLIQHKRVHTGEKPYECSDCGKFFSQRSNLIHHKRVHTGRSAHECSECGKSFNCNSSLIKHWRVHTGERPYKCNECGKFFSHIASLIQHQIVHTGERPHGCGECGKAFSRSSDLMKHQRVHTGERPYECNECGKLFSQSSSLNSHRRLHTGERPYQCSECGKFFNQSSSLNNHRRLHTGERPYECSECGKTFRQRSNLRQHLKVHKPDRPYECSECGKAFNQRPTLIRHQKIHIRERSMENVLLPCSQHTPEISSENRPYQGAVNYKLKLVHPSTHPGEVP

SEQ ID NO: 101410 - protein, 406 aa, Homo sapiens
  Payload ID: 20207
  Gene Name: zinc finger protein 793
  Uniprot ID: Q6ZN11
  ENSP ID: ENSP00000396402
MIEYQIPVSFKDVVVGFTQEEWHRLSPAQRALYRDVMLETYSNLVSVGYEGTKPDVILRLEQEEAPWIGEAACPGCHCWEDIWRVNIQRKRRQDMLLRPGAAISKKTLPKEKSCEYNKFGKISLLSTDLFSSIQSPSNWNPCGKNLNHNLDLIGFKRNCAKKQDECYAYGKLLQRINHGRRPNGEKPRGCSHCEKAFTQNPALMYKPAVSDSLLYKRKRVPPTEKPHVCSECGKAFCYKSEFIRHQRSHTGEKPYGCTDCGKAFSHKSTLIKHQRIHTGVRPFECFFCGKAFTQKSHRTEHQRTHTGERPFVCSECGKSFGEKSYLNVHRKMHTGERPYRCRECGKSFSQKSCLNKHWRTHTGEKPYGCNECGKAFYQKPNLSRHQKIHARKNAYRNENLIIVGNT

SEQ ID NO: 101411 - protein, 305 aa, Homo sapiens [sequence omitted]

SEQ ID NO: 101412 - protein, 83 aa, Homo sapiens
  Payload ID: 20207
  Gene Name: zinc finger protein 793
  ENSP ID: ENSP00000465900
  MOD_RES (1)..(1): Any amino acid
XSFKDVVVGFTQEEWHRLSPAQRALYRDVMLETYSNLVSVGYEGTKPDVILRLEQEEAPWIGEAACPGCHCWALKVLRELQPR

SEQ ID NO: 101413 - protein, 59 aa, Homo sapiens
  Payload ID: 20207
  Gene Name: zinc finger protein 793
  ENSP ID: ENSP00000466509
  MOD_RES (1)..(1): Any amino acid
XYEGTKPDVILRLEQEEAPWIGEAACPGCHCWVAVPFYITTSNAQGFQFLHNLAIHHLL

SEQ ID NO: 101414 - protein, 131 aa, Homo sapiens
  Payload ID: 20207
  Gene Name: zinc finger protein 793
  ENSP ID: ENSP00000466645
MIEYQIPVSFKDVVVGFTQEEWHRLSPAQRALYRDVMLETYSNLVSVGYEGTKPDVILRLEQEEAPWIGEAACPGCHCWGKCDKSSKRGTEGGWHLWNFVQHSSLKSLESPPRASATLMTLQPPCNPTAHI

SEQ ID NO: 101415 - protein, 138 aa, Homo sapiens
  Payload ID: 20207
  Gene Name: zinc finger protein 793
  ENSP ID: ENSP00000466738
MIEYQIPVSFKDVVVGFTQEEWHRLSPAQRALYRDVMLETYSNLVSVGYEGTKPDVILRLEQEEAPWIGEAACPGCHCWEDIWRVNIQRKRRQDMLLRPGAAISKKTLPKEKSCEYNKFGKISLLSTDLFSSIQSPTW

SEQ ID NO: 101416 - protein, 93 aa, Homo sapiens
  Payload ID: 20207
  Gene Name: zinc finger protein 793
  ENSP ID: ENSP00000467919
MIEYQIPVSFKDVVVGFTQEEWHRLSPAQRALYRDVMLETYSNLVSVGYEGTKPDVILRLEQEEAPWIGEAACPGCHCWGISKLWPTDWPPAL

SEQ ID NO: 101417 - protein, 53 aa, Homo sapiens
  Payload ID: 20207
  Gene Name: zinc finger protein 793
  ENSP ID: ENSP00000468286
MIEYQIPVSFKDVVVGFTQEEWHRLSPAQRALYRDVMLETYSNLVSVGYEGTK

SEQ ID NO: 101418 - protein, 406 aa, Homo sapiens; identical to SEQ ID NO: 101410
  Payload ID: 20207
  Gene Name: zinc finger protein 793
  Uniprot ID: Q6ZN11
  ENSP ID: ENSP00000468605

SEQ ID NO: 101419 - protein, 361 aa, Homo sapiens
  Payload ID: 20207
  Gene Name: zinc finger protein 793
  ENSP ID: ENSP00000487183
MIEYQIPVSFKDVVVGFTQEEWHRLSPAQRALYRDVMLETYSNLVSVGYEGTKPDVILRLEQEEAPWIGEAACPGCHCWEDIWRVNIQRKRRQDMLLRPGAAISKKTLPKEKSCEYNKFGKISLLSTDLFSSIQSPSNWNPCGKNLNHNLDLIGFKRNCAKKQDECYAYGKLLQRINHGRRPNGEKPRGCSHCEKAFTQNPALMYKPAVSDSLLYKRKRVPPTEKPHVCSECGKAFCYKSEFIRHQRSHTGEKPYGCTDCGKAFSHKSTLIKHQRIHTGVRPFECFFCGKAFTQKSHRTEHQRTHTGERPFVCSECGKSFGEKSYLNVHRKMHTGERPYRCRECGKSFSQKSCLNKHWRTH

SEQ ID NO: 101420 - protein, 643 aa, Homo sapiens
  Payload ID: 20208
  Gene Name: zinc finger protein 799
  Uniprot ID: Q96GE5
  ENSP ID: ENSP00000411084
MASVALEDVAVNFTREEWALLGPCQKNLYKDVMQETIRNLDCVGMKWKDQNIEDQYRYPRKNLRCRMLERFVESKDGTQCGETSSQIQDSIVTKNTLPGVGPYESRMSGEVIMGHSSLNCYIRVGAGHKPYEYHECGEKPDTHKQRGKAFSYHNSLQTHERLHTGKKPYNCKECGKSFSSLGNLQRHMAVQRGDGPYKCKLCGKAFFWPSLLHMHERTHTGEKPYECKQCSKAFSFYSSYLRHERTHTGEKLYECKQCSKAFPDYSSCLRHERTHTGKKPYTCKQCGKAFSASTSLRRHETTHTDEKPYACQQCGKAFHHLGSFQRHMVMHTRDGPHKCKICGKGFDCPSSLKSHERTHTGEKLYECKQCGKALSHSSSFRRHMTMHTGDGPHKCKICGKAFVYPSVFQRHEKTHTAEKPYKCKQCGKAYRISSSLRRHETTHTGEKPYKCKCGKAFIDFYSFQNHKTTHAGEKPYECKECGKAFSCFQYLSQHRRTHTGEKPYECNTCKKAFSHFGNLKVHERIHSGEKPYECKECGKAFSWLTCFLRHERIHMREKPYECQQCGKAFTHSRFLQGHEKTHTGENPYECKECGKAFASLSSLHRHKKTHWKKTHTGENPYGCKECGKAFASLSSLHRHKKTH

SEQ ID NO: 101421 - protein, 611 aa, Homo sapiens
  Payload ID: 20208
  Gene Name: zinc finger protein 799
  ENSP ID: ENSP00000415278
MQETIRNLDCVGMKWKDQNIEDQYRYPRKNLRCRMLERFVESKDGTQCGETSSQIQDSIVTKNTLPGVGPYESRMSGEVIMGHSSLNCYIRVGAGHKPYEYHECGEKPDTHKQRGKAFSYHNSLQTHERLHTGKKPYNCKECGKSFSSLGNLQRHMAVQRGDGPYKCKLCGKAFFWPSLLHMHERTHTGEKPYECKQCSKAFSFYSSYLRHERTHTGEKLYECKQCSKAFPDYSSCLRHERTHTGKKPYTCKQCGKAFSASTSLRRHETTHTDEKPYACQQCGKAFHHLGSFQRHMVMHTRDGPHKCKICGKGFDCPSSLKSHERTHTGEKLYECKQCGKALSHSSSFRRHMTMHTGDGPHKCKICGKAFVYPSVFQRHEKTHTAEKPYKCKQCGKAYRISSSLRRHETTHTGEKPYKCKCGKAFIDFYSFQNHKTTHAGEKPYECKECGKAFSCFQYLSQHRRTHTGEKPYECNTCKKAFSHFGNLKVHERIHSGEKPYECKECGKAFSWLTCFLRHERIHMREKPYECQQCGKAFTHSRFLQGHEKTHTGENPYECKECGKAFASLSSLHRHKKTHWKKTHTGENPYGCKECGKAFASLSSLHRHKKTH

SEQ ID NO: 101422 - protein, 91 aa, Homo sapiens
  Payload ID: 20208
  Gene Name: zinc finger protein 799
  ENSP ID: ENSP00000471169
MRLTLLSRLECSGTISAHCNLRLLRSSDSPASASRVAGTTGLSGFRGCGCELHPRRVGFAGSLSEESLQRCDAGNHQEPGLCRNEMERPEH

SEQ ID NO: 101423 - protein, 575 aa, Homo sapiens
  Payload ID: 20209
  Gene Name: zinc finger protein 8
  Uniprot ID: P17098
  ENSP ID: ENSP00000477716
MDPEDEGVAGVMSVGPPAARLQEPVTFRDVAVDFTQEEWGQLDPTQRILYRDVMLETFGHLLSIGPELPKPEVISQLEQGTELWVAERGTTQGCHPAWEPRSESQASRKEEGLPEEEPSHVTGREGFPTDAPYPTTLGKDRECQSQSLALKEQNNLKQLEFGLKEAPVQDQGYKTLRLRENCVLSSSPNPFPEISRGEYLYTYDSQITDSEHNSSLVSQQTGSPGKQPGENSDCHRDSSQAIPITELTKSQVQDKPYKCTDCGKSFNHNAHLTVHKRIHTGERPYMCKECGKAFSQNSSLVQHERIHTGDKPYKCAECGKSFCHSTHLTVHRRIHTGEKPYECQDCGRAFNQNSSLGRHKRTHTGEKPYTCSVCGKSFSRTTCLFLHLRTHTEERPYECNHCGKGFRHSSSLAQHQRKHAGEKPFECRQRLIFEQTPALTKHEWTEALGCDPPLSQDERTHRSDRPFKCNQCGKCFIQSSHLIRHQITHTREEQPHGRSRRREQSSSRNSHLVQHQHPNSRKSSAGGAKAGQPESRALALFDIQKIMQEKNPVHVIGVEEPSVGASMLFDIREST

SEQ ID NO: 101424 - protein, 273 aa, Homo sapiens
  Payload ID: 20210
  Gene Name: zinc finger protein 80
  Uniprot ID: P51504
  ENSP ID: ENSP00000309812
MSPKRDGLGTGDGLHSQVLQEQVSTGDNLHECDSQGPSKDTLVREGKTYKCKECGSVFNKNSLLVRHQQIHTGVKPYECQECGKAFPEKVDFVRPMRIHTGEKPCKCVECGKVFNRRSHLLCYRQIHTGEKPYECSECGKTFSYHSVFIQHRVTHTGEKLFGCKECGKTFYYNSSLTRHMKIHTGEKPCKCSECGKTFTYRSVFFRHSMTHTAGKPYECKECGKGFYYSYSLTRHTRSHTGEKPYECLEHRKDFGYHSAFAQQSKIHSGGKNL

SEQ ID NO: 101425 - protein, 273 aa, Homo sapiens; identical to SEQ ID NO: 101424
  Payload ID: 20210
  Gene Name: zinc finger protein 80
  Uniprot ID: P51504
  ENSP ID: ENSP00000417192

SEQ ID NO: 101426 - protein, 273 aa, Homo sapiens; identical to SEQ ID NO: 101424
  Payload ID: 20210
  Gene Name: zinc finger protein 80
  Uniprot ID: P51504
  ENSP ID: ENSP00000483565

SEQ ID NO: 101427 - protein, 664 aa, Homo sapiens
  Payload ID: 20211
  Gene Name: zinc finger protein 800
  Uniprot ID: Q2TB10
  ENSP ID: ENSP00000265827
MPLRDKYCQTDHHHHGCCEPVYILEPGDPPLLQQPLQTSKSGIQQIIECFRSGTKQLKHILLKDVDTIFECKLCRSLFRGLPNLITHKKFYCPPSLQMDDNLPDVNDKQSQAINDLLEAIYPSVDKREYIIKLEPIETNQNAVFQYISRTDNPIEVTESSSTPEQTEVQIQETSTEQSKTVPVTDTEVETVEPPPVEIVTDEVAPTSDEQPQESQADLETSDNSDFGHQLICCLCRKEFNSRRGVRRHIRKVHKKKMEELKKYIETRKNPNQSSKGRSKNVLVPLSRSCPVCCKSFATKANVRRHFDEVHRGLRRDSITPDIATKPGQPLFLDSISPKKSFKTRKQKSSSKAEYNLTACKCLLCKRKYSSQIMLKRHMQIVHKITLSGTNSKREKGPNNTANSSEIKVKVEPADSVESSPPSITHSPQNELKGTNHSNEKKNTPAAQKNKVKQDSESPKSTSPSAAGGQQKTRKPKLSAGFDFKQLYCKLCKRQFTSKQNLTKHIELHTDGNNIYVKFYKCPLCTYETRRKRDVIRHITVVHKKSSRYLGKITASLEIRAIKKPIDFVLNKVAKRGPSRDEAKHSDSKHDGTSNSPSKKYEVADVGIEVKVTKNFSLHRCNKCGKAFAKKTYLEHHKKTHKANASNSPEGNKTKGRSTRSKALV

SEQ ID NO: 101428 - protein, 664 aa, Homo sapiens; identical to SEQ ID NO: 101427
  Payload ID: 20211
  Gene Name: zinc finger protein 800
  Uniprot ID: Q2TB10
  ENSP ID: ENSP00000376988

SEQ ID NO: 101429 - protein, 664 aa, Homo sapiens; identical to SEQ ID NO: 101427
  Payload ID: 20211
  Gene Name: zinc finger protein 800
  Uniprot ID: Q2TB10
  ENSP ID: ENSP00000376989

SEQ ID NO: 101430 - protein, 98 aa, Homo sapiens
  Payload ID: 20211
  Gene Name: zinc finger protein 800
  ENSP ID: ENSP00000389776
MPLRDKYCQTDHHHHGCCEPVYILEPGDPPLLQQPLQTSKSGIQQIIECFRSGTKQLKHILLKDVDTIFECKLCRSLFRGLPNLITHKKFYCPPSLQM

SEQ ID NO: 101431 - protein, 130 aa, Homo sapiens
  Payload ID: 20211
  Gene Name: zinc finger protein 800
  ENSP ID: ENSP00000401109
MPLRDKYCQTDHHHHGCCEPVYILEPGDPPLLQQPLQTSKSGIQQIIECFRSGTKQLKHILLKDVDTIFECKLCRSLFRGLPNLITHKKFYCPPSLQMDDNLPDVNDKQSQAINDLLEAIYPSVDKREYI

SEQ ID NO: 101432 - protein, 242 aa, Homo sapiens
  Payload ID: 20211
  Gene Name: zinc finger protein 800
  ENSP ID: ENSP00000403945
MPLRDKYCQTDHHHHGCCEPVYILEPGDPPLLQQPLQTSKSGIQQIIECFRSGTKQLKHILLKDVDTIFECKLCRSLFRGLPNLITHKKFYCPPSLQMDDNLPDVNDKQSQAINDLLEAIYPSVDKREYIIKLEPIETNQNAVFQYISRTDNPIEVTESSSTPEQTEVQIQETSTEQSKTVPVTDTEVETVEPPPVEIVTDEVAPTSDEQPQESQADLETSDNSDFGHQLICCLCRKEFNSR

SEQ ID NO: 101433 - protein, 336 aa, Homo sapiens
  Payload ID: 20211
  Gene Name: zinc finger protein 800
  ENSP ID: ENSP00000480871
MPLRDKYCQTDHHHHGCCEPVYILEPGDPPLLQQPLQTSKSGIQQIIECFRSGTKQLKHILLKDVDTIFECKLCRSLFRGLPNLITHKKFYCPPSLQMDDNLPDVNDKQSQAINDLLEAIYPSVDKREYIIKLEPIETNQNAVFQYISRTDNPIEVTESSSTPEQTEVQIQETSTEQSKTVPVTDTEVETVEPPPVEIVTDEVAPTSDEQPQESQADLETSDNSDFGHQLICCLCRKEFNSRRGVRRHIRKVHKKKMEELKKYIETRKNPNQSSKGRSKNVLVPLSRSCPVCCKSFATKANVRRHFDEVHRGLRRDSITPDIATKPGQPLFLDSIS

SEQ ID NO: 101434 - protein, 1209 aa, Homo sapiens
  Payload ID: 20212
  Gene Name: zinc finger protein 804A
  Uniprot ID: Q7Z570
  ENSP ID: ENSP00000303252
MECYYIVISSTHLSNGHFRNIKGVFRGPLSKNGNKTLDYAEKENTIAKALEDLKANFYCELCDKQYYKHQEFDNHINSYDHAHKQRLKELKQREFARNVASKSRKDERKQEKALQRLHKLAELRKETVCAPGSGPMFKSTTVTVRENCNEISQRVVVDSVNNQQDFKYTLIHSEENTKDATTVAEDPESANNYTAKNNQVGDQAQGIHRHKIGFSFAFPKKASVKLESSAAAFSEYSDDASVGKGFSRKSRFVPSACHLQQSSPTDVLLSSEEKTNSFHPPEAMCRDKETVQTQEIKEVSSEKDALLLPSFCKFQLQLSSDADNCQNSVPLADQIPLESVVINEDIPVSGNSFELLGNKSTVLDMSNDCISVQATTEENVKHNEASTTEVENKNGPETLAPSNTEEVNITIHKKTNFCKRQCEPFVPVLNKHRSTVLQWPSEMLVYTTTKPSISYSCNPLCFDFKSTKVNNNLDKNKPDLKDLCSQQKQEDICMGPLSDYKDVSTEGLTDYEIGSSKNKCSQVTPLLADDILSSSCDSGKNENTGQRYKNISCKIRETEKYNFTKSQIKQDTLDEKYNKIRLKETHEYWFHKSRRKKKRKKLCQHHHMEKTKESETRCKMEAENSYTENAGKYLLEPISEKQYLAAEQLLDSHQLLDKRPKSESISLSDNEEMCKTWNTEYNTYDTISSKNHCKKNTILLNGQSNATMIHSGKHNLTYSRTYCCWKTKMSSCSQDHRSLVLQNDMKHMSQNQAVKRGYNSVMNESERFYRKRRQHSHSYSSDESLNRQNHLPEEFLRPPSTSVAPCKPKKKRRRKRGRFHPGFETLELKENTDYPVKDNSSLNPLDRLISEDKKEKMKPQEVAKIERNSEQTNQLRNKLSFHPNNLLPSETNGETEHLEMETTSGELSDVSNDPTTSVCVASAPTKEAIDNTLLEHKERSENINLNEKQIPFQVPNIERNFRQSQPKSYLCHYELAEALPQGKMNETPTEWLRYNSGILNTQPPLPFKEAHVSGHTFVTAEQILAPLALPEQALLIPLENHDKFKNVPCEVYQHILQPNMLANKVKFTFPPAALPPPSTPLQPLPLQQSLCSTSVTTIHHTVLQQHAAAAAAAAAAAAAGTFKVLQPHQQFLSQIPALTRTSLPQLSVGPVGPRLCPGNQPTFVAPPQMPIIPASVLHPSHLAFPSLPHALFPSLLSPHPTVIPLQPLF

SEQ ID NO: 101435 - protein, 1124 aa, Homo sapiens
  Payload ID: 20212
  Gene Name: zinc finger protein 804A
  ENSP ID: ENSP00000483032
RLKELKQREFARNVASKSRKDERKQEKALQRLHKLAELRKETVCAPGSGPMFKSTTVTVRENCNEISQRVVVDSVNNQQDFKYTLIHSEENTKDATTVAEDPESANNYTAKNNQVGDQAQGIHRHKIGFSFAFPKKASVKLESSAAAFSEYSDDASVGKGFSRKSRFVPSACHLQQSSPTDVLLSSEEKTNSFHPPEAMCRDKETVQTQEIKEVSSEKDALLLPSFCKFQLQLSSDADNCQNSVPLADQIPLESVVINEDIPVSGNSFELLGNKSTVLDMSNDCISVQATTEENVKHNEASTTEVENKNGPETLAPSNTEEVNITIHKKTNFCKRQCEPFVPVLNKHRSTVLQWPSEMLVYTTTKPSISYSCNPLCFDFKSTKVNNNLDKNKPDLKDLCSQQKQEDICMGPLSDYKDVSTEGLTDYEIGSSKNKCSQVTPLLADDILSSSCDSGKNENTGQRYKNISCKIRETEKYNFTKSQIKQDTLDEKYNKIRLKETHEYWFHKSRRKKKRKKLCQHHHMEKTKESETRCKMEAENSYTENAGKYLLEPISEKQYLAAEQLLDSHQLLDKRPKSESISLSDNEEMCKTWNTEYNTYDTISSKNHCKKNTILLNGQSNATMIHSGKHNLTYSRTYCCWKTKMSSCSQDHRSLVLQNDMKHMSQNQAVKRGYNSVMNESERFYRKRRQHSHSYSSDESLNRQNHLPEEFLRPPSTSVAPCKPKKKRRRKRGRFHPGFETLELKENTDYPVKDNSSLNPLDRLISEDKKEKMKPQEVAKIERNSEQTNQLRNKLSFHPNNLLPSETNGETEHLEMETTSGELSDVSNDPTTSVCVASAPTKEAIDNTLLEHKERSENINLNEKQIPFQVPNIERNFRQSQPKSYLCHYELAEALPQGKMNETPTEWLRYNSGILNTQPPLPFKEAHVSGHTFVTAEQILAPLALPEQALLIPLENHDKFKNVPCEVYQHILQPNMLANKVKFTFPPAALPPPSTPLQPLPLQQSLCSTSVTTIHHTVLQQHAAAAAAAAAAAAAGTFKVLQPHQQFLSQIPALTRTSLPQLSVGPVGPRLCPGNQPTFVAPPQMPIIPASVLHPSHLAFPSLPHALFPSLLSPHPTVIPLQPLF

SEQ ID NO: 101436 - protein, 1349 aa, Homo sapiens
  Payload ID: 20213
  Gene Name: zinc finger protein 804B
  Uniprot ID: A4D1E1
  ENSP ID: ENSP00000329638
MACYLVISSRHLSNGHYRGIKGVFRGPLCKNGSPSPDFAEKKSTAKALEDVKANFYCELCDKQYHKHQEFDNHINSYDHAHKQRLKELKQREFARNVASKSWKDEKKQEKALKRLHQLAELRQQSECVSGNGPAYKAPRVAIEKQLQQGIFPIKNGRKVSCMKSALLLKGKNLPRIISDKQRSTMPNRHQLQSDRRCLFGNQVLQTSSDLSNANHRTGVSFTFSKKVHLKLESSASVFSENTEETHDCNKSPIYKTKQTADKCKCCRFANKDTHLTKEKEVNISPSHLESVLHNTISINSKILQDKHDSIDETLEDSIGIHASFSKSNIHLSDVDFTPTSREKETRNTLKNTLENCVNHPCQANASFSPPNIYNHSDARISECLDEFSSLEPSEQKSTVHLNPNSRIENREKSLDKTERVSKNVQRLVKEACTHNVASKPLPFLHVQSKDGHTTLQWPTELLLFTKTEPCISYGCNPLYFDFKLSRNTKEDHNLEDLKTELGKKPLELKTKRESQVSGLTEDQQKLIQEDYQYPKPKTMIANPDWEKFQRKYNLDYSDSEPNKSEYTFSANDLEMKNPKVPLYLNTSLKDCAGKNNSSENKLKEASRAHWQGCRKAVLNDIDEDLSFPSYISRFKKHKLIPCSPHLEFEDERQFNCKSSPCTVGGHSDHGKDFSVILKSNHISMTSKVSGCGNQRYKRYSPQSCLSRYSSSLDTSPSSMSSLRSTCSSHRFNGNSRGNLLCFHKREHHSVERHKRKCLKHNCFYLSDDITKSSQMQSEPQKERNCKLWESFKNEKYSKRRYCHCRERQKLGKNQQQFSGLKSTRIIYCDSNSQISCTGSSKKPPNCQGTQHDRLDSYSIEKMYYLNKSKRNQESLGSPHICDLGKVRPMKCNSGNISCLLKNCSSGPSETTESNTAEGERTPLTAKILLERVQAKKCQEQSSNVEISSNSCKSELEAPSQVPCTIQLAPSGCNRQALPLSEKIQYASESRNDQDSAIPRTTEKDKSKSSHTNNFTILADTDCDNHLSKGIIHLVTESQSLNIKRDATTKEQSKPLISEIQPFIQSCDPVPNEFPGAFPSNKYTGVTDSTETQEDQINLDLQDVSMHINHVEGNINSYYDRTMQKPDKVEDGLEMCHKSISPPLIQQPITFSPDEIDKYKILQLQAQQHMQKQLLSKHLRVLPAAGPTAFSPASTVQTVPVHQHTSITTIHHTFLQHFAVSASLSSHSSHLPIAHLHPLSQAHFSPISFSTLTPTIIPAHPTFLAGHPLHLVAATPFHPSHITLQPLPPTAFIPTLFGPHLNPATTSIIHLNPLIQPVFQGQDFCHHSCSSQMQQLNEVKEALNVSTHLN

SEQ ID NO: 101437 - protein, 1266 aa, Homo sapiens
  Payload ID: 20213
  Gene Name: zinc finger protein 804B
  ENSP ID: ENSP00000478506
RLKELKQREFARNVASKSWKDEKKQEKALKRLHQLAELRQQSECVSGNGPAYKAPRVAIEKQLQQGIFPIKNGRKVSCMKSALLLKGKNLPRIISDKQRSTMPNRHQLQSDRRCLFGNQVLQTSSDLSNANHRTGVSFTFSKKVHLKLESSASVFSENTEETHDCNKSPIYKTKQTADKCKCCRFANKDTHLTKEKEVNISPSHLESVLHNTISINSKILQDKHDSIDETLEDSIGIHASFSKSNIHLSDVDFTPTSREKETRNTLKNTLENCVNHPCQANASFSPPNIYNHSDARISECLDEFSSLEPSEQKSTVHLNPNSRIENREKSLDKTERVSKNVQRLVKEACTHNVASKPLPFLHVQSKDGHTTLQWPTELLLFTKTEPCISYGCNPLYFDFKLSRNTKEDHNLEDLKTELGKKPLELKTKRESQVSGLTEDQQKLIQEDYQYPKPKTMIANPDWEKFQRKYNLDYSDSEPNKSEYTFSANDLEMKNPKVPLYLNTSLKDCAGKNNSSENKLKEASRAHWQGCRKAVLNDIDEDLSFPSYISRFKKHKLIPCSPHLEFEDERQFNCKSSPCTVGGHSDHGKDFSVILKSNHISMTSKVSGCGNQRYKRYSPQSCLSRYSSSLDTSPSSMSSLRSTCSSHRFNGNSRGNLLCFHKREHHSVERHKRKCLKHNCFYLSDDITKSSQMQSEPQKERNCKLWESFKNEKYSKRRYCHCRERQKLGKNQQQFSGLKSTRIIYCDSNSQISCTGSSKKPPNCQGTQHDRLDSYSIEKMYYLNKSKRNQESLGSPHICDLGKVRPMKCNSGNISCLLKNCSSGPSETTESNTAEGERTPLTAKILLERVQAKKCQEQSSNVEISSNSCKSELEAPSQVPCTIQLAPSGCNRQALPLSEKIQYASESRNDQDSAIPRTTEKDKSKSSHTNNFTILADTDCDNHLSKGIIHLVTESQSLNIKRDATTKEQSKPLISEIQPFIQSCDPVPNEFPGAFPSNKYTGVTDSTETQEDQINLDLQDVSMHINHVEGNINSYYDRTMQKPDKVEDGLEMCHKSISPPLIQQPITFSPDEIDKYKILQLQAQQHMQKQLLSKHLRVLPAAGPTAFSPASTVQTVPVHQHTSITTIHHTFLQHFAVSASLSSHSSHLPIAHLHPLSQAHFSPISFSTLTPTIIPAHPTFLAGHPLHLVAATPFHPSHITLQPLPPTAFIPTLFGPHLNPATTSIIHLNPLIQPVFQGQDFCHHSCSSQMQQLNEVKEALNVSTHLN

SEQ ID NO: 101438 - protein, 494 aa, Homo sapiens
  Payload ID: 20214
  Gene Name: zinc finger protein 805
  Uniprot ID: Q5CZA5
  ENSP ID: ENSP00000365414
MQGERLRPGLDSQKEKLPGKMSPKHDGLGTADSVCSRIIQDRVSLGDDVHDCDSHGSGKNPVIQEEENIFKCNECEKVFNKKRLLARHERIHSGVKPYECTECGKTFSKSTYLLQHHMVHTGEKPYKCMECGKAFNRKSHLTQHQRIHSGEKPYKCSECGKAFTHRSTFVLHNRSHTGEKPFVCKECGKAFRDRPGFIRHYIIHSGENPYECFECGKVFKHRSYLMWHQQTHTGEKPYECSECGKAFCESAALIHHYVIHTGEKPFECLECGKAFNHRSYLKRHQRIHTGEKPYVCSECGKAFTHCSTFILHKRAHTGEKPFECKECGKAFSNRADLIRHFSIHTGEKPYECMECGKAFNRRSGLTRHQRIHSGEKPYECIECGKTFCWSTNLIRHSIIHTGEKPYECSECGKAFSRSSSLTQHQRMHTGRNPISVTDVGRPFTSGQTSVNIQELLLGKNFLNVTTEENLLQEEASYMASDRTYQRETPQVSSL

SEQ ID NO: 101439 - protein, 627 aa, Homo sapiens
  Payload ID: 20214
  Gene Name: zinc finger protein 805
  Uniprot ID: Q5CZA5
  ENSP ID: ENSP00000412999
MAMALTDPAQVSVTFDDVAVTFTQEEWGQLDLAQRTLYQEVMLENCGLLVSLGCPVPRPELIYHLEHGQEPWTRKEDLSQGTCPGDKGKPKSTEPTTCELALSEGISFWGQLTQGASGDSQLGQPKDQDGFSEMQGERLRPGLDSQKEKLPGKMSPKHDGLGTADSVCSRIIQDRVSLGDDVHDCDSHGSGKNPVIQEEENIFKCNECEKVFNKKRLLARHERIHSGVKPYECTECGKTFSKSTYLLQHHMVHTGEKPYKCMECGKAFNRKSHLTQHQRIHSGEKPYKCSECGKAFTHRSTFVLHNRSHTGEKPFVCKECGKAFRDRPGFIRHYIIHSGENPYECFECGKVFKHRSYLMWHQQTHTGEKPYECSECGKAFCESAALIHHYVIHTGEKPFECLECGKAFNHRSYLKRHQRIHTGEKPYVCSECGKAFTHCSTFILHKRAHTGEKPFECKECGKAFSNRADLIRHFSIHTGEKPYECMECGKAFNRRSGLTRHQRIHSGEKPYECIECGKTFCWSTNLIRHSIIHTGEKPYECSECGKAFSRSSSLTQHQRMHTGRNPISVTDVGRPFTSGQTSVNIQELLLGKNFLNVTTEENLLQEEASYMASDRTYQRETPQVSSL

SEQ ID NO: 101440 - protein, 903 aa, Homo sapiens
  Payload ID: 20215
  Gene Name: zinc finger protein 808
  Uniprot ID: Q8N4W9
  ENSP ID: ENSP00000352846
MLREEAAQKRKGKESGMALPQGRLTFRDVAIEFSLAEWKFLNPAQRALYREVMLENYRNLEAVDISSKHMMKEVLSTGQGNREVIHTGTLQRHQSYHIGDFCFQEIEKEIHNIEFQCQEDERNGHEAPTTKIKKLTGSTDQHDHRHAGNKPIKDQLGSSFYSHLPELHIFQIKGEIANQLEKSTSDASSVSTSQRISCRPQIHISNNYGNNPLNSSLLPQKQEVHMREKSFPCNESGKAFNCSSLLRKHQIPHLGDKQYKCDVCGKLFNHKQYLACHRRCHTGEKPYKCKECGKSFSYKSSLTCHHRLHTGVKPYKCNECGKVFRQNSALVIHKAIHTGEKPYKCNECGKAFNQQSHLSRHQRLHTGVKPYKCKICEKAFACHSYLANHTRIHSGEKTYKCNECGKAFNHQSSLARHHILHTGEKPYKCEECDKVFSQKSTLERHKRIHTGEKPYKCKVCDTAFTCNSQLARHRRIHTGEKTYKCNECRKTFSRRSSLLCHRRLHSGEKPYKCNQCGNTFRHRASLVYHRRLHTLEKSYKCTVCNKVFMRNSVLAVHTRIHTAKKPYKCNECGKAFNQQSHLSRHRRLHTGEKPYKCEACDKVFGQKSALESHKRIHTGEKPYRCQVCDTAFTWNSQLARHTRIHTGEKTYKCNECGKTFSYKSSLVWHRRLHGGEKSYKCKVCDKAFVCRSYVAKHTRIHSGMKPYKCNECSKTFSNRSSLVCHRRIHSGEKPYKCSECSKTFSQKATLLCHRRLHSGEKPYKCNDCGNTFRHWSSLVYHRRLHTGEKSYKCTVCDKAFVRNSYLARHIRIHTAEKPYKCNECGKAFNEQSHLSRHHRIHTGEKPYKCEACDKVFSRKSHLKRHRIIHTGEKPYKCNECGKAFSDRSTLIHHQAIHGIGKFD

SEQ ID NO: 101441 - protein, 83 aa, Homo sapiens
  Payload ID: 20215
  Gene Name: zinc finger protein 808
  ENSP ID: ENSP00000417727
MLREEAAQKRKGKESGMALPQGRLTFRDVAIEFSLAEWKFLNPAQRALYREVMLENYRNLEAVDISSKHMMKEVLSTGQGNRE

SEQ ID NO: 101442 - protein, 102 aa, Homo sapiens
  Payload ID: 20215
  Gene Name: zinc finger protein 808
  ENSP ID: ENSP00000418528
MMKEVLSTGQGNREVIHTGTLQRHQSYHIGDFCFQEIEKEIHNIEFQCQEDERNGHEAPTTKIKKLTGSTDQHDHRHAGNKPIKDQLGSSFYSHLPELHIFQ

SEQ ID NO: 101443 - protein, 173 aa, Homo sapiens
  Payload ID: 20215
  Gene Name: zinc finger protein 808
  ENSP ID: ENSP00000418696
MLREEAAQKRKGKESGMALPQGRLTFRDVAIEFSLAEWKFLNPAQRALYREVMLENYRNLEAVDISSKHMMKEVLSTGQGNREVIHTGTLQRHQSYHIGDFCFQEIEKEIHNIEFQCQEDERNGHEAPTTKIKKLTGSTDQHDHRHAGNKPIKDQLGSSFYSHLPELHIFQIK

SEQ ID NO: 101444 - protein, 180 aa, Homo sapiens
  Payload ID: 20215
  Gene Name: zinc finger protein 808
  ENSP ID: ENSP00000419291
MLREEAAQKRKGKESGMALPQGRLTFRDVAIEFSLAEWKFLNPAQRALYREVMLENYRNLEAVDISSKHMMKEVLSTGQGNREVIHTGTLQRHQSYHIGDFCFQEIEKEIHNIEFQCQEDERNGHEAPTTKIKKLTGSTDQHDHRHAGNKPIKDQLGSSFYSHLPELHIFQIKGEIANQL

SEQ ID NO: 101445 - protein, 834 aa, Homo sapiens
  Payload ID: 20215
  Gene Name: zinc finger protein 808
  Uniprot ID: Q8N4W9
  ENSP ID: ENSP00000420522
MMKEVLSTGQGNREVIHTGTLQRHQSYHIGDFCFQEIEKEIHNIEFQCQEDERNGHEAPTTKIKKLTGSTDQHDHRHAGNKPIKDQLGSSFYSHLPELHIFQIKGEIANQLEKSTSDASSVSTSQRISCRPQIHISNNYGNNPLNSSLLPQKQEVHMREKSFPCNESGKAFNCSSLLRKHQIPHLGDKQYKCDVCGKLFNHKQYLACHRRCHTGEKPYKCKECGKSFSYKSSLTCHHRLHTGVKPYKCNECGKVFRQNSALVIHKAIHTGEKPYKCNECGKAFNQQSHLSRHQRLHTGVKPYKCKICEKAFACHSYLANHTRIHSGEKTYKCNECGKAFNHQSSLARHHILHTGEKPYKCEECDKVFSQKSTLERHKRIHTGEKPYKCKVCDTAFTCNSQLARHRRIHTGEKTYKCNECRKTFSRRSSLLCHRRLHSGEKPYKCNQCGNTFRHRASLVYHRRLHTLEKSYKCTVCNKVFMRNSVLAVHTRIHTAKKPYKCNECGKAFNQQSHLSRHRRLHTGEKPYKCEACDKVFGQKSALESHKRIHTGEKPYRCQVCDTAFTWNSQLARHTRIHTGEKTYKCNECGKTFSYKSSLVWHRRLHGGEKSYKCKVCDKAFVCRSYVAKHTRIHSGMKPYKCNECSKTFSNRSSLVCHRRIHSGEKPYKCSECSKTFSQKATLLCHRRLHSGEKPYKCNDCGNTFRHWSSLVYHRRLHTGEKSYKCTVCDKAFVRNSYLARHIRIHTAEKPYKCNECGKAFNEQSHLSRHHRIHTGEKPYKCEACDKVFSRKSHLKRHRIIHTGEKPYKCNECGKAFSDRSTLIHHQAIHGIGKFD

SEQ ID NO: 101446 - protein, 76 aa, Homo sapiens
  Payload ID: 20215
  Gene Name: zinc finger protein 808
  ENSP ID: ENSP00000479648
MIEARSSVKLHPMQNRRIHTGEKPHKCDDCGKAFTSHSHLVGHQRIHTGQKSCKCHQCGKVFSPRSLLAEHEKIHF

SEQ ID NO: 101447 - protein, 69 aa, Homo sapiens
  Payload ID: 20216
  Gene Name: zinc finger protein 81
  ENSP ID: ENSP00000334641
MPANEDAPQPGEHGSACEVSVSFEDVTVDFSREEWQQLDSTQRRLYQDVMLENYSHLLSVGKDNHPVKL

SEQ ID NO: 101448 - protein, 661 aa, Homo sapiens
  Payload ID: 20216
  Gene Name: zinc finger protein 81
  Uniprot ID: P51508
  ENSP ID: ENSP00000341151
MPANEDAPQPGEHGSACEVSVSFEDVTVDFSREEWQQLDSTQRRLYQDVMLENYSHLLSVGFEVPKPEVIFKLEQGEGPWTLEGEAPHQSCSDGKFGIKPSQRRISGKSTFHSEMEGEDTRDDSLYSILEELWQDAEQIKRCQEKHNKLLSRTTFLNKKILNTEWDYEYKDFGKFVHPSPNLILSQKRPHKRDSFGKSFKHNLDLHIHNKSNAAKNLDKTIGHGQVFTQNSSYSHHENTHTGVKFCERNQCGKVLSLKHSLSQNVKFPIGEKANTCTEFGKIFTQRSHFFAPQKIHTVEKPHELSKCVNVFTQKPLLSIYLRVHRDEKLYICTKCGKAFIQNSELIMHEKTHTREKPYKCNECGKSFFQVSSLLRHQTTHTGEKLFECSECGKGFSLNSALNIHQKIHTGERHHKCSECGKAFTQKSTLRMHQRIHTGERSYICTQCGQAFIQKAHLIAHQRIHTGEKPYECSDCGKSFPSKSQLQMHKRIHTGEKPYICTECGKAFTNRSNLNTHQKSHTGEKSYICAECGKAFTDRSNFNKHQTIHTGEKPYVCADCGRAFIQKSELITHQRIHTTEKPYKCPDCEKSFSKKPHLKVHQRIHTGEKPYICAECGKAFTDRSNFNKHQTIHTGDKPYKCSDCGKGFTQKSVLSMHRNIHT

SEQ ID NO: 101449 - protein, 103 aa, Homo sapiens
  Payload ID: 20216
  Gene Name: zinc finger protein 81
  ENSP ID: ENSP00000366149
MPANEDAPQPGEHGSACEVSVSFEDVTVDFSREEWQQLDSTQRRLYQDVMLENYSHLLSVGFEVPKPEVIFKLEQGEGPWTLEGEAPHQSCSGISTYFVTSTV

SEQ ID NO: 101450 - protein, 661 aa, Homo sapiens; identical to SEQ ID NO: 101448
  Payload ID: 20216
  Gene Name: zinc finger protein 81
  Uniprot ID: P51508
  ENSP ID: ENSP00000366153

SEQ ID NO: 101451 - protein, 454 aa, Homo sapiens
  Payload ID: 20217
  Gene Name: zinc finger protein 812
  Uniprot ID: P0C7V5
  ENSP ID: ENSP00000395629
MAVTDLSHGFFPREPICPFEEKTKIGTMVEDYLANSYQDSVTFDDVAVEFTPEEWALLDTTEKCLYRDVMLENYVNLASVEATVDGNSENCGEVFSEWFCLKTHMRAQNGGNIFEGNCYGKDILSVHKEASIGQELSKFNPCGKVFTLTPDLAAHLGILNARQPYKCKECRKGFKYFASLDNHMGIHIGEKFCEFQECRRAITHSSHLKQCVTVHTGKKSKKTKKHGKSFTNFSQLSAHVKIHKGEKSFECKECGRSFRNSSSFNVHIQIHTGIKPHKYTECGKAFTRSTHLTQHVRTHTGIKPYECKECGQAFTQYTGLAIHIRNHTGEKHYQCKECGKAFNGSSTLTQHKIIHTGEKPYGCVECGKTFITSSYRSKHLKTHHEERPFVCKICGKAFLYSSPLNVHLQTHTREKALICKECGKAFAVSSHLSRHERIHTGEEPYEYKGMNVTI

SEQ ID NO: 101452 - protein, 454 aa, Homo sapiens; identical to SEQ ID NO: 101451
  Payload ID: 20217
  Gene Name: zinc finger protein 812
  Uniprot ID: P0C7V5
  ENSP ID: ENSP00000440451

SEQ ID NO: 101453 - protein, 32 aa, Homo sapiens
  Payload ID: 20217
  Gene Name: zinc finger protein 812
  ENSP ID: ENSP00000465513
MRAQNGGNIFEGNCYGKDILSVHKEASIGQEL

SEQ ID NO: 101454 - protein, 28 aa, Homo sapiens
  Payload ID: 20217
  Gene Name: zinc finger protein 812
  ENSP ID: ENSP00000466817
MAVTDLSHGFFPREPICPFEEKTKIGTM

SEQ ID NO: 101455 - protein, 617 aa, Homo sapiens
  Payload ID: 20218
  Gene Name: zinc finger protein 813
  Uniprot ID: Q6ZN06
  ENSP ID: ENSP00000379684
MALPQGLLTFRDVAIEFSQEEWKCLDPAQRTLYRDVMLENYRNLVSLDISSKCMMKEFSSTAQGNREVIHTGTLQRHESHHTGDFRFQEIDKDIHNLEFQWQEDERNSHEAPMTEIKKLTGSADRYDQRHAGNKPIKDQLGSSFHSHLPELHMFQTQGKIGNQVEKSINDASSISTSQRISCRPKTHISNNYGNNFRNSSLLTQKQEVHMREKSFQCNESGKAFNYSSLLRKHQIIHLGEKQYKCDVCGKVFNRKRNLVCHRRCHTGEKPYRCNECGKTFSQTYSLTCHRRLHTGEKPYKCEECDKAFSFKSNLKRHRRIHAGEKPYKCNECGKTFSQTSSLTCHRRLHTGEKPFKCNECGKTFSRKSSLTCHHRLHTGEKPYKCNECGKTFSQELTLKCHRRLHTGEKPYKCNECGKVFNKKANLARHHRLHSGEKPYKCTECVKTFSRNSALVIHKAIHIGEKRYKCNECGKTFSRISALVIHTAIHTGEKPYKCNECGKGFNRKTHLACHHRLHTGEKPYKCNECGKVFNRKTHLAHHHRLHTGDKPYKCNECGKVFNQKAHLARHHRLHTGEKPYKCNECGKVFNQKANLARHHRLHTGEKPYKFNECGKAFN

SEQ ID NO: 101456 - protein, 146 aa, Homo sapiens
  Payload ID: 20218
  Gene Name: zinc finger protein 813
  ENSP ID: ENSP00000418289
MALPQGLLTFRDVAIEFSQEEWKCLDPAQRTLYRDVMLENYRNLVSLDTGFLLFCLADLKLLPSGDPSTSASETAAITDISSKCMMKEFSSTAQGNREVIHTGTLQRHESHHTGDFRFQEIDKDIHNLEFQWQEDERNSHEAPMTE

SEQ ID NO: 101457 - protein, 125 aa, Homo sapiens
  Payload ID: 20218
  Gene Name: zinc finger protein 813
  ENSP ID: ENSP00000419821
MMKEFSSTAQGNREVIHTGTLQRHESHHTGDFRFQEIDKDIHNLEFQWQEDERNSHEAPMTEIKKLTGSADRYDQRHAGNKPIKDQLGSSFHSHLPELHMFQTQGKIGNQVEKSINDASSISTSQ

SEQ ID NO: 101458 - protein, 855 aa, Homo sapiens
  Payload ID: 20219
  Gene Name: zinc finger protein 814
  Uniprot ID: B7Z6K7
  ENSP ID: ENSP00000410545
MAAAATLRLSAQGTVTFEDVAVNFTWEEWNLLSEAQRCLYRDVTLENLALISSLGCWCGVEDEAAPSKQSIYIQRETQVRTPMAGVSPKKAHPCEMCGPILGDILHVADHQGTHHKQKLHRCEAWGNKLYDSGNFHQHQNEHIGEKPYRGSVEEALFAKRCKLHVSGESSVFSESGKDFLPRSGLLQQEASHTGEKSNSKTECVSPIQCGGAHYSCGESMKHFSTKHILSQHQRLLTREECYVCCECGKSFSKYASLSNHQRVHTEKKHECGECGKSFSKYVSFSNHQRVHTEKKHECGECGKSFSKYVSFSNHQRVHTGKRPYECGECGKSFSKYASFSNHQRVHTEKKHYECGECGKSFSKYVSFSNHQRVHTGKRPYECGECGKSFSKYASFSNHQRVHTDKKHYECGECGKSFSQKSSLIQHQRFHTGEKPYGCEECGKSFSSEGHLRSHQRVHAGERPFKCGECVKSFSHKRSLVHHQRVHSGERPYQCGECGKSFSQKGNLVLHQRVHTGARPYECGECGKSFSSKGHLRNHQQIHTGDRLYECGECGKSFSHKGTLILHQRVHPRERSYGCGECGKSFSSIGHLRSHQRVHTGERPYECGECGKSFSHKRSLVHHQRMHTGERPYKCGDCGKSFNEKGHLRNHQRVHTTERPFKCGECGKCFSHKGNLILHQHGHTGERPYVCRECGKLFKKKSHLLVHQRIHNGEKPYACEACQKFFRNKYQLIAHQRVHTGERPYECNDCGKSFTHSSTFCVHKRIHTGEKPYECSECGKSFAESSSFTKHKRVHTGEKPYECSECGKSFAESSSLTKHKRVHTGEKPYKCEKCGKLFNKKSHLLVHQSSHWRKAI

SEQ ID NO: 101459 - protein, 62 aa, Homo sapiens
  Payload ID: 20219
  Gene Name: zinc finger protein 814
  ENSP ID: ENSP00000469641
MAAAATLRLSAQGTVTFEDVAVNFTWEEWNLLSEAQRCLYRDVTLENLALISSLGKLLTLTL

SEQ ID NO: 101460 - protein, 39 aa, Homo sapiens
  Payload ID: 20219
  Gene Name: zinc finger protein 814
  ENSP ID: ENSP00000469704
MAAAATLRLSAQQLLLGTILNWAERPSQTRGRQMAPVTP

SEQ ID NO: 101461 - protein, 68 aa, Homo sapiens
  Payload ID: 20219
  Gene Name: zinc finger protein 814
  ENSP ID: ENSP00000469912
MAAAATLRLSAQGTVTFEDVAVNFTWEEWNLLSEAQRCLYRDVTLENLALISSLVYATRSSQMKPVAR

SEQ ID NO: 101462 - protein, 113 aa, Homo sapiens
  Payload ID: 20219
  Gene Name: zinc finger protein 814
  ENSP ID: ENSP00000470296
MAAAATLRLSAQESHSVIQTGVQWRDHSSPQPPPTGDILIQGTVTFEDVAVNFTWEEWNLLSEAQRCLYRDVTLENLALISSLDPALDGSADNTQTGNLGQSVLPSHPEQKTA

SEQ ID NO: 101463 - protein, 84 aa, Homo sapiens
  Payload ID: 20219
  Gene Name: zinc finger protein 814
  ENSP ID: ENSP00000470328
MAAAATLRLSAQGTVTFEDVAVNFTWEEWNLLSEAQRCLYRDVTLENLALISSLDPALDGSADNTQTGNLGQSVLPSHPEQKTA

SEQ ID NO: 101464 - protein, 94 aa, Homo sapiens
  Payload ID: 20219
  Gene Name: zinc finger protein 814
  ENSP ID: ENSP00000470748
  MOD_RES (1)..(1): Any amino acid
XLSAQGTVTFEDVAVNFTWEEWNLLSEAQRCLYRDVTLENLALISSLGMTFLHVCQALDSLRQVIHPPTSASQSAGITGSHSIPQARVRWHHLG

SEQ ID NO: 101465 - protein, 79 aa, Homo sapiens
  Payload ID: 20219
  Gene Name: zinc finger protein 814
  ENSP ID: ENSP00000471045
MAAAATLRLSAQGTVTFEDVAVNFTWEEWNLLSEAQRCLYRDVTLENLALISSLGCWCGVEDEAAPSKQSIYIQRETQG

SEQ ID NO: 101466 - protein, 91 aa, Homo sapiens
  Payload ID: 20219
  Gene Name: zinc finger protein 814
  ENSP ID: ENSP00000471385
MAAAATLRLSAQGTVTFEDVAVNFTWEEWNLLSEAQRCLYRDVTLENLALISSLGMTFLHVCQALDSLRQVIHPPTSASQSAGITGVSHCA

SEQ ID NO: 101467 - protein, 91 aa, Homo sapiens; identical to SEQ ID NO: 101466
  Payload ID: 20219
  Gene Name: zinc finger protein 814
  ENSP ID: ENSP00000472089

SEQ ID NO: 101468 - protein, 577 aa, Homo sapiens [sequence omitted]

SEQ ID NO: 101469 - protein, 98 aa, Homo sapiens
  Payload ID: 20220
  Gene Name: zinc finger protein 816
  ENSP ID: ENSP00000333199
MLREEATKKSKEKEPGMALPQMESYSAAQAGVQWHDLGSLQHSSLVLKLFSCISLPGTLDFQGCGYRVLFGGVEMPEPCTEGFIQGCDVGELQEPGVC

SEQ ID NO: 101470 - protein, 651 aa, Homo sapiens
  Payload ID: 20220
  Gene Name: zinc finger protein 816
  Uniprot ID: Q0VGE8
  ENSP ID: ENSP00000350295
MLREEATKKSKEKEPGMALPQGRLTFRDVAIEFSLEEWKCLNPAQRALYRAVMLENYRNLEFVDSSLKSMMEFSSTRHSITGEVIHTGTLQRHKSHHIGDFCFPEMKKDIHHFEFQWQEVERNGHEAPMTKIKKLTGSTDRSDHRHAGNKPIKDQLGLSFHSHLPELHMFQTKGKISNQLDKSIGASSASESQRISCRLKTHISNKYGKNFLHSSFTQIQEICMREKPCQSNECGKAFNYSSLLRRHHITHSREREYKCDVCGKIFNQKQYIVYHHRCHTGEKTYKCNECGKTFTQMSSLVCHRRLHTGEKPYKCNECGKTFSEKSSLRCHRRLHTGEKPYKCNECGKTFGRNSALVIHKAIHTGEKPYKCNECGKTFSQKSSLQCHHILHTGEKPYKCEECDNVYIRRSHLERHRKIHTGEGSYKCKVCDKVFRSDSYLAEHQRVHTGEKPYKCNKCGRSFSRKSSLQYHHTLHTGEKPYTCNECGKVFSRRENLARHHRLHAGEKPYKCEECDKVFSRRSHLERHRRIHTGEKPYKCKVCDKAFRSDSCLANHTRVHTGEKPYKCNKCAKVFNQKGILAQHQRVHTGEKPYKCNECGKVFNQKASLAKHQRVHTAEKPYKCNECGKAFTGQSTLIHHQAIHGCRETLQM

SEQ ID NO: 101471 - protein, 651 aa, Homo sapiens; identical to SEQ ID NO: 101470
  Payload ID: 20220
  Gene Name: zinc finger protein 816
  Uniprot ID: Q0VGE8
  ENSP ID: ENSP00000403266

SEQ ID NO: 101472 - protein, 114 aa, Homo sapiens
  Payload ID: 20220
  Gene Name: zinc finger protein 816
  ENSP ID: ENSP00000408965
MLREEATKKSKEKEPGMALPQGRLTFRDVAIEFSLEEWKCLNPAQRALYRAVMLENYRNLEFVDSSLKSMMEFSSTRHSITGEVIHTGTLQRHKSHHIGDFCFPEMKKDIHHFE

SEQ ID NO: 101473 - protein, 76 aa, Homo sapiens
  Payload ID: 20220
  Gene Name: zinc finger protein 816
  ENSP ID: ENSP00000469688
MLREEATKKSKEKEPGMALPQGRLTFRDVAIEFSLEEWKCLNPAQRALYRAVMLENYRNLEFVEFCSCCPGWSAMW

SEQ ID NO: 101474 - protein, 97 aa, Homo sapiens
  Payload ID: 20220
  Gene Name: zinc finger protein 816
  ENSP ID: ENSP00000470838
MLREEATKKSKEKEPGMALPQGRLTFRDVAIEFSLEEWKCLNPAQRALYRAVMLENYRNLEFVGEENVPPDMRNLHLSILALSGFIFSFVILPHTCF

SEQ ID NO: 101475 - protein, 58 aa, Homo sapiens
  Payload ID: 20220
  Gene Name: zinc finger protein 816
  ENSP ID: ENSP00000471215
MLREEATKKSKEKEPGMALPQGCGYRVLFGGVEMPEPCTEGFIQGCDVGELQEPGVCG

SEQ ID NO: 101476 - protein, 97 aa, Homo sapiens; identical to SEQ ID NO: 101474
  Payload ID: 20220
  Gene Name: zinc finger protein 816
  ENSP ID: ENSP00000472475

SEQ ID NO: 101477 - protein, 370 aa, Homo sapiens
  Payload ID: 20221
  Gene Name: zinc finger protein 821
  ENSP ID: ENSP00000313822
MSRRKQTNPNKVHCDSEGDEEETTQDEVSSHTSEEDGGVVKVEKELENTEQPVGGNEVVEHEVTGNLNSDPLLELCQCPLCQLDCGSREQLIAHVYQHTAAVVSAKSYMCPVCGRALSSPGSLGRHLLIHSEDQRSNCAVCGARFTSHATFNSEKLPEVLNMESLPTVHNEGPSSAEGKDIAFSPPVYPAGILLVCNNCAAYRKLLEAQTPSVRKWALRRQNEPLEVRLQRLERERTAKKSRRDNETPEEREVRRMRDREAKRLQRMQETDEQRARRLQRDREAMRLKRANETPEKRQARLIREREAKRLKRRLEKMDMMLRAQFGQDPSAMAALAAEMNFFQLPVSGVELDSQLLGKMAFEEQNSSSLH

SEQ ID NO: 101478 - protein, 412 aa, Homo sapiens
  Payload ID: 20221
  Gene Name: zinc finger protein 821
  Uniprot ID: O75541
  ENSP ID: ENSP00000398089
MSRRKQTNPNKVHWDQVFAGLEEQARQAMMKTDFPGDLGSQRQAIQQLRDQDSSSSDSEGDEEETTQDEVSSHTSEEDGGVVKVEKELENTEQPVGGNEVVEHEVTGNLNSDPLLELCQCPLCQLDCGSREQLIAHVYQHTAAVVSAKSYMCPVCGRALSSPGSLGRHLLIHSEDQRSNCAVCGARFTSHATFNSEKLPEVLNMESLPTVHNEGPSSAEGKDIAFSPPVYPAGILLVCNNCAAYRKLLEAQTPSVRKWALRRQNEPLEVRLQRLERERTAKKSRRDNETPEEREVRRMRDREAKRLQRMQETDEQRARRLQRDREAMRLKRANETPEKRQARLIREREAKRLKRRLEKMDMMLRAQFGQDPSAMAALAAEMNFFQLPVSGVELDSQLLGKMAFEEQNSSSLH

SEQ ID NO: 101479 - protein, 370 aa, Homo sapiens; identical to SEQ ID NO: 101477
  Payload ID: 20221
  Gene Name: zinc finger protein 821
  ENSP ID: ENSP00000405908

SEQ ID NO: 101480 - protein, 62 aa, Homo sapiens
  Payload ID: 20221
  Gene Name: zinc finger protein 821
  ENSP ID: ENSP00000455454
MSRRKQTNPNKVHWDQVFAGLEEQARQAMMKTDFPGDLGSQRQAIQQLRDQDSSSSEFCTFW

SEQ ID NO: 101481 - protein, 412 aa, Homo sapiens; identical to SEQ ID NO: 101478
  Payload ID: 20221
  Gene Name: zinc finger protein 821
  Uniprot ID: O75541
  ENSP ID: ENSP00000455648

SEQ ID NO: 101482 - protein, 138 aa, Homo sapiens
  Payload ID: 20221
  Gene Name: zinc finger protein 821
  ENSP ID: ENSP00000455738
MSRRKQTNPNKVHWDQVFAGLEEQARQAMMKTDFPGDLGSQRQAIQQLRDQDSSSSDSEGDEEETTQDEVSSHTSEEDGGVVKVEKELENTEQPVGGNEVVEHEARNLNSDPLLELCQCPLCQLDCGSREQLIAHVYQ

SEQ ID NO: 101483 - protein, 62 aa, Homo sapiens; identical to SEQ ID NO: 101480
  Payload ID: 20221
  Gene Name: zinc finger protein 821
  ENSP ID: ENSP00000456031

SEQ ID NO: 101484 - protein, 66 aa, Homo sapiens
  Payload ID: 20221
  Gene Name: zinc finger protein 821
  ENSP ID: ENSP00000456087
MSRRKQTNPNKVHWDQVFAGLEEQARQAMMKTDFPGDLGSQRQAIQQLRDQDSSSSEFCTFWSQGI

SEQ ID NO: 101485 - protein, 105 aa, Homo sapiens
  Payload ID: 20221
  Gene Name: zinc finger protein 821
  ENSP ID: ENSP00000456106
MSRRKQTNPNKVHWDQVFAGLEEQARQAMMKTDFPGDLGSQRQAIQQLRDQDSSSSDSEGDEEETTQDEVSSHTSEEDGGVVKVEKELENTEQPVGGNEVVEHEA

SEQ ID NO: 101486 - protein, 250 aa, Homo sapiens
  Payload ID: 20221
  Gene Name: zinc finger protein 821
  ENSP ID: ENSP00000456193
MSRRKQTNPNKVHCDSEGDEEETTQDEVSSHTSEEDGGVVKVEKELENTEQPVGGNEVVEHEVTGNLNSDPLLELCQCPLCQLDCGSREQLIAHVYQHTAAVVSAKSYMCPVCGRALSSPGSLGRHLLIHSEDQRSNCAVCGARFTSHATFNSEKLPEVLNMESLPTVHNEGPSSAEGKDIAFSPPVYPAGILLVCNNCAAYRKLLEAQTPSVRKWALRRQNEPLEVRLQRLERERTAKKSRRDNETPEE

SEQ ID NO: 101487 - protein, 403 aa, Homo sapiens
  Payload ID: 20221
  Gene Name: zinc finger protein 821
  ENSP ID: ENSP00000456563
MSRRKQTNPNKVHWDQVFAGLEEQARQAMMKTDFPGDLGSQRQAIQQLRDQDSSSSDSEGDEEETTQDEVSSHTSEEDGGVVKVEKELENTEQPVGGNEVVEHEVTGNLNSDPLLELCQCPLCQLDCGSREQLIAHVYQHTAAVVSAKSYMCPVCGRALSSPGSLGRHLLIHSEDQRSNCAVCGARFTSHATFNSEKLPEVLNMESLPTVHNEGPSSAEGKDIAFSPPVYPAGILLVCNNCAAYRKLLEAQTPSVRKWALRRQNEPLEVRLQRLERERTAKKSRRDNETPEEREVRRMRDREAKRLQRMQETDEQRARRLQRDREAMRLKRANETPEKRQARLIREREAKRLKRRLEKMDMMLRAQFGQDPSAMAALAAEMNFFQLPVSGVELDSQLLGKMAF

SEQ ID NO: 101488 - protein, 105 aa, Homo sapiens; identical to SEQ ID NO: 101485
  Payload ID: 20221
  Gene Name: zinc finger protein 821
  ENSP ID: ENSP00000457068

SEQ ID NO: 101489 - protein, 62 aa, Homo sapiens; identical to SEQ ID NO: 101480
  Payload ID: 20221
  Gene Name: zinc finger protein 821
  ENSP ID: ENSP00000457202

SEQ ID NO: 101490 - protein, 62 aa, Homo sapiens
  Payload ID: 20221
  Gene Name: zinc finger protein 821
  ENSP ID: ENSP00000457396
MSRRKQTNPNKVHWDQVFAGLEEQARQAMMKTDFPGDLGSQRQAIQQLRDQDSSSSHREFEF

SEQ ID NO: 101491 - protein, 62 aa, Homo sapiens; identical to SEQ ID NO: 101480
  Payload ID: 20221
  Gene Name: zinc finger protein 821
  ENSP ID: ENSP00000457985

SEQ ID NO: 101492 - protein, 212 aa, Homo sapiens
  Payload ID: 20221
  Gene Name: zinc finger protein 821
  ENSP ID: ENSP00000458112
MSRRKQTNPNKVHCDSEGDEEETTQDEVSSHTSEEDGGVVKVEKELENTEQPVGGNEVVEHEVTGNLNSDPLLELCQCPLCQLDCGSREQLIAHVYQHTAAVVSAKSYMCPVCGRALSSPGSLGRHLLIHSEDQRSNCAVCGARFTSHATFNSEKLPEVLNMESLPTVHNEGPSSAEGKDIAFSPPVYPAGILLVCNNCAAYRKLLEAQTPS

SEQ ID NO: 101493 - protein, 139 aa, Homo sapiens
  Payload ID: 20221
  Gene Name: zinc finger protein 821
  ENSP ID: ENSP00000481362
MSRRKQTNPNKVHWDQVFAGLEEQARQAMMKTDFPGDLGSQRQAIQQLRDQDSSSSDSEGDEEETTQDEVSSHTSEEDGGVVKVEKELENTEQPVGGNEVVEHEVTGNLNSDPLLELCQCPLCQLDCGSREQLIAHVYQ

SEQ ID NO: 101494 - protein, 610 aa, Homo sapiens
  Payload ID: 20222
  Gene Name: zinc finger protein 823
  Uniprot ID: P16415
  ENSP ID: ENSP00000340683
MDSVAFEDVAVNFTQEEWALLGPSQKSLYRNVMQETIRNLDCIEMKWEDQNIGDQCQNAKRNLRSHTCEIKDDSQCGETFGQIPDSIVNKNTPRVNPCDSGECGEVVLGHSSLNCNIRVDTGHKSCEHQEYGEKPYTHKQRGKAISHQHSFQTHERPPTGKKPFDCKECAKTFSSLGNLRRHMAAHHGDGPYKCKLCGKAFVWPSLFHLHERTHTGEKPYECKQCSKAFPFYSSYLRHERIHTGEKAYECKQCSKAFPDYSTYLRHERTHTGEKPYKCTQCGKAFSCYYYTRLHERTHTGEQPYACKQCGKTFYHHTSFRRHMIRHTGDGPHKCKICGKGFDCPSSVRNHETTHTGEKPYECKQCGKVLSHSSSFRSHMITHTGDGPQKCKICGKAFGCPSLFQRHERTHTGEKPYQCKQCGKAFSLAGSLRRHEATHTGVKPYKCQCGKAFSDLSSFQNHETTHTGEKPYECKECGKAFSCFKYLSQHKRTHTVEKPYECKTCRKAFSHFSNLKVHERIHSGEKPYECKECGKAFSWLTCLLRHERIHTGEKPYECLQCGKAFTRSRFLRGHEKTHTGEKLYECKECGKALSSLRSLHRHKRTHWKDTL

SEQ ID NO: 101495 - protein, 67 aa, Homo sapiens
  Payload ID: 20222
  Gene Name: zinc finger protein 823
  ENSP ID: ENSP00000387514
MDSVAFEDVAVNFTQEEWALLGPSQKSLYRNVMQETIRNLDCIEVIHVKLKMTVNVEKLLARFQIVL

SEQ ID NO: 101496 - protein, 469 aa, Homo sapiens
  Payload ID: 20222
  Gene Name: zinc finger protein 823
  ENSP ID: ENSP00000410654
MKWEDQNIGDQCQNAKRNLRSHTCEIKDDSQCGETFGQIPDSIVNKNTPRVNPCDSGECGEVVLGHSSLNCNIRVDTGHKSCEHQEYGEKPYTHKQRGKAISHQHSFQTHERPPTGKKPFDCKECAKTFSSLGNLRRHMAAHHGDGPYKCKLCGKAFVWPSLFHLHERTHTGEKPYECKQCSKAFPFYSSYLRHERIHTGEKAYECKQCSKAFPDYSTYLRHERTHTGEKPYKCTQCGKAFSCYYYTRLHERTHTGEQPYACKQCGKTFYHHTSFRRHMIRHTGDGPHKCKICGKGFDCPSSVRNHETTHTGEKPYECKQCGKVLSHSSSFRSHMITHTGDGPQKCKICGKAFGCPSLFQRHERTHTGEKPYQCKQCGKAFSLAGSLRRHEATHTGVKPYKCQCGKAFSDLSSFQNHETTHTGEKPYECKECGKAFSCFKYLSQHKRTHTVEKPYECKTCRKAFSHFSN

SEQ ID NO: 101497 - protein, 92 aa, Homo sapiens
  Payload ID: 20222
  Gene Name: zinc finger protein 823
  ENSP ID: ENSP00000466840
MAAHHGDGPYKCKLCGKAFVWPSLFHLHERTHTGEKPYECKQCSKAFPFYSSYLRHERIHTGEKAYECKQCSKAFPDYSTYLRHERTHTGEK

SEQ ID NO: 101498 - protein, 1077 aa, Homo sapiens
  Payload ID: 20223
  Gene Name: zinc finger protein 827
  Uniprot ID: Q17R98
  ENSP ID: ENSP00000368761
MPRRKQEQPKRLPSHVSRQEEAEGELSEGEHWYGNSSETPSEASYGEVQENYKLSLEDRIQEQSTSPDTSLGSTTPSSHTLELVALDSEVLRDSLQCQDHLSPGVSSLCDDDPGSNKPLSSNLRRLLEAGSLKLDAAATANGRVESPVNVGSNLSFSPPSHHAQQLSVLARKLAEKQEQNDQYTPSNRFIWNQGKWLPNSTTTCSLSPDSAILKLKAAANAVLQDKSLTRTEETMRFESFSSPFSSQSASSTLAALSKKVSERSLTPGQEHPPPASSFLSLASMTSSAALLKEVAARAAGSLLAEKSSLLPEDPLPPPPSEKKPEKVTPPPPPPPPPPPPPPPQSLELLLLPVPKGRVSKPSNSASEEESGKPFQCPICGLVIKRKSYWKRHMVIHTGLKSHQCPLCPFRCARKDNLKSHMKVHQHQDRGETFQCQLCPFTSSRHFSLKLHMRCHQHFLRTEAKVKEEIPDPDVKGSPHLSDSACLGQQREGGGTELVGTMMTSNTPERTSQGGAGVSPLLVKEEPKEDNGLPTSFTLNAADRPANHTKLKDPSEYVANSASALFSQDISVKMASDFLMKLSAANQKEPMNLNFKVKEEPKEGESLSTTLPRSSYVFSPESEVSAPGVSEDALKPQEGKGSVLRRDVSVKAASELLMKLSAESYKETQMVKIKEEPMEVDIQDSHVSISPSRNVGYSTLIGREKTEPLQKMPEGRVPPERNLFSQDISVKMASELLFQLSEKVSKEHNHTKENTIRTTTSPFFSEDTFRQSPFTSNSKELLPSDSVLHGRISAPETEKIVLEAGNGLPSWKFNDQLFPCDVCGKVFGRQQTLSRHLSLHTEERKYKCHLCPYAAKCRANLNQHLTVHSVKLVSTDTEDIVSAVTSEGSDGKKHPYYYSCHVCGFETELNVQFVSHMSLHVDKEQWMFSICCTACDFVTMEEAEIKTHIGTKHTGEDRKTPSESNSPSSSSLSALSDSANSKDDSDGSQKNKGGNNLLVISVMPGSQPSLNSEEKPEKGFECVFCNFVCKTKNMFERHLQIHLITRMFECDVCHKFMKTPEQLLEHKKCHTVPTGGLK

SEQ ID NO: 101499 - protein, 1081 aa, Homo sapiens
  Payload ID: 20223
  Gene Name: zinc finger protein 827
  Uniprot ID: Q17R98
  ENSP ID: ENSP00000421863
MPRRKQEQPKRLPSHVSRQEEAEGELSEGEHWYGNSSETPSEASYGEVQENYKLSLEDRIQEQSTSPDTSLGSTTPSSHTLELVALDSEVLRDSLQCQDHLSPGVSSLCDDDPGSNKPLSSNLRRLLEAGSLKLDAAATANGRVESPVNVGSNLSFSPPSHHAQQLSVLARKLAEKQEQNDQYTPSNRFIWNQGKWLPNSTTTCSLSPDSAILKLKAAANAVLQDKSLTRTEETMRFESFSSPFSSQSASSTLAALSKKVSERSLTPGQEHPPPASSFLSLASMTSSAALLKEVAARAAGSLLAEKSSLLPEDPLPPPPSEKKPEKVTPPPPPPPPPPPPPPPQSLELLLLPVPKGRVSKPSNSASEEESGKPFQCPICGLVIKRKSYWKRHMVIHTGLKSHQCPLCPFRCARKDNLKSHMKVHQHQDRGETFQCQLCPFTSSRHFSLKLHMRCHQHFLRTEAKVKEEIPDPDVKGSPHLSDSACLGQQREGGGTELVGTMMTSNTPERTSQGGAGVSPLLVKEEPKEDNGLPTSFTLNAADRPANHTKLKDPSEYVANSASALFSQDISVKMASDFLMKLSAANQKEPMNLNFKVKEEPKEGESLSTTLPRSSYVFSPESEVSAPGVSEDALKPQEGKGSVLRRDVSVKAASELLMKLSAESYKETQMVKIKEEPMEVDIQDSHVSISPSRNVGYSTLIGREKTEPLQKMPEGRVPPERNLFSQDISVKMASELLFQLSEKVSKEHNHTKENTIRTTTSPFFSEDTFRQSPFTSNSKELLPSDSVLHGRISAPETEKIVLEAGNGLPSWKFNDQLFPCDVCGKVFGRQQTLSRHLSLHTEERKYKCHLCPYAAKCRANLNQHLTVHSVKLVSTDTEDIVSAVTSEGSDGKKHPYYYSCHVCGFETELNVQFVSHMSLHVDKEQWMFSICCTACDFVTMEEAEIKTHIGTKHTGEDRKTPSESNSPSSSSLSALSDSANSKDDSDGSQKNKGGNNLLVISVMPGSQPSLNSEEKPEKGFECVFCNFVCKTKNMFERHLQIHLITRMFECDVCHKFMKTPEQLLEHKKCHTVPTGGLNSGQW

SEQ ID NO: 101500 - protein, 731 aa, Homo sapiens
  Payload ID: 20223
  Gene Name: zinc finger protein 827
  ENSP ID: ENSP00000423130
MPRRKQEQPKRLPSPSEEESGKPFQCPICGLVIKRKSYWKRHMVIHTGLKSHQCPLCPFRCARKDNLKSHMKVHQHQDRGETFQCQLCPFTSSRHFSLKLHMRCHQHFLRTEAKVKEEIPDPDVKGSPHLSDSACLGQQREGGGTELVGTMMTSNTPERTSQGGAGVSPLLVKEEPKEDNGLPTSFTLNAADRPANHTKLKDPSEYVANSASALFSQDISVKMASDFLMKLSAANQKEPMNLNFKVKEEPKEGESLSTTLPRSSYVFSPESEVSAPGVSEDALKPQEGKGSVLRRDVSVKAASELLMKLSAESYKETQMVKIKEEPMEVDIQDSHVSISPSRNVGYSTLIGREKTEPLQKMPEGRVPPERNLFSQDISVKMASELLFQLSEKVSKEHNHTKENTIRTTTSPFFSEDTFRQSPFTSNSKELLPSDSVLHGRISAPETEKIVLEAGNGLPSWKFNDQLFPCDVCGKVFGRQQTLSRHLSLHTEERKYKCHLCPYAAKCRANLNQHLTVHSVKLVSTDTEDIVSAVTSEGSDGKKHPYYYSCHVCGFETELNVQFVSHMSLHVDKEQWMFSICCTACDFVTMEEAEIKTHIGTKHTGEDRKTPSESNSPSSSSLSALSDSANSKDDSDGSQKNKGGNNLLVISVMPGSQPSLNSEEKPEKGFECVFCNFVCKTKNMFERHLQIHLITRMFECDVCHKFMKTPEQLLEHKKCHTVPTGGLNSGQW

SEQ ID NO: 101501 - protein, 178 aa, Homo sapiens
  Payload ID: 20223
  Gene Name: zinc finger protein 827
  ENSP ID: ENSP00000424456
  MOD_RES (1)..(1): Any amino acid
XVCGFETELNVQFVSHMSLHVDKEQWMFSICCTACDFVTMEEAEIKTHIGTKHTGEDRKTPSESNSPSSSSLSALSDSANSKDDSDGSQKNKGGNNLLVISVMPGSQPSLNSEEKPEKGFECVFCNFVCKTKNMFERHLQIHLITRMFECDVCHKFMKTPEQLLEHKKCHTVPTGGLK

SEQ ID NO: 101502 - protein, 179 aa, Homo sapiens
  Payload ID: 20223
  Gene Name: zinc finger protein 827
  ENSP ID: ENSP00000424541
FMKTPEQLLEHKKCHTVPTGGLKCPFCIYSTNRPAAMECHLKTHYKMEYKCRICQTVKANQLELETHTREHRLGNHYKCDQCGYLSKTANKLIEHVRVHTGERPFHCDQCSYSCKRKDNLNLHKKLKHAPRQTFSCEECLFKTTHPFVFSRHVKKHQSGDCPEEDKKGLCPAPKEPAGP

SEQ ID NO: 101503 - protein, 513 aa, Homo sapiens
  Payload ID: 20224
  Gene Name: zinc finger protein 829
  Uniprot ID: Q3KNS6
  ENSP ID: ENSP00000428679
MTGKGLGEDTEDRWGAGALGPCGRSGLKGGGCVWEAEAGGSRGQEIETILANMETSLRSGQIPTLDSSEHNLSPEPLELDRMPHSPLISIPHVWCHPEEEERMHDELLQAVSKGPVMFRDVSIDFSQEEWECLDADQMNLYKEVMLENFSNLVSVGLSNSKPAVISLLEQGKEPWMVDRELTRGLCSDLESMCETKILSLKKRHFSQVIITREDMSTFIQPTFLIPPQKTMSEEKPWECKICGKTFNQNSQFIQHQRIHFGEKHYESKEYGKSFSRGSLVTRHQRIHTGKKPYECKECGKAFSCSSYFSQHQRIHTGEKPYECKECGKAFKYCSNLNDHQRIHTGEKPYECKVCGKAFTKSSQLFLHLRIHTGEKPYECKECGKAFTQHSRLIQHQRMHTGEKPYECKQCGKAFNSASTLTNHHRIHAGEKLYECEECRKAFIQSSELIQHQRIHTDEKPYECNECGKAFNKGSNLTRHQRIHTGEKPYDCKECGKAFGSRSDLIRHEGIHTG

SEQ ID NO: 101504 - protein, 432 aa, Homo sapiens
  Payload ID: 20224
  Gene Name: zinc finger protein 829
  Uniprot ID: Q3KNS6
  ENSP ID: ENSP00000429266
MPHSPLISIPHVWCHPEEEERMHDELLQAVSKGPVMFRDVSIDFSQEEWECLDADQMNLYKEVMLENFSNLVSVGLSNSKPAVISLLEQGKEPWMVDRELTRGLCSDLESMCETKILSLKKRHFSQVIITREDMSTFIQPTFLIPPQKTMSEEKPWECKICGKTFNQNSQFIQHQRIHFGEKHYESKEYGKSFSRGSLVTRHQRIHTGKKPYECKECGKAFSCSSYFSQHQRIHTGEKPYECKECGKAFKYCSNLNDHQRIHTGEKPYECKVCGKAFTKSSQLFLHLRIHTGEKPYECKECGKAFTQHSRLIQHQRMHTGEKPYECKQCGKAFNSASTLTNHHRIHAGEKLYECEECRKAFIQSSELIQHQRIHTDEKPYECNECGKAFNKGSNLTRHQRIHTGEKPYDCKECGKAFGSRSDLIRHEGIHTG

SEQ ID NO: 101505 - protein, 248 aa, Homo sapiens
  Payload ID: 20224
  Gene Name: zinc finger protein 829
  Uniprot ID: Q3KNS6
  ENSP ID: ENSP00000482037
MNKEYGKSFSRGSLVTRHQRIHTGKKPYECKECGKAFSCSSYFSQHQRIHTGEKPYECKECGKAFKYCSNLNDHQRIHTGEKPYECKVCGKAFTKSSQLFLHLRIHTGEKPYECKECGKAFTQHSRLIQHQRMHTGEKPYECKQCGKAFNSASTLTNHHRIHAGEKLYECEECRKAFIQSSELIQHQRIHTDEKPYECNECGKAFNKGSNLTRHQRIHTGEKPYDCKECGKAFGSRSDLIRHEGIHTG

SEQ ID NO: 101506 - protein, 516 aa, Homo sapiens
  Payload ID: 20225
  Gene Name: zinc finger protein 83
  Uniprot ID: P51522
  ENSP ID: ENSP00000301096
MHGRKDDAQKQPVKNQLGLNPQSHLPELQLFQAEGKIYKYDHMEKSVNSSSLVSPPQRISSTVKTHISHTYECNFVDSLFTQKEKANIGTEHYKCSERGKAFHQGLHFTIHQIIHTKETQFKCDICGKIFNKKSNLASHQRIHTGEKPYKCNECGKVFHNMSHLAQHRRIHTGEKPYKCNECGKVFNQISHLAQHQRIHTGEKPYKCNECGKVFHQISHLAQHRTIHTGEKPYECNKCGKVFSRNSYLVQHLIIHTGEKPYRCNVCGKVFHHISHLAQHQRIHTGEKPYKCNECGKVFSHKSSLVNHWRIHTGEKPYKCNECGKVFSHKSSLVNHWRIHTGEKPYKCNECGKVFSRNSYLAQHLIIHAGEKPYKCDECDKAFSQNSHLVQHHRIHTGEKPYKCDECGKVFSQNSYLAYHWRIHTGEKAYKCNECGKVFGLNSSLAHHRKIHTGEKPFKCNECGKAFSMRSSLTNHHAIHTGEKHFKCNECGKLFRDNSYLVRHQRFHAGKKSNTCN

SEQ ID NO: 101507 - protein, 516 aa, Homo sapiens; identical to SEQ ID NO: 101506
  Payload ID: 20225
  Gene Name: zinc finger protein 83
  Uniprot ID: P51522
  ENSP ID: ENSP00000439681

SEQ ID NO: 101508 - protein, 516 aa, Homo sapiens; identical to SEQ ID NO: 101506
  Payload ID: 20225
  Gene Name: zinc finger protein 83
  Uniprot ID: P51522
  ENSP ID: ENSP00000440713

SEQ ID NO: 101509 - protein, 516 aa, Homo sapiens; identical to SEQ ID NO: 101506
  Payload ID: 20225
  Gene Name: zinc finger protein 83
  Uniprot ID: P51522
  ENSP ID: ENSP00000445993

SEQ ID NO: 101510 - protein, 30 aa, Homo sapiens
  Payload ID: 20225
  Gene Name: zinc finger protein 83
  ENSP ID: ENSP00000469259
MVLPQVFFLNVRSRNYHQKRRVIQEKYSRQ

SEQ ID NO: 101511 - protein, 53 aa, Homo sapiens
  Payload ID: 20225
  Gene Name: zinc finger protein 83
  ENSP ID: ENSP00000471100
MVLPQGLLTFRDVAIEFSQEEWKCLDPAQRTLYRDVMLENYRNLVSLDVLRSS

SEQ ID NO: 101512 - protein, 125 aa, Homo sapiens
  Payload ID: 20225
  Gene Name: zinc finger protein 83
  ENSP ID: ENSP00000471352
MVLPQGLLTFRDVAIEFSQEEWKCLDPAQRTLYRDVMLENYRNLVSLGHDLILFFLFPRWSFCSCCPGWSAVAQSRLTTTSASRVQAILPPQPQKLLELQVFFLNVRSRNYHQKRRVIQEKYSRQ

SEQ ID NO: 101513 - protein, 71 aa, Homo sapiens
  Payload ID: 20225
  Gene Name: zinc finger protein 83
  ENSP ID: ENSP00000471703
MVLPQGLLTFRDVAIEFSQEEWKCLDPAQRTLYRDVMLENYRNLVSLGSPSDAEPKLDGTAAILAHCNLPA

SEQ ID NO: 101514 - protein, 55 aa, Homo sapiens
  Payload ID: 20225
  Gene Name: zinc finger protein 83
  ENSP ID: ENSP00000472092
MVLPQGLLTFRDVAIEFSQEEWKCLDPAQRTLYRDVMLENYRNLVSLGRLSQNTA

SEQ ID NO: 101515 - protein, 105 aa, Homo sapiens
  Payload ID: 20225
  Gene Name: zinc finger protein 83
  ENSP ID: ENSP00000472147
MVLPQGLLTFRDVAIEFSQEEWKCLDPAQRTLYRDVMLENYRNLVSLGIFSKCEIKELPPKKESNTGEIFQTVMLERHESHDIQDFCFRETQKNVHDSQCLWKHD

SEQ ID NO: 101516 - protein, 125 aa, Homo sapiens
  Payload ID: 20225
  Gene Name: zinc finger protein 83
  ENSP ID: ENSP00000472392
MVLPQGLLTFRDVAIEFSQEEWKCLDPAQRTLYRDVMLENYRNLVSLGIFSKCEIKELPPKKESNTGEIFQTVMLERHESHDIQDFCFRETQKNGLPLMPSRSWTVLLPSWLTATSLPDSPASAC

SEQ ID NO: 101517 - protein, 516 aa, Homo sapiens; identical to SEQ ID NO: 101506
  Payload ID: 20225
  Gene Name: zinc finger protein 83
  Uniprot ID: P51522
  ENSP ID: ENSP00000472619

SEQ ID NO: 101518 - protein, 92 aa, Homo sapiens
  Payload ID: 20225
  Gene Name: zinc finger protein 83
  ENSP ID: ENSP00000473096
MVLPQGLLTFRDVAIEFSQEEWKCLDPAQRTLYRDVMLENYRNLVSLDGVFALVAQAGVQWHNLGSPPPPPPGFKRFSRLSLRSCWNYRYFF

SEQ ID NO: 101519 - protein, 372 aa, Homo sapiens
  Payload ID: 20226
  Gene Name: zinc finger protein 830
  Uniprot ID: Q96NB3
  ENSP ID: ENSP00000354518
MASSASARTPAGKRVINQEELRRLMKEKQRLSTSRKRIESPFAKYNRLGQLSCALCNTPVKSELLWQTHVLGKQHREKVAELKGAKEASQGSSASSAPHSVKRKAPDADDQDVKRAKATLVPQVQPSTSAWTTNFDKIGKEFIRATPSKPSGLSLLPDYEDEEEEEEEEEGDGERKRGDASKPLSDAQGKEHSVSSSREVTSSVLPNDFFSTNPPKAPIIPHSGSIEKAEIHEKVVERRENTAEALPEGFFDDPEVDARVRKVDAPKDQMDKEWDEFQKAMRQVNTISEAIVAEEDEEGRLDRQIGEIDEQIECYRRVEKLRNRQDEIKNKLKEILTIKELQKKEEENADSDDEGELQDLLSQDWRVKGALL

SEQ ID NO: 101520 - protein, 106 aa, Homo sapiens
  Payload ID: 20226
  Gene Name: zinc finger protein 830
  ENSP ID: ENSP00000463839
KDQMDKEWDEFQKAMRQVNTISEAIVAEEDEEGRLDRQIGEIDEQIECYRRVEKLRNRQDEIKNKLKEILTIKELQKKEEENADSDDEGELQDLLSQDWRVKGALL

SEQ ID NO: 101521 - protein, 1677 aa, Homo sapiens
  Payload ID: 20227
  Gene Name: zinc finger protein 831
  Uniprot ID: Q5JPB2
  ENSP ID: ENSP00000360069
MEVPEPTCPAPPARDQPAPTPGPPGAPGGQASPHLTLGPVLLPPEQGLAPPTVFLKALPIPLYHTVPPGGLQPRAPLVTGSLDGGNVPFILSPVLQPEGPGPTQVGKPAAPTLTVNIVGTLPVLSPGLGPTLGSPGKVRNAGKYLCPHCGRDCLKPSVLEKHIRSHTGERPFPCATCGIAFKTQSNLYKHRRTQTHLNNSRLSSESEGAGGGLLEEGDKAGEPPRPEGRGESRCQGMHEGASERPLSPGAHVPLLAKNLDVRTEAAPCPGSAFADREAPWDSAPMASPGLPAASTQPWRKLPEQKSPTAGKPCALQRQQATAAEKPWDAKAPEGRLRKCESTDSGYLSRSDSAEQPHAPCSPLHSLSEHSAESEGEGGPGPGPGVAGAEPGAREAGLELEKKRLEERIAQLISHNQAVVDDAQLDNVRPRKTGLSKQGSIDLPTPYTYKDSFHFDIRALEPGRRRAPGPVRSTWTPPDKSRPLFFHSVPTQLSTTVECVPVTRSNSLPFVEGSRTWLEPREPRDPWSRTQKPLSPRPGPARLGCRSGLSSTDVPSGHPRALVRQAAVEDLPGTPIGDALVPAEDTDAKRTAAREAMAGKGRAGGRKCGQRRLKMFSQEKWQVYGDETFKRIYQKMKASPHGGKKAREVGMGSGAELGFPLQKEAAGSSGTVPTQDRRTPVHEDISAGATPEPWGNPPALEASLVTEPTKHGETVARRGDSDRPRVEEAVSSPALGGRDSPCSGSRSPLVSPNGRLELGWQMPPAPGPLKGGDVEAPRPVWPDPKLEGGARGVGDVQETCLWAQTVLRWPSRGSGEDKLPSERKKLKVEDLHSWKQPEPVSAETPGGPTQPASLSSQKQDADPGEVPGGSKESARQVGEPLESSGASLAAASVALKRVGPRDKATPLHPAAPAPAEHPSLATPPQAPRVLSALADNAFSPKYLLRLPQAETPLPLPIPWGPRHSQDSLCSSGWPEERASFVGSGLGTPLSPSPASGPSPGEADSILEDPSCSRPQDGRKGAQLGGDKGDRMATSRPAARELPISAPGAPREATSSPPTPTCEAHLVQDMEGDSHRIHRLCMGSTLARARLSGDVLNPWVPNWELGEPPGNAPEDPSSGPLVGPDPCSPLQPGSFLTALTRPQGVPPGWPELALSSHSGTSRSHSTRSPHSTQNPFPSLKAEPRLTWCCLSRSVPLPAEQKAKAASVYLAVHFPGSSLRDEGPNGPPGSNGGWTWTSPGEGGPAQMSKFSYPTVPGVMPQHQVSEPEWKKGLPWRAKMSRGNSKQRKLKINPKRYKGNFLQSCVQLRASRLRTPTWVRRRSRHPPALEGLKPCRTPGQTSSEIAGLNLQEEPSCATSESPPCCGKEEKKEGDCRQTLGTLSLGTSSRIVREMDKRTVKDISPSAGEHGDCTTHSTAATSGLSLQSDTCLAVVNDVPLPPGKGLDLGLLETQLLASQDSVSTDPKPYIFSDAQRPSSFGSKGTFPHHDIATSVAAVCISLPVRTDHIAQEIHSAESRDHSQTAGRTLTSSSPDSKVTEEGRAQTLLPGRPSSGQRISDSVPLESTEKTHLEIPASGPSSASSHHKEGRHKTFFPSRGQYGCGEMTVPCPSLGSDGRKRQVSGLITRKDSVVPSKPEQPIEIPEAPSKSLKKRSLEGMRKQTRVEFSDTSSDDEDRLVIEI

SEQ ID NO: 101522 - protein, 537 aa, Homo sapiens
  Payload ID: 20228
  Gene Name: zinc finger protein 835
  Uniprot ID: Q9Y2P0
  ENSP ID: ENSP00000444747
MEGLLSVALQGAELEGNWKHEGQVEDLQENQESCPEPEAVACKGDPAGDSMQERDEFSRIPRTISSPAATQASVPDDSSSRRCSAPGESPKERHPDSRQRERGGGPKKPWKCGDCGKAFSYCSAFILHQRIHTGEKPFACPECGKAFSQSVHLTLHQRTHTGEKPYACHECGKAFSQGSYLASHWRTHTGEKPHRCADCGKAFTRVTHLTQHRRVHTGERPYACAQCAKAFRNRSSLIEHQRIHTGEKPYECSACAKAFRFSSALIRHQRIHTEEKPYRCGQCAKAFAQIAHLTQHRRVHTGEKPYTCQDCGALFSQSASLAEHRRIHTGEKPYACGQCAKAFTQVSHLTQHQRTHTGERPYPCHDCGKRFSNRSHLLQHRLVHTGERPYRCLQCGAAFSHVSSLIEHQKIHTGERPYKCGECGKAFSQGSSLALHQRTHTGERPYTCPECGKAFSNRSYLIQHHIVHTGEKPYECSGCGKAFSFSSALIRHQRTHADSSGRLCPAPTPDSTPGLSQGGETCQQGCPGRNPRGPAED

SEQ ID NO: 101523 - protein, 92 aa, Homo sapiens
  Payload ID: 20228
  Gene Name: zinc finger protein 835
  ENSP ID: ENSP00000470133
MEGLLSVALQGAELEGNWKHEGQVEDLQENQESCPEPEAVACKGDPAGDSMQERDEFSRIPRTISSPAATQASVPDDSSSRRCSAPGESPKE

SEQ ID NO: 101524 - protein, 936 aa, Homo sapiens
  Payload ID: 20229
  Gene Name: zinc finger protein 836
  ENSP ID: ENSP00000325038
LCIVQGPLTFRDVAIEFSQEEWKSLDPVQKALYWDVMLENYRNLVFLGILPKCMTKELPPIGNSNTGEKCQTVTLERHECYDVENFYLREIQKNLQDLEFQWKDGEINYKEVPMTYKNNLNGKRGQHSQEDVENKCIENQLTLSFQSRLTELQKFQTEGKIYECNQSEKTVNNSSLVSPLQRILPSVQTNISKKYENEFLQLSLPTQLEKTHIREKPYMCKGCGKAFRVSSSLINHQMVHTTEKPYKCNECGKAFHRGSLLTIHQIVHTRGKPYQCGVCGKIFRQNSDLVNHRRSHTGEKPYKCNECGKSFSQSYNLAIHQRIHTGEKPYKCNECGKTFKQGSCLTTHQIIHTGEKPYQCDICGKVFRQNSNLVNHQRIHTGEKPYKCNICGKSFSQSSNLATHQTVHSGNKPYKCDECGKTFKRSSSLTTHQIIHTGEKPYTCDVCDKVFSQRSQLARHQRSHTGEKPYKCNECGKVFSQTSHLVGHRRIHTGEKPYKCDKCGKAFKQGSLLTRHKIIHTREKRYQCGECGKVFSENSCLVRHLRIHTGEQPYKCNVCGKVFNYSGNLSIHKRIHTGEKPFQCNECGTVFRNYSCLARHLRIHTGQKPYKCNVCGKVFNDSGNLSNHKRIHTGEKPFQCNECGKVFSYYSCLARHRKIHTGEKPYKCNDCGKAYTQRSSLTKHLIIHTGEKPYNCNEFGGAFIQSSKLARYHRNPTGEKPHKCSHCGRTFSHITGLTYHQRRHTGEMPYKCIECGQVFNSTSNLARHRRIHTGEKPYKCNECGKVFRHQSTLARHRSIHTGEKPYVCNECGKAFRVRSILVNHQKMHTGDKPYKCNECGKAFIERSKLVYHQRNHTGEKPYKCIECGKAFGRFSCLNKHQMIHSGEKPYKCNECGKSFISRSGLTKHQTKHTAESLKTKFNVEKPLDVLLTSGFK

SEQ ID NO: 101525 - protein, 105 aa, Homo sapiens
  Payload ID: 20229
  Gene Name: zinc finger protein 836
  ENSP ID: ENSP00000470043
MALTQGPLTFRDVAIEFSQEEWKSLDPVQKALYWDVMLENYRNLVFLGILPKCMTKELPPIGNSNTGEKCQTVTLERHECYDVENFYLREIQKNLQDLEFQWKDG

SEQ ID NO: 101526 - protein, 936 aa, Homo sapiens
  Payload ID: 20229
  Gene Name: zinc finger protein 836
  Uniprot ID: Q6ZNA1
  ENSP ID: ENSP00000470239
MALTQGPLTFRDVAIEFSQEEWKSLDPVQKALYWDVMLENYRNLVFLGILPKCMTKELPPIGNSNTGEKCQTVTLERHECYDVENFYLREIQKNLQDLEFQWKDGEINYKEVPMTYKNNLNGKRGQHSQEDVENKCIENQLTLSFQSRLTELQKFQTEGKIYECNQSEKTVNNSSLVSPLQRILPSVQTNISKKYENEFLQLSLPTQLEKTHIREKPYMCKGCGKAFRVSSSLINHQMVHTTEKPYKCNECGKAFHRGSLLTIHQIVHTRGKPYQCGVCGKIFRQNSDLVNHRRSHTGEKPYKCNECGKSFSQSYNLAIHQRIHTGEKPYKCNECGKTFKQGSCLTTHQIIHTGEKPYQCDICGKVFRQNSNLVNHQRIHTGEKPYKCNICGKSFSQSSNLATHQTVHSGNKPYKCDECGKTFKRSSSLTTHQIIHTGEKPYTCDVCDKVFSQRSQLARHQRSHTGEKPYKCNECGKVFSQTSHLVGHRRIHTGEKPYKCDKCGKAFKQGSLLTRHKIIHTREKRYQCGECGKVFSENSCLVRHLRIHTGEQPYKCNVCGKVFNYSGNLSIHKRIHTGEKPFQCNECGTVFRNYSCLARHLRIHTGQKPYKCNVCGKVFNDSGNLSNHKRIHTGEKPFQCNECGKVFSYYSCLARHRKIHTGEKPYKCNDCGKAYTQRSSLTKHLIIHTGEKPYNCNEFGGAFIQSSKLARYHRNPTGEKPHKCSHCGRTFSHITGLTYHQRRHTGEMPYKCIECGQVFNSTSNLARHRRIHTGEKPYKCNECGKVFRHQSTLARHRSIHTGEKPYVCNECGKAFRVRSILVNHQKMHTGDKPYKCNECGKAFIERSKLVYHQRNHTGEKPYKCIECGKAFGRFSCLNKHQMIHSGEKPYKCNECGKSFISRSGLTKHQTKHTAESLKTKFNVEKPLDVLLTSGFK

SEQ ID NO: 101527 - protein, 30 aa, Homo sapiens
  Payload ID: 20229
  Gene Name: zinc finger protein 836
  ENSP ID: ENSP00000470372
KHQTKHTAESLKTKFNVEKPLDVLLTSGFK

SEQ ID NO: 101528 - protein, 88 aa, Homo sapiens
  Payload ID: 20229
  Gene Name: zinc finger protein 836
  ENSP ID: ENSP00000472008
MALTQGPLTFRDVAIEFSQEEWKSLDPVQKALYWDVMLENYRNLVFLGKDNFALEVKICPRVFLYFLCCLSWEPFHYLTETEALLTHK

SEQ ID NO: 101529 - protein, 531 aa, Homo sapiens
  Payload ID: 20230
  Gene Name: zinc finger protein 837
  Uniprot ID: Q96EG3
  ENSP ID: ENSP00000405699
MEAPAQKAGQGGLPKADAQGASGAREKRPEEPRPLEEDRAGSRPTQKGDLRGAAGGRTTPPGGGSRGCSLGVSPGPGTRHSAGTRPLVREPCGPTSSQNPELVIPEGLQAREGPCRSPARGGDCSRNSCLAWHRGAPAGETPPVCDPCPERIQNHPRTQLCEVHTDCWPCQPGTGAPTCPRTPKPTSRGRNPLVEQPRACACGEAFAWRALRIPQERLQATEEPRPCARCGKRFRPNQQQQAGKSPPVCPECGQTSRPRPIVPDPPAQRLYACDECGKAFTRTSSLLQHQRIHTGERPYECAECGKAFVRCSGLYRHQKTHSAERHRRGPVLARRAFRLGCPPCGDYSERSPRRGSGAGEKPYECADCAKAFGLFSHLVEHRRVHTGEKPYACPECGKAFNQRSNLSRHQRTHSSAKPYACPLCEKAFKGRSGLVQHQRAHTGERPYGCSECGKTFRGCSELRQHERLHSGEKPYICRDCGKAFVRNCSLVRHLRTHTGERPYACGDCGRAFSQRSNLNEHRKRHGGRAAP

SEQ ID NO: 101530 - protein, 531 aa, Homo sapiens; identical to SEQ ID NO: 101529
  Payload ID: 20230
  Gene Name: zinc finger protein 837
  Uniprot ID: Q96EG3
  ENSP ID: ENSP00000471478

SEQ ID NO: 101531 - protein, 927 aa, Homo sapiens
  Payload ID: 20231
  Gene Name: zinc finger protein 839
  Uniprot ID: A8K0R7
  ENSP ID: ENSP00000399863
MADAEPEAGGGSEDGGGGGGPAPPGQSGSVARVAPLGPEQLRQVLEQVTKAQPPPPPPPFVLRDAARRLRDAAQQAALQRGRGTEPPRLPRLLPPQQLEAICVKVTSGETKGQERPMLLPTTIQPQTARKSQLPRGNSCLVGLHIASPQLLRVQPLVRTEPQSCFLSDLCQPPAQGFVQRPLPALQVVPAKRVPAPKAPDEQGSMLTPLSASDPLAVTSLSSSSAHPFISNLHTRHTEKLKKSLKVKTRSGRVSRPPKYKAKDYKFIKTEDLADGHLSDSDDYSELCVEEDEDQRERHALFDLSSCSLRPKSFKCQTCEKSYIGKGGLARHFKLNPGHGQLDPEMVLSEKASGSTLRGCTEERTLSLTSLGLSMPADPCEGGARSCLVTESARGGLQNGQSVDVEETLPSEPENGALLRSERYQGPRRRACSETLAESRTAVLQQRRAAQLPGGPAAAGEQRASPSKARLKEFLQQCDREDLVELALPQLAQVVTVYEFLLMKVEKDHLAKPFFPAIYKEFEELHKMVKKMCQDYLSSSGLCSQETLEINNDKVAESLGITEFLRKKEIHPDNLGPKHLSRDMDGEQLEGASSEKREREAAEEGLASVKRPRREALSNDTTESLAANSRGREKPRPLHALAAGFSPPVNVTVSPRSEESHTTTVSGGNGSVFQAGPQLQALANLEARRGSIGAALSSRDVSGLPVYAQSGEPRRLTQAQVAAFPGENALEHSSDQDTWDSLRSPGFCSPLSSGGGAESLPPGGPGHAEAGHLGKVCDFHLNHQQPSPTSVLPTEVAAPPLEKILSVDSVAVDCAYRTVPKPGPQPGPHGSLLTEGCLRSLSGDLNRFPCGMEVHSGQRELESVVAVGEAMAFEISNGSHELLSQGQKQIFIQTSDGLILSPPGTIVSQEEDIVTVTDAEGRACGWAR

SEQ ID NO: 101532 - protein, 247 aa, Homo sapiens
  Payload ID: 20231
  Gene Name: zinc finger protein 839
  ENSP ID: ENSP00000452819
  MOD_RES (1)..(1): Any amino acid
XRYQGPRRRACSETLAESRTAVLQQRRAAQLPGGPAAAGEQRASPSKARLKEFLQQCDREDLVELALPQLAQVVTVYEFLLMKVEKDHLAKPFFPAIYKEFEELHKMVKKMCQDYLSSSGLCSQETLEINNDKVAESLGITEFLRKKEIHPDNLGPKHLSRDMDGEQLEGASSEKREREAAEEGLASVKRPRREALSNDTTESLAANSRGREKPRPLHALAAGTIVSQEEDIVTVTDAEGRACGWAR

SEQ ID NO: 101533 - protein, 57 aa, Homo sapiens
  Payload ID: 20231
  Gene Name: zinc finger protein 839
  ENSP ID: ENSP00000452983
MKVEKDHLAKPFFPAIYKEFEELHKMVKKMCQDYLSSSGLCSQETLEINNDKVAESL

SEQ ID NO: 101534 - protein, 811 aa, Homo sapiens
  Payload ID: 20231
  Gene Name: zinc finger protein 839
  Uniprot ID: A8K0R7
  ENSP ID: ENSP00000453109
MLLPTTIQPQTARKSQLPRGNSCLVGLHIASPQLLRVQPLVRTEPQSCFLSDLCQPPAQGFVQRPLPALQVVPAKRVPAPKAPDEQGSMLTPLSASDPLAVTSLSSSSAHPFISNLHTRHTEKLKKSLKVKTRSGRVSRPPKYKAKDYKFIKTEDLADGHLSDSDDYSELCVEEDEDQRERHALFDLSSCSLRPKSFKCQTCEKSYIGKGGLARHFKLNPGHGQLDPEMVLSEKASGSTLRGCTEERTLSLTSLGLSMPADPCEGGARSCLVTESARGGLQNGQSVDVEETLPSEPENGALLRSERYQGPRRRACSETLAESRTAVLQQRRAAQLPGGPAAAGEQRASPSKARLKEFLQQCDREDLVELALPQLAQVVTVYEFLLMKVEKDHLAKPFFPAIYKEFEELHKMVKKMCQDYLSSSGLCSQETLEINNDKVAESLGITEFLRKKEIHPDNLGPKHLSRDMDGEQLEGASSEKREREAAEEGLASVKRPRREALSNDTTESLAANSRGREKPRPLHALAAGFSPPVNVTVSPRSEESHTTTVSGGNGSVFQAGPQLQALANLEARRGSIGAALSSRDVSGLPVYAQSGEPRRLTQAQVAAFPGENALEHSSDQDTWDSLRSPGFCSPLSSGGGAESLPPGGPGHAEAGHLGKVCDFHLNHQQPSPTSVLPTEVAAPPLEKILSVDSVAVDCAYRTVPKPGPQPGPHGSLLTEGCLRSLSGDLNRFPCGMEVHSGQRELESVVAVGEAMAFEISNGSHELLSQGQKQIFIQTSDGLILSPPGTIVSQEEDIVTVTDAEGRACGWAR

SEQ ID NO: 101535 - protein, 475 aa, Homo sapiens
  Payload ID: 20231
  Gene Name: zinc finger protein 839
  ENSP ID: ENSP00000453137
PCEGGARSCLVTESARGGLQFLQQCDREDLVELALPQLAQVVTVYEFLLMKVEKDHLAKPFFPAIYKEFEELHKMVKKMCQDYLSSSGLCSQETLEINNDKVAESLGITEFLRKKEIHPDNLGPKHLSRDMDGEQLEGASSEKREREAAEEGLASVKRPRREALSNDTTESLAANSRGREKPRPLHALAAGFSPPVNVTVSPRSEESHTTTVSGGNGSVFQAGPQLQALANLEARRGSIGAALSSRDVSGLPVYAQSGEPRRLTQAQVAAFPGENALEHSSDQDTWDSLRSPGFCSPLSSGGGAESLPPGGPGHAEAGHLGKVCDFHLNHQQPSPTSVLPTEVAAPPLEKILSVDSVAVDCAYRTVPKPGPQPGPHGSLLTEGCLRSLSGDLNRFPCGMEVHSGQRELESVVAVGEAMAFEISNGSHELLSQGQKQIFIQTSDGLILSPPGTIVSQEEDIVTVTDAEGRACGWAR

SEQ ID NO: 101536 - protein, 811 aa, Homo sapiens; identical to SEQ ID NO: 101534
  Payload ID: 20231
  Gene Name: zinc finger protein 839
  Uniprot ID: A8K0R7
  ENSP ID: ENSP00000453363

SEQ ID NO: 101537 - protein, 527 aa, Homo sapiens
  Payload ID: 20231
  Gene Name: zinc finger protein 839
  ENSP ID: ENSP00000453415
  MOD_RES (1)..(1): Any amino acid
XVEETLPSEPENGALLRSERYQGPRRRACSETLAESRTAVLQQRRAAQLPGGPAAAGEQRASPSKARLKEFLQQCDREDLVELALPQLAQVVTVYEFLLMKVEKDHLAKPFFPAIYKEFEELHKMVKKMCQDYLSSSGLCSQETLEINNDKVAESLGITEFLRKKEIHPDNLGPKHLSRDMDGEQLEGASSEKREREAAEEGLASVKRPRREALSNDTTESLAANSRGREKPRPLHALAAGEGFSPPVNVTVSPRSEESHTTTVSGGNGSVFQAGPQLQALANLEARRGSIGAALSSRDVSGLPVYAQSGEPRRLTQAQVAAFPGENALEHSSDQDTWDSLRSPGFCSPLSSGGGAESLPPGGPGHAEAGHLGKVCDFHLNHQQPSPTSVLPTEVAAPPLEKILSVDSVAVDCAYRTVPKPGPQPGPHGSLLTEGCLRSLSGDLNRFPCGMEVHSGQRELESVVAVGEAMAFEISNGSHELLSQGQKQIFIQTSDGLILSPPGTIVSQEEDIVTVTDAEGRACGWAR

SEQ ID NO: 101538 - protein, 493 aa, Homo sapiens
  Payload ID: 20231
  Gene Name: zinc finger protein 839
  ENSP ID: ENSP00000453515
AARRLRDAAQQAALQRGRGTEPPRLPRLLPPQQLEAICVKVTSGETKGQERPMLLPTTIQPQTARKSQLPRGNSCLVGLHIASPQLLRVQPLVRTEPQSCFLSDLCQPPAQGFVQRPLPALQVVPAKRVPAPKAPDEQGSMLTPLSASDPLAVTSLSSSSAHPFISNLHTRHTEKLKKSLKVKTRSGRVSRPPKYKAKDYKFIKTEDLADGHLSDSDDYSELCVEEDEDQRERHALFDLSSCSLRPKSFKCQTCEKSYIGKGGLARHFKLNPGHGQLDPEMVLSEKASGSTLRGCTEERTLSLTSLGLSMPADPCEGGARSCLVTESARGGLQNGQSVDVEETLPSEPENGALLRSERYQGPRRRACSETLAESRTAVLQQRRAAQLPGGPAAAGEQRASPSKARLKEFLQQCDREDLVELALPQLAQVVTVYEFLLMKVEKDHLAKPFFPAIYKEFEELHKMVKKMCQDYLSSSGLCSQETLEINNDKKTQK

SEQ ID NO: 101539 - protein, 144 aa, Homo sapiens
  Payload ID: 20231
  Gene Name: zinc finger protein 839
  ENSP ID: ENSP00000453744
  MOD_RES (1)..(1): Any amino acid
XVEKDHLAKPFFPAIYKEFEELHKMVKKMCQDYLSSSGLCSQETLEINNDKVAESLGITEFLRKKEIHPDNLGPKHLSRDMDGEQLEGASSEKREREAAEEGLASVKRPRREALSNDTTESLAANSRGREKPRPLHALAAVRRA

SEQ ID NO: 101540 - protein, 190 aa, Homo sapiens
  Payload ID: 20231
  Gene Name: zinc finger protein 839
  ENSP ID: ENSP00000454159
  MOD_RES (1)..(1): Any amino acid
XRACSETLAESRTAVLQQRRAAQLPGGPAAAGEQRASPSKARLKEFLQQCDREDLVELALPQLAQVVTVYEFLLMKVAESLGITEFLRKKEIHPDNLGPKHLSRDMDGEQLEGASSEKREREAAEEGLASVKRPRREALSNDTTESLAANSRGREKPRPLHALAAGTIVSQEEDIVTVTDAEGRACGWAR

SEQ ID NO: 101541 - protein, 738 aa, Homo sapiens
  Payload ID: 20232
  Gene Name: zinc finger protein 84
  Uniprot ID: P51523
  ENSP ID: ENSP00000331465
MTMLQESFSFDDLSVDFTQKEWQLLDPSQKNLYKDVMLENYSSLVSLGYEVMKPDVIFKLEQGEEPWVGDGEIPSSDSPEVWKVDGNMMWHQDNQDKLKIIKRGHECDAFGKNFNLNMNFVPLRKSNSEGDLDGLILKHHLDLLIPKGDYGKAESDDFNVFDNFFLHSKPEDTDTWLKYYDCDKYKESYKKSQIIIYHRNRLGEKLYECSECRKRFSKKPSLIKHQSRHIRDIAFGCGNCGKTFPQKSQFITHHRTHTGEKPYNCSQCGKAFSQKSQLTSHQRTHTGEKPYECGECGKAFSRKSHLISHWRTHTGEKPYGCNECGRAFSEKSNLINHQRIHTGEKPFECRECGKAFSRKSQLVTHHRTHTGTKPFGCSDCRKAFFEKSELIRHQTIHTGEKPYECSECRKAFRERSSLINHQRTHTGEKPHGCIQCGKAFSQKSHLISHQMTHTGEKPFICSKCGKAFSRKSQLVRHQRTHTGEKPYECSECGKAFSEKLSLTNHQRIHTGEKPYVCSECGKAFCQKSHLISHQRTHTGEKPYECSECGKAFGEKSSLATHQRTHTGEKPYECRDCEKAFSQKSQLNTHQRIHTGEKPYECSLCRKAFFEKSELIRHLRTHTGEKPYECNECRKAFREKSSLINHQRIHTGEKPFECSECGKAFSRKSHLIPHQRTHTGEKPYGCSECRKAFSQKSQLVNHQRIHTGEKPYRCIECGKAFSQKSQLINHQRTHTVKKS

SEQ ID NO: 101542 - protein, 738 aa, Homo sapiens; identical to SEQ ID NO: 101541
  Payload ID: 20232
  Gene Name: zinc finger protein 84
  Uniprot ID: P51523
  ENSP ID: ENSP00000376133

SEQ ID NO: 101543 - protein, 69 aa, Homo sapiens
  Payload ID: 20232
  Gene Name: zinc finger protein 84
  ENSP ID: ENSP00000387416
MTMLQESFSFDDLSVDFTQKEWQLLDPSQKNLYKDVMLENYSSLVSLGYEVMKPDVIFKLEQGEEPWVG

SEQ ID NO: 101544 - protein, 6 aa, Homo sapiens
  Payload ID: 20232
  Gene Name: zinc finger protein 84
  ENSP ID: ENSP00000437636
MTMLQV

SEQ ID NO: 101545 - protein, 737 aa, Homo sapiens
  Payload ID: 20232
  Gene Name: zinc finger protein 84
  ENSP ID: ENSP00000437949
MTMLQESFSFDDLSVDFTQKEWQLLDPSQKNLYKDVMLENYSSLVSLGYEVMKPDVIFKLEQGEEPWVGDGEIPSSDSPVWKVDGNMMWHQDNQDKLKIIKRGHECDAFGKNFNLNMNFVPLRKSNSEGDLDGLILKHHLDLLIPKGDYGKAESDDFNVFDNFFLHSKPEDTDTWLKYYDCDKYKESYKKSQIIIYHRNRLGEKLYECSECRKRFSKKPSLIKHQSRHIRDIAFGCGNCGKTFPQKSQFITHHRTHTGEKPYNCSQCGKAFSQKSQLTSHQRTHTGEKPYECGECGKAFSRKSHLISHWRTHTGEKPYGCNECGRAFSEKSNLINHQRIHTGEKPFECRECGKAFSRKSQLVTHHRTHTGTKPFGCSDCRKAFFEKSELIRHQTIHTGEKPYECSECRKAFRERSSLINHQRTHTGEKPHGCIQCGKAFSQKSHLISHQMTHTGEKPFICSKCGKAFSRKSQLVRHQRTHTGEKPYECSECGKAFSEKLSLTNHQRIHTGEKPYVCSECGKAFCQKSHLISHQRTHTGEKPYECSECGKAFGEKSSLATHQRTHTGEKPYECRDCEKAFSQKSQLNTHQRIHTGEKPYECSLCRKAFFEKSELIRHLRTHTGEKPYECNECRKAFREKSSLINHQRIHTGEKPFECSECGKAFSRKSHLIPHQRTHTGEKPYGCSECRKAFSQKSQLVNHQRIHTGEKPYRCIECGKAFSQKSQLINHQRTHTVKKS

SEQ ID NO: 101546 - protein, 78 aa, Homo sapiens
  Payload ID: 20232
  Gene Name: zinc finger protein 84
  ENSP ID: ENSP00000438982
MTMLQESFSFDDLSVDFTQKEWQLLDPSQKNLYKDVMLENYSSLVSLGYEVMKPDVIFKLEQGEEPWVGDGEIPSSDS

SEQ ID NO: 101547 - protein, 145 aa, Homo sapiens
  Payload ID: 20232
  Gene Name: zinc finger protein 84
  ENSP ID: ENSP00000439130
MTMLQESFSFDDLSVDFTQKEWQLLDPSQKNLYKDVMLENYSSLVSLGYEVMKPDVIFKLEQGEEPWVGDGEIPSSDSPVSGCFLPHGETWSAVREKNEAMMKAKSRKSPDCVPVPGSSGLHVQVHLCPFHVLIVEFFCEILQIS

SEQ ID NO: 101548 - protein, 84 aa, Homo sapiens
  Payload ID: 20232
  Gene Name: zinc finger protein 84
  ENSP ID: ENSP00000442963
MTMLQESFSFDDLSVDFTQKEWQLLDPSQKNLYKDVMLENYSSLVSLGYEVMKPDVIFKLEQGEEPWVGDGEIPSSDSPGTSIV

SEQ ID NO: 101549 - protein, 738 aa, Homo sapiens; identical to SEQ ID NO: 101541
  Payload ID: 20232
  Gene Name: zinc finger protein 84
  Uniprot ID: P51523
  ENSP ID: ENSP00000445549

SEQ ID NO: 101550 - protein, 236 aa, Homo sapiens
  Payload ID: 20232
  Gene Name: zinc finger protein 84
  ENSP ID: ENSP00000445820
MTMLQESFSFDDLSVDFTQKEWQLLDPSQKNLYKDVMLENYSSLVSLGYEVMKPDVIFKLEQGEEPWVGDGEIPSSDSPEVWKVDGNMMWHQDNQDKLKIIKRGHECDAFGKNFNLNMNFVPLRKSNSEGDLDGLILKHHLDLLIPKGDYGKAESDDFNVFDNFFLHSKPEDTDTWLKYYDCDKYKESYKKSQIIIYHRNRLGEKLYECSECRKRFSKKPSLIKHQSRHIRDIAFG

SEQ ID NO: 101551 - protein, 55 aa, Homo sapiens
  Payload ID: 20232
  Gene Name: zinc finger protein 84
  ENSP ID: ENSP00000445958
MTMLQESFSFDDLSVDFTQKEWQLLDPSQKNLYKDVMLENYSSLVSLGYEVMKPD

SEQ ID NO: 101552 - protein, 924 aa, Homo sapiens
  Payload ID: 20233
  Gene Name: zinc finger protein 841
  Uniprot ID: Q6ZN19
  ENSP ID: ENSP00000374185
MALPQGSLTFRDVAVEFSQEEWKCLDPVQKALYRDVMLENYRNLGFLGLCLPDLNIISMLEQGKEPWTVVSQVKIARNPNCGECMKGVITGISPKCVIKELPPIQNSNTGEKFQAVMLEGHESYDTENFYFREIRKNLQEVDFQWKDGEINYKEGPMTHKNNLTGQRVRHSQGDVENKHMENQLILRFQSGLGELQKFQTAEKIYGCNQIERTVNNCFLASPLQRIFPGVQTNISRKYGNDFLQLSLPTQDEKTHIREKPYIGNECGKAFRVSSSLINHQMIHTTEKPYRCNESGKAFHRGSLLTVHQIVHTRGKPYQCDVCGRIFRQNSDLVNHRRSHTGDKPYICNECGKSFSKSSHLAVHQRIHTGEKPYKCNRCGKCFSQSSSLATHQTVHTGDKPYKCNECGKTFKRNSSLTAHHIIHAGKKPYTCDVCGKVFYQNSQLVRHQIIHTGETPYKCNECGKVFFQRSRLAGHRRIHTGEKPYKCNECGKVFSQHSHLAVHQRVHTGEKPYKCNECGKAFNWGSLLTVHQRIHTGEKPYKCNVCGKVFNYGGYLSVHMRCHTGEKPLHCNKCGMVFTYYSCLARHQRMHTGEKPYKCNVCGKVFIDSGNLSIHRRSHTGEKPFQCNECGKVFSYYSCLARHRKIHTGEKPYKCNDCGKAYTQRSSLTKHLVIHTGENPYHCNEFGEAFIQSSKLARYHRNPTGEKPHKCSECGRTFSHKTSLVYHQRRHTGEMPYKCIECGKVFNSTTTLARHRRIHTGEKPYKCNECGKVFRYRSGLARHWSIHTGEKPYKCNECGKAFRVRSILLNHQMMHTGEKPYKCNECGKAFIERSNLVYHQRNHTGEKPYKCMECGKAFGRRSCLTKHQRIHSSEKPYKCNECGKSYISRSGLTKHQIKHAGENLTTKLNVERPLDVVLTSGIPK

SEQ ID NO: 101553 - protein, 808 aa, Homo sapiens
  Payload ID: 20233
  Gene Name: zinc finger protein 841
  Uniprot ID: Q6ZN19
  ENSP ID: ENSP00000415453
MLEGHESYDTENFYFREIRKNLQEVDFQWKDGEINYKEGPMTHKNNLTGQRVRHSQGDVENKHMENQLILRFQSGLGELQKFQTAEKIYGCNQIERTVNNCFLASPLQRIFPGVQTNISRKYGNDFLQLSLPTQDEKTHIREKPYIGNECGKAFRVSSSLINHQMIHTTEKPYRCNESGKAFHRGSLLTVHQIVHTRGKPYQCDVCGRIFRQNSDLVNHRRSHTGDKPYICNECGKSFSKSSHLAVHQRIHTGEKPYKCNRCGKCFSQSSSLATHQTVHTGDKPYKCNECGKTFKRNSSLTAHHIIHAGKKPYTCDVCGKVFYQNSQLVRHQIIHTGETPYKCNECGKVFFQRSRLAGHRRIHTGEKPYKCNECGKVFSQHSHLAVHQRVHTGEKPYKCNECGKAFNWGSLLTVHQRIHTGEKPYKCNVCGKVFNYGGYLSVHMRCHTGEKPLHCNKCGMVFTYYSCLARHQRMHTGEKPYKCNVCGKVFIDSGNLSIHRRSHTGEKPFQCNECGKVFSYYSCLARHRKIHTGEKPYKCNDCGKAYTQRSSLTKHLVIHTGENPYHCNEFGEAFIQSSKLARYHRNPTGEKPHKCSECGRTFSHKTSLVYHQRRHTGEMPYKCIECGKVFNSTTTLARHRRIHTGEKPYKCNECGKVFRYRSGLARHWSIHTGEKPYKCNECGKAFRVRSILLNHQMMHTGEKPYKCNECGKAFIERSNLVYHQRNHTGEKPYKCMECGKAFGRRSCLTKHQRIHSSEKPYKCNECGKSYISRSGLTKHQIKHAGENLTTKLNVERPLDVVLTSGIPK

SEQ ID NO: 101554 - protein, 90 aa, Homo sapiens
  Payload ID: 20233
  Gene Name: zinc finger protein 841
  ENSP ID: ENSP00000470100
MALPQGSLTFRDVAVEFSQEEWKCLDPVQKALYRDVMLENYRNLGFLGLCLPDLNIISMLEQGKEPWTVVSQVKIARNPNCGECMKGVIT

SEQ ID NO: 101555 - protein, 924 aa, Homo sapiens; identical to SEQ ID NO: 101552
  Payload ID: 20233
  Gene Name: zinc finger protein 841
  Uniprot ID: Q6ZN19
  ENSP ID: ENSP00000470746

SEQ ID NO: 101556 - protein, 512 aa, Homo sapiens
  Payload ID: 20233
  Gene Name: zinc finger protein 841
  ENSP ID: ENSP00000471190
  MOD_RES (1)..(1): Any amino acid
XNSNTGEKFQAVMLEGHESYDTENFYFREIRKNLQEVDFQWKDGEINYKEGPMTHKNNLTGQRVRHSQGDVENKHMENQLILRFQSGLGELQKFQTAEKIYGCNQIERTVNNCFLASPLQRIFPGVQTNISRKYGNDFLQLSLPTQDEKTHIREKPYIGNECGKAFRVSSSLINHQMIHTTEKPYRCNESGKAFHRGSLLTVHQIVHTRGKPYQCDVCGRIFRQNSDLVNHRRSHTGDKPYICNECGKSFSKSSHLAVHQRIHTGEKPYKCNRCGKCFSQSSSLATHQTVHTGDKPYKCNECGKTFKRNSSLTAHHIIHAGKKPYTCDVCGKVFYQNSQLVRHQIIHTGETPYKCNECGKVFRYRSGLARHWSIHTGEKPYKCNECGKAFRVRSILLNHQMMHTGEKPYKCNECGKAFIERSNLVYHQRNHTGEKPYKCMECGKAFGRRSCLTKHQRIHSSEKPYKCNECGKSYISRSGLTKHQIKHAGENLTTKLNVERPLDVVLTSGIPK

SEQ ID NO: 101557 - protein, 348 aa, Homo sapiens
  Payload ID: 20234
  Gene Name: zinc finger protein 843
  Uniprot ID: Q8N446
  ENSP ID: ENSP00000322899
MRSLPFALTVESVSARAPTCCSTGRFTQGRQPCKCKACGRGFTQSASLLQHWRVHSDWRETLSLSPVRQDLLWPLQPHQAPASPLGRSHSSAGVRQGFSGQLCCWLTKEHTLAEALRLSPVPAGFWGPVEADRPPANSHRRVCPFCCCSCGDSVNEKTSLSQRVLPHPGEKTCRGGSVESVSLAPSSVAPDSTSGLRPCGSPGSFLQHLPPSTLLPRPPFLYPGPPLSLQPLVPSGLPAVPAVPLGGLEVAQVPPATQPAAQQEGAMGPRSCASAGRDSREAVQAPGYPEPARKASQHRAAGPLGEARARLQRQCRAPPPPSNPHWRGALPVFPVWKASSRRSNLARH

SEQ ID NO: 101558 - protein, 293 aa, Homo sapiens
  Payload ID: 20234
  Gene Name: zinc finger protein 843
  ENSP ID: ENSP00000455858
MRSLPFALTVESVSARAPTCCSTGRFTQGRQPCKCKACGRGFTQSASLLQHWRVHSDWRETLSLSPVRQDLLWPLQPHQAPASPLGRSHSSAGVRQGFSGQLCCWLTKEHTLAEALRLSPVPAGFWGPVEADRPPANSHRRVCPFCCCSCGDSVNEKTSLSQRVLPHPGEKTCRGGSVESVSLAPSSVAPDSTSGLRPCGSPGSFLQHLPPSTLLPRPPFLYPGPPLTGITGAHHHAQLIFVFLVERGFDHAGQAGLELLTSGDPPTSASQSGGIIGMSHRTQPLLCFLDKYF

SEQ ID NO: 101559 - protein, 348 aa, Homo sapiens; identical to SEQ ID NO: 101557
  Payload ID: 20234
  Gene Name: zinc finger protein 843
  Uniprot ID: Q8N446
  ENSP ID: ENSP00000483573

SEQ ID NO: 101560 - protein, 666 aa, Homo sapiens
  Payload ID: 20235
  Gene Name: zinc finger protein 844
  Uniprot ID: Q08AG5
  ENSP ID: ENSP00000392024
MDLVAFEDVAVNFTQEEWSLLDPSQKNLYREVMQETLRNLASIGEKWKDQNIEDQYKNPRNNLRSLLGERVDENTEENHCGETSSQIPDDTLNKKTSPGVKSCESSVCGEVFVGHSSLNRHIRADTAHKPSEYQEYGQEPYKCQQRKKAFRCHPSFQMQEKAHTGEKLYDCKECGKTFISHSSIQRHMIMHNGDGTYKCKFCGKACPCLSIYLIHERVHTGEKPYKCKQCGKAFSYSTSLQIHERTHTGEKPYECKECGKAFGSPNSLYEHRRTHTGEKPYECKQCGKAFRWFHSFQIHERTHSEEKAYECTKCGKAFKCPSYLCRHEVTHSGKKPCECKQCGKALSYLNFQRHMKMHTRMRPYKCKTVEKPLILPVRFEDMKELTLERNLMNASTVVKPSIVPVPFTIMKGLTLERNPMNVSSVVKPSFLPLPFDIMKGLTLERNRMSVSNVGKPSDLPHTFKCMEGLTLKRNPMNVSSVVKPSFFPLPFDIMKGLTLERNPMSVSNVGKPSHLPHTFKCMKGLTLESNCMNLNNVKKPLDLSETFKFMKRHTLERNPIRNMEKHSTISLPFKYMQQCTEDRMPMNVKSVTKHSYLPRSFEYMQEHTLERNPMNVRNAEKRSIIFLLCVYTKGCTLERNHINVRIVGKHSVCLVPFVDIKGLTLE

SEQ ID NO: 101561 - protein, 71 aa, Homo sapiens
  Payload ID: 20235
  Gene Name: zinc finger protein 844
  ENSP ID: ENSP00000402097
MDLVAFEDVAVNFTQEEWSLLDPSQKNLYREVMQETLRNLASIEVFWERELMKIQKKIIVEKLLARFQMTH

SEQ ID NO: 101562 - protein, 96 aa, Homo sapiens
  Payload ID: 20235
  Gene Name: zinc finger protein 844
  ENSP ID: ENSP00000448588
MQEKAHTGEKLYDCKECGKTFISHSSIQRHMIMHNGDGTYKCKFCGKACPCLSIYLIHERVHTGEKPYKCKQCGKAFSYSTSLQIHERTHTGEKPY

SEQ ID NO: 101563 - protein, 970 aa, Homo sapiens
  Payload ID: 20236
  Gene Name: zinc finger protein 845
  Uniprot ID: Q96IR2
  ENSP ID: ENSP00000388311
MALSQGLLTFRDVAIEFSQEEWKCLDPAQRTLYRDVMLENYRNLVSLDISSKCMMKEFSSTAQGNTEVIHTGTLQRHERHHIGDFCFQEMEKDIHDFEFQWKEDERNSHEAPMTEIKQLTGSTNRHDQRHAGNKPIKDQLGSSFHSHLPELHMFQTEGKIGNQVEKSINSASLVSTSQRISCRPKTHISKNYGNNFLNSSLLTQKQEVHMREKSFQCNESGKAFNYSSVLRKHQIIHLGAKQYKCDVCGKVFNQKRYLACHRRCHTGKKPYKCNDCGKTFSQELTLTCHHRLHTGEKHYKCSECGKTFSRNSALVIHKAIHTGEKSYKCNECGKTFSQTSYLVYHRRLHTGEKPYKCEECDKAFSFKSNLERHRKIHTGEKPYKCNECSRTFSRKSSLTRHRRLHTGEKPYKCNDCGKTFSQMSSLVYHRRLHTGEKPYKCEECDEAFSFKSNLERHRRIHTGEKPYKCNDCGKTFSQTSSLVYHRRLHTGEKPYKCEECDEAFSFKSNLERHRIIHTGEKLYKCNECGKTFSRKSSLTRHCRLHTGEKPYQCNECGKAFRGQSALIYHQAIHGIGKLYKCNDCHQVFSNATTIANHWRIHNEERSYKCNRCGKFFRHRSYLAVHWRTHSGEKPYKCEECDEAFSFKSNLQRHRRIHTGEKPYRCNECGKTFSRKSYLTCHRRLHTGEKPYKCNECGKTFGRNSALIIHKAIHTGEKPYKCNECGKAFSQKSSLTCHLRLHTGEKPYKCEECDKVFSRKSSLEKHRRIHTGEKPYKCKVCDKAFGRDSHLAQHTRIHTGEKPYKCNECGKNFRHNSALVIHKAIHSGEKPYKCNECGKTFRHNSALEIHKAIHTGEKPYKCSECGKVFNRKANLSRHHRLHTGEKPYKCNKCGKVFNQQAHLACHHRIHTGEKPYKCNECGKTFRHNSVLVIHKTIHTGEKPYKCNECGKVFNRKAKLARHHRIHTGKKH

SEQ ID NO: 101564 - protein, 970 aa, Homo sapiens; identical to SEQ ID NO: 101563
  Payload ID: 20236
  Gene Name: zinc finger protein 845
  Uniprot ID: Q96IR2
  ENSP ID: ENSP00000470005

SEQ ID NO: 101565 - protein, 136 aa, Homo sapiens
  Payload ID: 20236
  Gene Name: zinc finger protein 845
  ENSP ID: ENSP00000472689
MALSQGLLTFRDVAIEFSQEEWKCLDPAQRTLYRDVMLENYRNLVSLDISSKCMMKEFSSTAQGNTEVIHTGTLQRHERHHIGDFCFQEMEKDIHDFEFQWKEDERNSHEAPMTEIKQLTGSTNRHDQRHAGNKPI

SEQ ID NO: 101566 - protein, 533 aa, Homo sapiens
  Payload ID: 20237
  Gene Name: zinc finger protein 846
  Uniprot ID: Q147U1
  ENSP ID: ENSP00000380999
MDSSQHLVTFEDVAVDFTQEEWTLLDQAQRDLYRDVMLENYKNLIILAGSELFKRSLMSGLEQMEELRTGVTGVLQELDLQLKTKGSPLLQDISAERSPNGVQLERSNTAEKLYDSNHSGKVFNEHPFLMTHMITHIGEKTSEDNQSGKALRKNFPHSFYKKSHAEGKMPKCVKHEKAFNQFPNLTRQNKTHTQEKLCECKDCWRTFLNQSSLKLHIRSHNGDKHYVCKECGKAFSNSSHLIGHGRIHSGEKPYVCKECGKAFTQSTGLKLHIRTHSGEKPYKCKECGKAFTHSSYLTDHTRIHSGKKPYVCMECGKAFTRSTGLILHMRIHTGEKPYECKECGKAFIHSSYLTKHVRIHSGEKLYLCKACGKAFTRSSGLVLHMRTHTGEKPYECKECGKAFNNSSMLSQHVRIHTGEKPYECKECGKAFTQSSGLSTHLRTHTGEKACECKECGKAFARSTNLNMHMRTHTGEKPYACKECGKAFRYSTYLNVHTRTHTGAKPYECKKCGKNFTQSSALAKHLRTKACEKT

SEQ ID NO: 101567 - protein, 210 aa, Homo sapiens
  Payload ID: 20237
  Gene Name: zinc finger protein 846
  Uniprot ID: Q147U1
  ENSP ID: ENSP00000465467
MTHMITHIGEKTSEDNQSGKALRKNFPHSFYKKSHAEGKMPKCVKHEKAFNQFPNLTRQNKTHTQEKLCECKDCWRTFLNQSSLKLHIRSHNGDKHYVCKECGKAFSNSSHLIGHGRIHSGEKPYVCKECGKAFTQSTGLKLHIRTHSGEKPYKCKECGKAFTHSSYLTDHTRIHSGKKPYVCMECGKAFTRSTGLILHMRIHTGEKPYE

SEQ ID NO: 101568 - protein, 99 aa, Homo sapiens
  Payload ID: 20237
  Gene Name: zinc finger protein 846
  ENSP ID: ENSP00000466175
MDSSQHLVTFEDVAVDFTQEEWTLLDQAQRDLYRDVMLENYKNLIILAGSELFKRSLMSGLEQMEELRTGVTGVLQELDLQLKTKGSPLLQDISAERSP

SEQ ID NO: 101569 - protein, 86 aa, Homo sapiens
  Payload ID: 20237
  Gene Name: zinc finger protein 846
  ENSP ID: ENSP00000466236
MDSSQHLVTFEDVAVDFTQEEWTLLDQAQRDLYRDVMLENYKNLIILAGSELFKRSLMSGLEQMEELRTGVTGVLQGEKQYCRETV

SEQ ID NO: 101570 - protein, 175 aa, Homo sapiens
  Payload ID: 20237
  Gene Name: zinc finger protein 846
  ENSP ID: ENSP00000466547
MDSSQHLVTFEDVAVDFTQEEWTLLDQAQRDLYRDVMLENYKNLIILGSELFKRSLMSGLEQMEELRTGVTGVLQELDLQLKTKGSPLLQDISAERSPNGVQLERSNTAEKLYDSNHSGKVFNEHPFLMTHMITHIGEKTSEDNQSGKALRKNFPHSFYKKSHAEGKMPKCVKHE

SEQ ID NO: 101571 - protein, 81 aa, Homo sapiens
  Payload ID: 20237
  Gene Name: zinc finger protein 846
  ENSP ID: ENSP00000466599
MDSSQHLVTFEDVAVDFTQEEWTLLDQAQRDLYRDVMLENYKNLIILAGSELFKRSLMSGLEQMEELRTGVTGVLQGEKQY

SEQ ID NO: 101572 - protein, 86 aa, Homo sapiens; identical to SEQ ID NO: 101569
  Payload ID: 20237
  Gene Name: zinc finger protein 846
  ENSP ID: ENSP00000467021

SEQ ID NO: 101573 - protein, 210 aa, Homo sapiens; identical to SEQ ID NO: 101567
  Payload ID: 20237
  Gene Name: zinc finger protein 846
  Uniprot ID: Q147U1
  ENSP ID: ENSP00000467891

SEQ ID NO: 101574 - protein, 87 aa, Homo sapiens
  Payload ID: 20238
  Gene Name: zinc finger protein 85
  Uniprot ID: Q03923
  ENSP ID: ENSP00000300540
MGPLTFRDVAIEFSLKEWQCLDTAQRNLYRNVMLENYRNLVFLGITVSKPDLITCLEQGKEAWSMKRHEIMVAKPTESYSVTQSGMQ

SEQ ID NO: 101575 - protein, 595 aa, Homo sapiens
  Payload ID: 20238
  Gene Name: zinc finger protein 85
  Uniprot ID: Q03923
  ENSP ID: ENSP00000329793
MGPLTFRDVAIEFSLKEWQCLDTAQRNLYRNVMLENYRNLVFLGITVSKPDLITCLEQGKEAWSMKRHEIMVAKPTVMCSHFAQDLWPEQNIKDSFQKVTLKRYGKCRHENLPLRKGCESMDECKMHKGGCNGLNQCLTATQSKIFQCDKYVKVAHKFSNSNRHEIRHTKKKPFKCTKCGKSFGMISCLTEHSRIHTRVNFYKCEECGKAFNWSSTLTKHKRIHTGEKPYKCEECGKAFNQSSNLIKHKKIHTGEKPYKCEECGKTFNRFSTLTTHKIIHTGEKPYKCKECGKAFNRSSTLTTHRKIHTGEKPYKCEECGKAFKQSSNLTTHKIIHTGEKPYKCKKCGKAFNQSAHLTTHEVIHTGEKPYKCEKCGKAFNHFSHLTTHKIIHTGEKPYKCKECGKAFKHSSTLTKHKIIHTGEKPYKCKECEKAFNQSSKLTEHKKIHTGEKPYECEKCGKAFNQSSNLTRHKKSHTEEKPYKCEECGKGFKWPSTLTIHKIIHTGEKPYKCEECGKAFNQSSKLTKHKKIHTGEKPYTCEECGKAFNQSSNLTKHKRIHTGEKPYKCEECDKAFKWSSVLTKHKIIHTGEKLQI

SEQ ID NO: 101576 - protein, 562 aa, Homo sapiens
  Payload ID: 20238
  Gene Name: zinc finger protein 85
  Uniprot ID: Q03923
  ENSP ID: ENSP00000342340
MGPLTFRDVAIEFSLKEWQCLDTAQRNLYRNVMLENYRNLVFLVMCSHFAQDLWPEQNIKDSFQKVTLKRYGKCRHENLPLRKGCESMDECKMHKGGCNGLNQCLTATQSKIFQCDKYVKVAHKFSNSNRHEIRHTKKKPFKCTKCGKSFGMISCLTEHSRIHTRVNFYKCEECGKAFNWSSTLTKHKRIHTGEKPYKCEECGKAFNQSSNLIKHKKIHTGEKPYKCEECGKTFNRFSTLTTHKIIHTGEKPYKCKECGKAFNRSSTLTTHRKIHTGEKPYKCEECGKAFKQSSNLTTHKIIHTGEKPYKCKKCGKAFNQSAHLTTHEVIHTGEKPYKCEKCGKAFNHFSHLTTHKIIHTGEKPYKCKECGKAFKHSSTLTKHKIIHTGEKPYKCKECEKAFNQSSKLTEHKKIHTGEKPYECEKCGKAFNQSSNLTRHKKSHTEEKPYKCEECGKGFKWPSTLTIHKIIHTGEKPYKCEECGKAFNQSSKLTKHKKIHTGEKPYTCEECGKAFNQSSNLTKHKRIHTGEKPYKCEECDKAFKWSSVLTKHKIIHTGEKLQI

SEQ ID NO: 101577 - protein, 146 aa, Homo sapiens
  Payload ID: 20238
  Gene Name: zinc finger protein 85
  ENSP ID: ENSP00000469243
MGPLTFRDVAIEFSLKEWQCLDTAQRNLYRNVMLENYRNLVFLGITVSKPDLITCLEQGKEAWSMKRHEIMVAKPTGEVSRCRPGWSTECNGAISAHCSLRLLGSSNSPASASQVAEITGMRHHARLIFVFLVEVGFHHVGHAGLE

SEQ ID NO: 101578 - protein, 55 aa, Homo sapiens
  Payload ID: 20238
  Gene Name: zinc finger protein 85
  ENSP ID: ENSP00000469496
MLENYRNLVFLGITVSKPDLITCLEQGKEAWSMKRHEIMVAKPTESYSVTQSGMQ

SEQ ID NO: 101579 - protein, 231 aa, Homo sapiens
  Payload ID: 20238
  Gene Name: zinc finger protein 85
  ENSP ID: ENSP00000469673
MSYELLRKVYILMLLRSVLYASVRIMCSHFAQDLWPEQNIKDSFQKVTLKRYGKCRHENLPLRKGCESMDECKMHKGGCNGLNQCLTATQSKIFQCDKYVKVAHKFSNSNRHEIRHTKKKPFKCTKCGKSFGMISCLTEHSRIHTRVNFYKCEECGKAFNWSSTLTKHKRIHTGEKPYKCEECGKAFNQSSNLIKHKKIHTGEKPYKCEECGKTFNRFSTLTTHKIIHTGE

SEQ ID NO: 101580 - protein, 122 aa, Homo sapiens
  Payload ID: 20238
  Gene Name: zinc finger protein 85
  ENSP ID: ENSP00000470347
MGPLTFRDVAIEFSLKEWQCLDTAQRNLYRNVMLENYRNLVFLGITVSKPDLITCLEQGKEAWSMKRHEIMVAKPTGCLSKRMSYELLRKVYILMLLRSVLYASVRIMCSHFAQDLWPEQNI

SEQ ID NO: 101581 - protein, 129 aa, Homo sapiens
  Payload ID: 20238
  Gene Name: zinc finger protein 85
  ENSP ID: ENSP00000470667
MKRHEIMVAKPTVMCSHFAQDLWPEQNIKDSFQKVTLKRYGKCRHENLPLRKGCESMDECKMHKGGCNGLNQCLTATQSKIFQCDKYVKVAHKFSNSNRHEIRHTKKKPFKCTKCGKSFGMISCLTEHS

SEQ ID NO: 101582 - protein, 119 aa, Homo sapiens
  Payload ID: 20238
  Gene Name: zinc finger protein 85
  ENSP ID: ENSP00000471286
MGPLTFRDVAIEFSLKEWQCLDTAQRNLYRNVMLENYRNLVFLDLITCLEQGKEAWSMKRHEIMVAKPTVMCSHFAQDLWPEQNIKDSFQKVTLKRYGKCRHENLPLRKGCESMDECKM

SEQ ID NO: 101583 - protein, 62 aa, Homo sapiens
  Payload ID: 20238
  Gene Name: zinc finger protein 85
  ENSP ID: ENSP00000471467
MGPLTFRDVAIEFSLKEWQCLDTAQRNLYRNVMLENYRNLVFLARPDHLSGARERGLEYEET

SEQ ID NO: 101584 - protein, 234 aa, Homo sapiens
  Payload ID: 20238
  Gene Name: zinc finger protein 85
  ENSP ID: ENSP00000471588
MCSHFAQDLWPEQNIKDSFQKVTLKRYGKCRHENLPLRKGCESMDECKMHKGGCNGLNQCLTATQSKIFQCDKYVKVAHKFSNSNRHEIRHTKKKPFKCTKCGKSFGMISCLTEHSRIHTRVNFYKCEECGKAFNWSSTLTKHKRIHTGEKPYKCEECGKAFNQSSNLIKHKKIHTGEKPYKCEECGKTFNRFSTLTTHKIIHTGEKPYKCKECGKAFNRSSTLTTHRKIHTGE

SEQ ID NO: 101585 - protein, 509 aa, Homo sapiens
  Payload ID: 20238
  Gene Name: zinc finger protein 85
  ENSP ID: ENSP00000472145
MSYELLRKVYILMLLRSVLYASVRIMCSHFAQDLWPEQNIKDSFQKVTLKRYGKCRHENLPLRKGCESMDECKMHKGGCNGLNQCLTATQSKIFQCDKYVKVAHKFSNSNRHEIRHTKKKPFKCTKCGKSFGMISCLTEHSRIHTRVNFYKCEECGKAFNWSSTLTKHKRIHTGEKPYKCEECGKAFNQSSNLIKHKKIHTGEKPYKCEECGKTFNRFSTLTTHKIIHTGEKPYKCKECGKAFNRSSTLTTHRKIHTGEKPYKCEECGKAFKQSSNLTTHKIIHTGEKPYKCKKCGKAFNQSAHLTTHEVIHTGEKPYKCEKCGKAFNHFSHLTTHKIIHTGEKPYKCKECGKAFKHSSTLTKHKIIHTGEKPYKCKECEKAFNQSSKLTEHKKIHTGEKPYECEKCGKAFNQSSNLTRHKKSHTEEKPYKCEECGKGFKWPSTLTIHKIIHTGEKPYKCEECGKAFNQSSKLTKHKKIHTGEKPYTCEECGKAFNQSSNLTKHKRIHT

SEQ ID NO: 101586 - protein, 141 aa, Homo sapiens
  Payload ID: 20238
  Gene Name: zinc finger protein 85
  ENSP ID: ENSP00000473059
MCSHFAQDLWPEQNIKDSFQKVTLKRYGKCRHENLPLRKGCESMDECKMHKGGCNGLNQCLTATQSKIFQCDKYVKVAHKFSNSNRHEIRHTKKKPFKCTKCGKSFGMISCLTEHSRIHTRVNFYKCEECGKAFNWSSTLT

SEQ ID NO: 101587 - protein, 536 aa, Homo sapiens
  Payload ID: 20238
  Gene Name: zinc finger protein 85
  ENSP ID: ENSP00000478096
MSLSAQPSSSFYKPVSEVMCSHFAQDLWPEQNIKDSFQKVTLKRYGKCRHENLPLRKGCESMDECKMHKGGCNGLNQCLTATQSKIFQCDKYVKVAHKFSNSNRHEIRHTKKKPFKCTKCGKSFGMISCLTEHSRIHTRVNFYKCEECGKAFNWSSTLTKHKRIHTGEKPYKCEECGKAFNQSSNLIKHKKIHTGEKPYKCEECGKTFNRFSTLTTHKIIHTGEKPYKCKECGKAFNRSSTLTTHRKIHTGEKPYKCEECGKAFKQSSNLTTHKIIHTGEKPYKCKKCGKAFNQSAHLTTHEVIHTGEKPYKCEKCGKAFNHFSHLTTHKIIHTGEKPYKCKECGKAFKHSSTLTKHKIIHTGEKPYKCKECEKAFNQSSKLTEHKKIHTGEKPYECEKCGKAFNQSSNLTRHKKSHTEEKPYKCEECGKGFKWPSTLTIHKIIHTGEKPYKCEECGKAFNQSSKLTKHKKIHTGEKPYTCEECGKAFNQSSNLTKHKRIHTGEKPYKCEECDKAFKWSSVLTKHKIIHTGEKLQI

SEQ ID NO: 101588 - protein, 87 aa, Homo sapiens; identical to SEQ ID NO: 101574
  Payload ID: 20238
  Gene Name: zinc finger protein 85
  Uniprot ID: Q03923
  ENSP ID: ENSP00000479120

SEQ ID NO: 101589 - protein, 562 aa, Homo sapiens; identical to SEQ ID NO: 101576
  Payload ID: 20238
  Gene Name: zinc finger protein 85
  Uniprot ID: Q03923
  ENSP ID: ENSP00000479316

SEQ ID NO: 101590 - protein, 595 aa, Homo sapiens; identical to SEQ ID NO: 101575
  Payload ID: 20238
  Gene Name: zinc finger protein 85
  Uniprot ID: Q03923
  ENSP ID: ENSP00000483118

SEQ ID NO: 101591 - protein, 55 aa, Homo sapiens; identical to SEQ ID NO: 101578
  Payload ID: 20238
  Gene Name: zinc finger protein 85
  ENSP ID: ENSP00000485121

SEQ ID NO: 101592 - protein, 62 aa, Homo sapiens; identical to SEQ ID NO: 101583
  Payload ID: 20238
  Gene Name: zinc finger protein 85
  ENSP ID: ENSP00000485138

SEQ ID NO: 101593 - protein, 129 aa, Homo sapiens; identical to SEQ ID NO: 101581
  Payload ID: 20238
  Gene Name: zinc finger protein 85
  ENSP ID: ENSP00000485174

SEQ ID NO: 101594 - protein, 146 aa, Homo sapiens; identical to SEQ ID NO: 101577
  Payload ID: 20238
  Gene Name: zinc finger protein 85
  ENSP ID: ENSP00000485250

SEQ ID NO: 101595 - protein, 122 aa, Homo sapiens; identical to SEQ ID NO: 101580
  Payload ID: 20238
  Gene Name: zinc finger protein 85
  ENSP ID: ENSP00000485354

SEQ ID NO: 101596 - protein, 119 aa, Homo sapiens; identical to SEQ ID NO: 101582
  Payload ID: 20238
  Gene Name: zinc finger protein 85
  ENSP ID: ENSP00000485573

SEQ ID NO: 101597 - protein, 1090 aa, Homo sapiens
  Payload ID: 20239
  Gene Name: zinc finger protein 850
  Uniprot ID: A8MQ14
  ENSP ID: ENSP00000464976
MNMEGLVMFQDLSIDFSQEEWECLDAAQKDLYRDVMMENYSSLVSLGLSIPKPDVISLLEQGKEPWMVSRDVLGGWCRDSEFRCKTKDSCLPKEIYEVTSSQWVRMEKCHSLVGSSVRDDWECKGQFQHQDINQERYLEKAIMTYETTPTFCLQTSLTLHHRIHPGEKLYKSTECMAFKYGSELTQQQETHTGEKLYKCKECGKAFHHFSYLVKHQRIHTGEKPCACKEYGKAFISGSHLIQHQKMYTDERPHECQESVKAFRPSAHLIQHWRIHTGDKPYECKECGKSFTSGSTLNQHQQIHTGEKPYHCKQCGKSFTVGSTLIRHQQIHTGEKPYDCKECGKSFASGSALIRHQRIHTGEKPYDCKECGKSFTFHSALIRHQRIHTGEKPYDCKECGKSFTFRSGLIGHQAIHTGEKPYDCKECGKSFTAGSTLIQHQRIHTGEKPYDCKECGKSFASGSALLQHQRIHTGEKPYCCKECGKSFTFRSTRNRHQRIHTGEKPYNCKECGKSFASGSALLQHQRIHTGEKPYHCKECGKSFTFRSGLIGHQAVHTGEKPYDCKECGKSFTSRSALIQHQRIHTGEKPYHCKECGKSFTVGSTLLQHQQIHTGEKPYDCKECGKAFRLRLRLTQHQQIHTGEKPYQCQECGKAFVSVSGLTQHHRIHTGEKPYECPDCGKAFRQRTYLNQHRRIHTGEKPYECKECGKSFTFCSGLIQHQQNHTDEKPYDGKECGKSFTSHSTLIQHQQIHTGEKPYDCKECGKSFTSHSTLIQHQQIHTGEKLYDCKECGKSFTSHSTLIQHQPLHTGEKPYHCKECGKSFTLRSALIQHRPVHTGEKRYSCKECGKSFTSRSTLIEHQRIHTGEKPYHCKECGKSFAFRSAIIQHRRIHTGEKPYDCKECGKAFRRRSKLTQHQRIHTGEKPYRCHECGKAFVRFSGLTKHHSIHTGEKPYECKTCGKSFRQRTHLTLHQRIHTGDRPYECKECGKSFTCGSELIRHQRTHTGEKPYDCKECGKAFRCPSQLSQHKRIHTGEKTYQCPECGKAFFYASGLSRHQSVHTGEKPYECKTCGKAFKQLTQLTRHQRIHDLT

SEQ ID NO: 101598 - protein, 84 aa, Homo sapiens
  Payload ID: 20239
  Gene Name: zinc finger protein 850
  ENSP ID: ENSP00000465189
MNMEGLVMFQDLSIDFSQEEWECLDAAQKDLYRDVMMENYSSLVSLGLSIPKPDVISLLEQGKEPWMVSRDVLGGWCRDRMKKA

SEQ ID NO: 101599 - protein, 1058 aa, Homo sapiens
  Payload ID: 20239
  Gene Name: zinc finger protein 850
  ENSP ID: ENSP00000483509
MNMEGLVMFQDLSIDFSQEEWECLDAAQKDLYRDVMMENYSSLVSLDSEFRCKTKDSCLPKEIYEVTSSQWVRMEKCHSLVGSSVRDDWECKGQFQHQDINQERYLEKAIMTYETTPTFCLQTSLTLHHRIHPGEKLYKSTECMAFKYGSELTQQQETHTGEKLYKCKECGKAFHHFSYLVKHQRIHTGEKPCACKEYGKAFISGSHLIQHQKMYTDERPHECQESVKAFRPSAHLIQHWRIHTGDKPYECKECGKSFTSGSTLNQHQQIHTGEKPYHCKQCGKSFTVGSTLIRHQQIHTGEKPYDCKECGKSFASGSALIRHQRIHTGEKPYDCKECGKSFTFHSALIRHQRIHTGEKPYDCKECGKSFTFRSGLIGHQAIHTGEKPYDCKECGKSFTAGSTLIQHQRIHTGEKPYDCKECGKSFASGSALLQHQRIHTGEKPYCCKECGKSFTFRSTRNRHQRIHTGEKPYNCKECGKSFASGSALLQHQRIHTGEKPYHCKECGKSFTFRSGLIGHQAVHTGEKPYDCKECGKSFTSRSALIQHQRIHTGEKPYHCKECGKSFTVGSTLLQHQQIHTGEKPYDCKECGKAFRLRLRLTQHQQIHTGEKPYQCQECGKAFVSVSGLTQHHRIHTGEKPYECPDCGKAFRQRTYLNQHRRIHTGEKPYECKECGKSFTFCSGLIQHQQNHTDEKPYDGKECGKSFTSHSTLIQHQQIHTGEKPYDCKECGKSFTSHSTLIQHQQIHTGEKLYDCKECGKSFTSHSTLIQHQPLHTGEKPYHCKECGKSFTLRSALIQHRPVHTGEKRYSCKECGKSFTSRSTLIEHQRIHTGEKPYHCKECGKSFAFRSAIIQHRRIHTGEKPYDCKECGKAFRRRSKLTQHQRIHTGEKPYRCHECGKAFVRFSGLTKHHSIHTGEKPYECKTCGKSFRQRTHLTLHQRIHTGDRPYECKECGKSFTCGSELIRHQRTHTGEKPYDCKECGKAFRCPSQLSQHKRIHTGEKTYQCPECGKAFFYASGLSRHQSVHTGEKPYECKTCGKAFKQLTQLTRHQRIHDLT

SEQ ID NO: 101600 - protein, 543 aa, Homo sapiens
  Payload ID: 20240
  Gene Name: zinc finger protein 852
  Uniprot ID: Q6ZMS4
  ENSP ID: ENSP00000389841
MVRPQDTVAYEDLSEDYTQKKWKGLALSQRALHWNMMLENDRSMASLGRNMMESSELTPKQEIFKGSESSNSTSGGLFGVVPGGTETGDVCEDTFKELEGQPSNEEGSRLESDFLEIIDEDKKKSTKDRYEEYKEVEEHPPLSSSPVEHEGVLKGQKSYRCDECGKAFYWSSHLIGHRRIHTGEKPYECNECGKTFRQTSQLIVHLRTHTGEKPYECSECGKAYRHSSHLIQHQRLHNGEKPYKCNECAKAFNQSSKLFDHQRTHTGEKPYECKECGAAFSRSKNLVRHQFLHTGKKPYKCNECGRAFCSNRNLIDHQRTHTGEKPYKCNECGKAFSRSKCLIRHQSLHTGEKPYKCSECGKAFNQISQLVEHERIHTGEKPFKCSECGKAFGLSKCLIRHQRLHTSEKPYKCNECGKSFNQNSYLIIHQRIHTGEKPYECNECGKVFSYNSSLMVHQRTHTGEKPYKCNSCGKAFSDSSQLTVHQRVHTGEKNLMNVLSVGKPLVSVPLLITTSELMLERSPQVWLGHLLKAWFSETDSKDL

SEQ ID NO: 101601 - protein, 529 aa, Homo sapiens
  Payload ID: 20240
  Gene Name: zinc finger protein 852
  ENSP ID: ENSP00000482223
MVRPQDTVAYEDLSEDYTQKKWKGLALSQRALHWNMMLENDRSMASLGRNMMESSELTPKQEIFKGSESSNSTSGGLFGVVPGGTETGDVCEDTFKELEGQPSNEEGSRLESDFLEIIDEDKKKSTKDRYEEYKEVEEHPPLSSSPVEHEGVLKGQKSYRCDECGKAFYWSSHLIGHRRIHTGEKPYECNECGKTFRQTSQLIVHLRTHTGEKPYECSECGKAYRHSSHLIQHQRLHNGEKPYKCNECAKAFNQSSKLFDHQRTHTGEKPYECKECGAAFSRSKNLVRHQFLHTGKKPYKCNECGRAFCSNRNLIDHQRTHTGEKPYKCNECGKAFSRSKCLIRHQSLHTGEKPYKCSECGKAFNQISQLVEHERIHTGEKPFKCSECGKAFGLSKCLIRHQRLHTSEKPYKCNECGKSFNQNSYLIIHQRIHTGEKPYECNECGKVFSYNSSLMVHQRTHTGEKPYKCNSCGKAFSDSSQLTVHQRVHTGEPYECIECGKAFSQRSTFNHHQRTHAGEKPSGLARSSS

SEQ ID NO: 101602 - protein, 543 aa, Homo sapiens; identical to SEQ ID NO: 101600
  Payload ID: 20240
  Gene Name: zinc finger protein 852
  Uniprot ID: Q6ZMS4
  ENSP ID: ENSP00000487256

SEQ ID NO: 101603 - protein, 529 aa, Homo sapiens; identical to SEQ ID NO: 101601
  Payload ID: 20240
  Gene Name: zinc finger protein 852
  ENSP ID: ENSP00000487322

SEQ ID NO: 101604 - protein, 659 aa, Homo sapiens
  Payload ID: 20241
  Gene Name: zinc finger protein 853
  Uniprot ID: P0CG23
  ENSP ID: ENSP00000455585
MLHQPTPGNRGLTARMEVGPATETFVLELQCLEDGGPGPDTLSGGSGGSESQEEEEPQERNSSPQRPAVSAPVGASEIAEETRPGQRELQLQQLEQQPEPQQQPQHEQLQQPQPHLELQQQPQQDGQQQLSQLQQEKHQSVHHQELKPELQLMHQQQQLQPQQVQEQQRLQQQQEQLQTQQAQEQQVLQQQEQLQQQVQEQQLLQQQQEQLQQQQLLQQQEQLQQQQFQQQQEQLQQQQQLLLLQQQGQLQQQLLQQQQAQLQQQLLEQQQAQLQQQLLLQQQEQLQQQQQQQLLQQQQEQLQQQQLQPPPLEPEEEEEVELELMPVDLGSEQELEQQRQELERQQELERQQEQRQLQLKLQEELQQLEQQLEQQQQQLEQQEVQLELTPVELGAQQQEVQLELTPVQPELQLELVPAAGGGGAAVPGAPAAVVVAPPGYVVVQELMVLPAVAAPAVVAIPGPAGSAALTPARQRRRRRARDRPTICGECGKGFSRSTDLVRHQATHTGERPHRCGECGKGFSQHSNLVTHQRIHTGEKPYACSYCAKRFSESSALVQHQRTHTGERPYACGDCGKRFSVSSNLLRHRRTHSGERPYVCEDCGERFRHKVQIRRHERQLHGAGRSRGLGLLRASRPAALGGPARAEQAATATAPADKAL

SEQ ID NO: 101605 - protein, 632 aa, Homo sapiens
  Payload ID: 20242
  Gene Name: zinc finger protein 860
  Uniprot ID: A6NHJ4
  ENSP ID: ENSP00000373274
MLREEAAQKRKEKEPGMALPQGHLTFRDVAIEFSLEEWKCLDPTQRALYRAMMLENYRNLHSVDISSKCMMKKFSSTAQGNTEVDTGTLERHESHHIGDFCFQKIGKDIHDFEFQWQEDKRNSHEATMTQIKKLTGSTDRYDRRHPGNKPIKDQLGLSFHSHLPELHIFQTKGKVGNQVEKSINDASSVLTSQRISSRPKIHISNNYENNFFHSSLLTLKQEVHIREKSFQCNESGKAFNCSSLLRKHQIIYLGGKQYKCDVCGKVFNQKRYLACHHRCHTGEKPYKCNECGKVFNQQSNLASHHRLHTGEKPYKCEECDKVFSRKSNLERHRRIHTGEKPYKCKVCEKAFRRDSHLTQHTRIHTGEKPYKCNECGKAFSGQSTLIHHQAIHGIGKLYKCNDCHKVFSNATTIANHWRIHNEERSYKCNKCGKFFRRRSYLVVHWRTHTGEKPYKCNECGKTFHHNSALVIHKAIHTGEKPYKCNECGKTFRHNSALVIHKAIHTGEKPYKCNECGKVFNQQATLARHHRLHTGEKPYKCEECDTVFSRKSHHETHKRIHTGEKPYKCDDFDEAFSQASSYAKQRRIHMGEKHHKCDDCGKAFTSHSHRIRHQRIHTGQKSYKCHKRGKVFS

SEQ ID NO: 101606 - protein, 1169 aa, Homo sapiens
  Payload ID: 20243
  Gene Name: zinc finger protein 862
  Uniprot ID: O60290
  ENSP ID: ENSP00000223210
MEPRESGKAPVTFDDITVYLLQEEWVLLSQQQKELCGSNKLVAPLGPTVANPELFRKFGRGPEPWLGSVQGQRSLLEHHPGKKQMGYMGEMEVQGPTRESGQSLPPQKKAYLSHLSTGSGHIEGDWAGRNRKLLKPRSIQKSWFVQFPWLIMNEEQTALFCSACREYPSIRDKRSRLIEGYTGPFKVETLKYHAKSKAHMFCVNALAARDPIWAARFRSIRDPPGDVLASPEPLFTADCPIFYPPGPLGGFDSMAELLPSSRAELEDPGGDGAIPAMYLDCISDLRQKEITDGIHSSSDINILYNDAVESCIQDPSAEGLSEEVPVVFEELPVVFEDVAVYFTREEWGMLDKRQKELYRDVMRMNYELLASLGPAAAKPDLISKLERRAAPWIKDPNGPKWGKGRPPGNKKMVAVREADTQASAADSALLPGSPVEARASCCSSSICEEGDGPRRIKRTYRPRSIQRSWFGQFPWLVIDPKETKLFCSACIERPNLHDKSSRLVRGYTGPFKVETLKYHEVSKAHRLCVNTVEIKEDTPHTALVPEISSDLMANMEHFFNAAYSIAYHSRPLNDFEKILQLLQSTGTVILGKYRNRTACTQFIKYISETLKREILEDVRNSPCVSVLLDSSTDASEQACVGIYIRYFKQMEVKESYITLAPLYSETADGYFETIVSALDELDIPFRKPGWVVGLGTDGSAMLSCRGGLVEKFQEVIPQLLPVHCVAHRLHLAVVDACGSIDLVKKCDRHIRTVFKFYQSSNKRLNELQEGAAPLEQEIIRLKDLNAVRWVASRRRTLHALLVSWPALARHLQRVAEAGGQIGHRAKGMLKLMRGFHFVKFCHFLLDFLSIYRPLSEVCQKEIVLITEVNATLGRAYVALESLRHQAGPKEEEFNASFKDGRLHGICLDKLEVAEQRFQADRERTVLTGIEYLQQRFDADRPPQLKNMEVFDTMAWPSGIELASFGNDDILNLARYFECSLPTGYSEEALLEEWLGLKTIAQHLPFSMLCKNALAQHCRFPLLSKLMAVVVCVPISTSCCERGFKAMNRIRTDERTKLSNEVLNMLMMTAVNGVAVTEYDPQPAIQHWYLTSSGRRFSHVYTCAQVPARSPASARLRKEEMGALYVEEPRTQKPPILPSREAAEVLKDCIMEPPERLLYPHTSQEAPGMS

SEQ ID NO: 101607 - protein, 93 aa, Homo sapiens
  Payload ID: 20243
  Gene Name: zinc finger protein 862
  ENSP ID: ENSP00000417450
MGYMGEMEVQGPTRESGQSLPPQKKAYLSHLSTGSGHIEGDWAGRNRKLLKPRSIQKSWFVQFPWLIMNEEQTALFCSACREYPSIRDKRSRL

SEQ ID NO: 101608 - protein, 1059 aa, Homo sapiens
  Payload ID: 20244
  Gene Name: zinc finger protein 865
  Uniprot ID: P0CJ78
  ENSP ID: ENSP00000457715
MEANPAGSGAGGGGSSGIGGEDGVHFQSYPFDFLEFLNHQRFEPMELYGEHAKAVAALPCAPGPPPQPPPQPPPPQYDYPPQSTFKPKAEVPSSSSSSSSSSSSSSSSSSSSSSSSSQAKKPDPPLPPAFGAPPPPLFDAAFPTPQWGIVDLSGHQHLFGNLKRGGPASGPGVTPGLGAPAGAPGPLPAPSQTPPGPPAAAACDPTKDDKGYFRRLKYLMERRFPCGVCQKSFKQSSHLVQHMLVHSGERPYECGVCGRTYNHVSSLIRHRRCHKDVPPAAGGPPQPGPHLPPLGLPAPAASAATAAAPSTVSSGPPATPVAPAPSADGSAAPAGVGVPPPATGGGDGPFACPLCWKVFKKPSHLHQHQIIHTGEKPFSCSVCSKSFNRRESLKRHVKTHSADLLRLPCGICGKAFRDASYLLKHQAAHAGAGAGGPRPVYPCDLCGKSYSAPQSLLRHKAAHAPPAAAAEAPKDGAASAPQPPPTFPPGPYLLPPDPPTTDSEKAAAAAAAVVYGAVPVPLLGAHPLLLGGAGTSGAGGSGASVPGKTFCCGICGRGFGRRETLKRHERIHTGEKPHQCPVCGKRFRESFHLSKHHVVHTRERPYKCELCGKVFGYPQSLTRHRQVHRLQLPCALAGAAGLPSTQGTPGACGPGASGTSAGPTDGLSYACSDCGEHFPDLFHVMSHKEVHMAEKPYGCDACGKTFGFIENLMWHKLVHQAAPERLLPPAPGGLQPPDGSSGTDAASVLDNGLAGEVGAAVAALAGVSGGEDAGGAAVAGAGGGASSGPERFSCATCGQSFKHFLGLVTHKYVHLVRRTLGCGLCGQSFAGAYDLLLHRRSHRQKRGFRCPVCGKRFWEAALLMRHQRCHTEQRPYRCGVCGRGFLRSWYLRQHRVVHTGERAFKCGVCAKRFAQSSSLAEHRRLHAVARPQRCSACGKTFRYRSNLLEHQRLHLGERAYRCEHCGKGFFYLSSVLRHQRAHEPPRPELRCPACLKAFKDPGYFRKHLAAHQGGRPFRCSSCGEGFANTYGLKKHRLAHKAENLGGPGAGAGTLAGKDA

SEQ ID NO: 101609 - protein, 33 aa, Homo sapiens
  Payload ID: 20244
  Gene Name: zinc finger protein 865
  ENSP ID: ENSP00000487098
PVPAPSASAVPRAARRCSACGKTFRYRSNLLEH

SEQ ID NO: 101610 - protein, 531 aa, Homo sapiens
  Payload ID: 20245
  Gene Name: zinc finger protein 878
  Uniprot ID: C9JN71
  ENSP ID: ENSP00000447931
MDSVAFEDVAVNFTQEEWALLDPSQKNLYREVMQETLRNLTSIGKKWNNQYIEDEHQNPRRNLRRLIGERLSESKESHQHGEVLTQVPDDTLKKKTPGVQSYESSVCGEIGIGLSSLNRHLRAFSYSSSLAIHGRTHTGEKPYECKECGKAFRFPSSVRRHERIHSAKKPYECKQCGKAFSFPSSVRRHERIHSAKKPYECKQCGKALSYLVSFQTHMRMHTGERPHKCNICGKAFFSPSSLKRHEKSHTGEKRYKCKQCDKAFNCPSSFQYHERTHSGEKPYECTQCRKAFRSVKYLRVHERKHTGEKPYECKLCGKGFISSTSFRYHEKTHTGEKPYECKKCVKAFSFVKDLRIHERTHTGEKPFECKQCGKTFTSSNSFHYHERTHTGEKPYECKQCGKAFRSASVLQKHIRTHTGEKPYGCKQCGKVFRVASQLKMHERTHTGEKPYECKQCGKAFISSNSIRYHKRTHTGEKPYKCKQCGKAFISSNSFLYHERIHTGEKPYECKQCGKAFRSASILQKHVRTHAG

SEQ ID NO: 101611 - protein, 563 aa, Homo sapiens
  Payload ID: 20246
  Gene Name: zinc finger protein 879
  Uniprot ID: B4DU55
  ENSP ID: ENSP00000414887
MARRLLPAHVQESVTFRDVAVFFSQDEWLHLDSAQRALYREVMLENYSILVSLGILFSKPKVISQLEQGEDPWMVESGVPQGAHLGWESLFGTIVSKEENQEVMKKLIIDGTFDFKLEKTYINEDKLEKQQGKKNRLFSKVLVTIKKVYMKERSFKGVEFGKNLGLKSSLIRKPRIVSRGRRPRSQQYSVLFKQLGVNTVRKCYKCNICGKIFLHSSSLSKHQRIHTGEKLYKCKECRKAFSQSSSLTQHLRVHTGEKPYICSECGKAFSFTTSLIGHQRMHTGERPYKCKECGKTFKGSSSLNNHQRIHTGEKPYKCNECGRAFSQCSSLIQHHRIHTGEKPYECTQCGKAFTSISRLSRHHRIHTGEKPFHCNECGKVFSYHSALIIHQRIHTGEKPYACKECGKAFSQSSALIQHQRIHTGEKPYKCNECGKAFSWISRLNIHHRIHTGEKPYNCKECGKAFSSHSGVNTHRKIHTGEKPYKCNDCEKAFNQSSALIQHQRIHTGEKPYNCKVCGKAFRQSSSLMTHMRIHTGEKPYKCKECGKAFSQSSSLTNHQRTHN

SEQ ID NO: 101612 - protein, 134 aa, Homo sapiens
  Payload ID: 20246
  Gene Name: zinc finger protein 879
  ENSP ID: ENSP00000428477
MARRLLPAHVQESVTFRDVAVFFSQDEWLHLDSAQRALYREVMLENYSILVSLGILFSKPKVISQLEQGEDPWMVESGVPQGAHLGWESLFGTIVSKEENQEVMKKLIIDGTFDFKLEKTYINEDKLEKQQGKK

SEQ ID NO: 101613 - protein, 107 aa, Homo sapiens
  Payload ID: 20246
  Gene Name: zinc finger protein 879
  ENSP ID: ENSP00000430047
MARRLLPAHVQSWMNRSGFAIPGVRDVQGCGRVLQPGRVVAPGLCPESLVPGGDAGELQHPGLTGDSLFQAKGHLPVRARRRPLDGGEWSSPRRTSRMGKLVWNHSF

SEQ ID NO: 101614 - protein, 41 aa, Homo sapiens
  Payload ID: 20246
  Gene Name: zinc finger protein 879
  ENSP ID: ENSP00000431043
MARRLLPAHVQESVTFRDVAVFFSQDEWLHLDSAQRALYRE

SEQ ID NO: 101615 - protein, 98 aa, Homo sapiens
  Payload ID: 20247
  Gene Name: zinc finger protein 880
  Uniprot ID: Q6PDB4
  ENSP ID: ENSP00000343625
MLRRGHLAFRDVAIEFPQEEWKCLDPAQRTLYREVMVENYRNLVFLGICLPDLSVISMLEQRRDPRNLQSEVKIANNPGSCSVTQAVVEWQSSVAIVA

SEQ ID NO: 101616 - protein, 577 aa, Homo sapiens
  Payload ID: 20247
  Gene Name: zinc finger protein 880
  Uniprot ID: Q6PDB4
  ENSP ID: ENSP00000406318
MLRRGHLAFRDVAIEFPQEEWKCLDPAQRTLYREVMVENYRNLVFLGICLPDLSVISMLEQRRDPRNLQSEVKIANNPGGRECIKGVNAESSSKLGSNAGNKSLKNQLGLTFQLHLSELQLFQAERNISGCKHVEKPINNSLVSPLQKIYSSVKSHILNKYRNDFDDSPFLPQEQKAQIREKPCECNEHGKAFRVSSRLANNQVIHTADNPYKCNECDKVFSNSSNLVQHQRIHTGEKPYKCHECGKLFNRISLLARHQRIHTGEKPYKCHECGKVFTQNSHLANHHRIHTGEKPYKCNECGKVFNRNAHLARHQKIHSGEKPYKCKECGKAFSGGSGLTAHLVIHTGEKLYKCNKCGKVFNRNAHLTRHQRIHTGEKPYECKECGKVFRHKFCLTNHHRMHTGEQPYKCNECGKAFRDCSGLTAHLLIHTGEKPYKCKECAKVFRHRLSLSNHQRFHTGEKPYRCDECGKDFTRNSNLANHHRIHTGEKPYKCSECHKVFSHNSHLARHRQIHTGEKSYKCNECGKVFSHKLYLKKHERIHTGEKPYRCHECGKDFTRNSNLANHHRIHTGEKPYR

SEQ ID NO: 101617 - protein, 125 aa, Homo sapiens
  Payload ID: 20247
  Gene Name: zinc finger protein 880
  ENSP ID: ENSP00000414470
MLRRGHLAFRDVAIEFPQEEWKCLDPAQRTLYREVMVENYRNLVFLGICLPDLSVISMLEQRRDPRNLQSEVKIANNPGGRECIKGVNAESRSVTQAGVQCRDLGSLQPSLPGFKQFFCIGLPKC

SEQ ID NO: 101618 - protein, 125 aa, Homo sapiens; identical to SEQ ID NO: 101617
  Payload ID: 20247
  Gene Name: zinc finger protein 880
  ENSP ID: ENSP00000471067

SEQ ID NO: 101619 - protein, 117 aa, Homo sapiens
  Payload ID: 20247
  Gene Name: zinc finger protein 880
  ENSP ID: ENSP00000471324
MLRRGHLAFRDVAIEFPQEEWKCLDPAQRTLYREVMVENYRNLVFLGICLPDLSVISMLEQRRDPRNLQSEVKIANNPGGRECIKGVNAGKSLDGQSGGPIIFFFFKQGLALSPRLS

SEQ ID NO: 101620 - protein, 544 aa, Homo sapiens
  Payload ID: 20248
  Gene Name: zinc finger protein 891
  Uniprot ID: A8MT65
  ENSP ID: ENSP00000437590
MAVMDLSSPWALTKQDSACFHLRNAEEERMIAVFLTTWLQEPMTFKDVAVEFTQEEWMMLDSAQRSLYRDVMLENYRNLTSVEYQLYRLTVISPLDQEEIRNMKKRIPQAICPDQKIQPKTKESTVQKILWEEPSNAVKMIKLTMHNWSSTLREDWECHKIRKQHKIPGGHWRQMIYAPKKTVPQELFRDYHELEENSKLGSKLIFSQSIFTSKHCQKCYSEIGCLKHNSIINNYVKNSISEKLYESHECDTTLWHFQRNQTVQKEYTYSKHGMHFTHNMFPVPNNLHMAQNACECNKDETLCHQSSLKKQGQTHTEKKHECNQCGKAFKRISNLTLYKKSHMGEKQYECKECGKVFNDSSTLRRHVRTHTGEKPYECNQCGKAFSQKTSLKAHMRTHTGEKPYECNQCGKSFGTSSYLIVHKRIHTGEKLYECSECGKAFNTSSHLKVHKKIHTGENVYECSDCGKVFSGVSSLRMHIRTHTGEKPYECKECRKAFSVSSSLRRHVRIHTGEKPYECIQCGKAFSQSSSLIIHKRIHTERETL

SEQ ID NO: 101621 - protein, 601 aa, Homo sapiens
  Payload ID: 20249
  Gene Name: zinc finger protein 90
  Uniprot ID: Q03938
  ENSP ID: ENSP00000410466
MGPLEFRDVAIEFSLEEWHCLDTAQQNLYRDVMLENYRHLVFLGIVVTKPDLITCLEQGKKPFTVKRHEMIAKSPVMCFHFAQDLCPEQSLKDSFQKVIVTRYEKREYGNLELKKGCESVDEGKVHKRGYNGLNQCLTATQSKVFQCDTYVKVSHIFSNSNRHKIRDTGKKPFKCIECGKAFNQSSTLATHKKIHTGEITCKCEECGKAFNRSSHLTSHKRIHTGEKRYKCEDCGKELKYSSTLTAHKRIHTGEKRYKCEDCGKELKYSSTLTAHKRIHTGEKPYKCDKCGRAFISSSILYVHKISHTEEKPYKCEECGKAFKLSSILSTHKRIHTGEKPYKCEECGKAFRRSLVLRTHKRIHTGEKPYKCDKCGKAFISSSLLYKHKISHSEKKPYKCEECGKAFKRSSTLTIHKISHTEEKPYKCQECDKVFKRSSALSTHKIIHSGEKPYKCEECGKAFKRSSNLTTHKISHTEEKLYKCQECDKAFKYSSALSTHKIIHSGENPYKCEECGKAFKRSSVLSKHKIIHTGAKPYKCEECGKAFKRSSQLTSHKISHTGEKPYKCEECGKAFNLSSDLNTHKRIHIGQKAYIVKNMANL

SEQ ID NO: 101622 - protein, 76 aa, Homo sapiens
  Payload ID: 20249
  Gene Name: zinc finger protein 90
  ENSP ID: ENSP00000418166
MGPLEFRDVAIEFSLEEWHCLDTAQQNLYRDVMLENYRHLVFLGIVVTKPDLITCLEQGKKPFTVKRHEMIAKSPG

SEQ ID NO: 101623 - protein, 112 aa, Homo sapiens
  Payload ID: 20249
  Gene Name: zinc finger protein 90
  ENSP ID: ENSP00000420111
MGPLEFRDVAIEFSLEEWHCLDTAQQNLYRDVMLENYRHLVFLGIVVTKPDLITCLEQGKKPFTVKRHEMIAKSPDGVHFLIQAGVQQRNLCVIIATFTSQVQAILLPQSPK

SEQ ID NO: 101624 - protein, 129 aa, Homo sapiens
  Payload ID: 20249
  Gene Name: zinc finger protein 90
  ENSP ID: ENSP00000482310
MPSKGPLQSVQVFGRKKTATAVAHCRRGNGLIKLLEPVLLLGKERFAGVDIRVRVKGGAHVAQIYAIRQSTSKALVAYYQKYVDEASKKEIKDILIQYDRTLLVADPRRCKSKKFGGPGARACYQKSYR

SEQ ID NO: 101625 - protein, 1191 aa, Homo sapiens
  Payload ID: 20250
  Gene Name: zinc finger protein 91
  Uniprot ID: Q05481
  ENSP ID: ENSP00000300619
MPGTPGSLEMGLLTFRDVAIEFSPEEWQCLDTAQQNLYRNVMLENYRNLAFLGIALSKPDLITYLEQGKEPWNMKQHEMVDEPTGICPHFPQDFWPEQSMEDSFQKVLLRKYEKCGHENLQLRKGCKSVDECKVHKEGYNKLNQCLTTAQSKVFQCGKYLKVFYKFLNSNRHTIRHTGKKCFKCKKCVKSFCIRLHKTQHKCVYITEKSCKCKECEKTFHWSSTLTNHKEIHTEDKPYKCEECGKAFKQLSTLTTHKIICAKEKIYKCEECGKAFLWSSTLTRHKRIHTGEKPYKCEECGKAFSHSSTLAKHKRIHTGEKPYKCEECGKAFSRSSTLAKHKRIHTGEKPYKCKECGKAFSNSSTLANHKITHTEEKPYKCKECDKAFKRLSTLTKHKIIHAGEKLYKCEECGKAFNRSSNLTIHKFIHTGEKPYKCEECGKAFNWSSSLTKHKRFHTREKPFKCKECGKAFIWSSTLTRHKRIHTGEKPYKCEECGKAFRQSSTLTKHKIIHTGEKPYKFEECGKAFRQSLTLNKHKIIHSREKPYKCKECGKAFKQFSTLTTHKIIHAGKKLYKCEECGKAFNHSSSLSTHKIIHTGEKSYKCEECGKAFLWSSTLRRHKRIHTGEKPYKCEECGKAFSHSSALAKHKRIHTGEKPYKCKECGKAFSNSSTLANHKITHTEEKPYKCKECDKTFKRLSTLTKHKIIHAGEKLYKCEECGKAFNRSSNLTIHKFIHTGEKPYKCEECGKAFNWSSSLTKHKRIHTREKPFKCKECGKAFIWSSTLTRHKRIHTGEKPYKCEECGKAFSRSSTLTKHKTIHTGEKPYKCKECGKAFKHSSALAKHKIIHAGEKLYKCEECGKAFNQSSNLTTHKIIHTKEKPSKSEECDKAFIWSSTLTEHKRIHTREKTYKCEECGKAFSQPSHLTTHKRMHTGEKPYKCEECGKAFSQSSTLTTHKIIHTGEKPYKCEECGKAFRKSSTLTEHKIIHTGEKPYKCEECGKAFSQSSTLTRHTRMHTGEKPYKCEECGKAFNRSSKLTTHKIIHTGEKPYKCEECGKAFISSSTLNGHKRIHTREKPYKCEECGKAFSQSSTLTRHKRLHTGEKPYKCGECGKAFKESSALTKHKIIHTGEKPYKCEKCGKAFNQSSILTNHKKIHTITPVIPLLWEAEAGGSRGQEMETILANTVKPLLY

SEQ ID NO: 101626 - protein, 1159 aa, Homo sapiens
  Payload ID: 20250
  Gene Name: zinc finger protein 91
  Uniprot ID: Q05481
  ENSP ID: ENSP00000380272
MPGTPGSLEMGLLTFRDVAIEFSPEEWQCLDTAQQNLYRNVMLENYRNLAFLGICPHFPQDFWPEQSMEDSFQKVLLRKYEKCGHENLQLRKGCKSVDECKVHKEGYNKLNQCLTTAQSKVFQCGKYLKVFYKFLNSNRHTIRHTGKKCFKCKKCVKSFCIRLHKTQHKCVYITEKSCKCKECEKTFHWSSTLTNHKEIHTEDKPYKCEECGKAFKQLSTLTTHKIICAKEKIYKCEECGKAFLWSSTLTRHKRIHTGEKPYKCEECGKAFSHSSTLAKHKRIHTGEKPYKCEECGKAFSRSSTLAKHKRIHTGEKPYKCKECGKAFSNSSTLANHKITHTEEKPYKCKECDKAFKRLSTLTKHKIIHAGEKLYKCEECGKAFNRSSNLTIHKFIHTGEKPYKCEECGKAFNWSSSLTKHKRFHTREKPFKCKECGKAFIWSSTLTRHKRIHTGEKPYKCEECGKAFRQSSTLTKHKIIHTGEKPYKFEECGKAFRQSLTLNKHKIIHSREKPYKCKECGKAFKQFSTLTTHKIIHAGKKLYKCEECGKAFNHSSSLSTHKIIHTGEKSYKCEECGKAFLWSSTLRRHKRIHTGEKPYKCEECGKAFSHSSALAKHKRIHTGEKPYKCKECGKAFSNSSTLANHKITHTEEKPYKCKECDKTFKRLSTLTKHKIIHAGEKLYKCEECGKAFNRSSNLTIHKFIHTGEKPYKCEECGKAFNWSSSLTKHKRIHTREKPFKCKECGKAFIWSSTLTRHKRIHTGEKPYKCEECGKAFSRSSTLTKHKTIHTGEKPYKCKECGKAFKHSSALAKHKIIHAGEKLYKCEECGKAFNQSSNLTTHKIIHTKEKPSKSEECDKAFIWSSTLTEHKRIHTREKTYKCEECGKAFSQPSHLTTHKRMHTGEKPYKCEECGKAFSQSSTLTTHKIIHTGEKPYKCEECGKAFRKSSTLTEHKIIHTGEKPYKCEECGKAFSQSSTLTRHTRMHTGEKPYKCEECGKAFNRSSKLTTHKIIHTGEKPYKCEECGKAFISSSTLNGHKRIHTREKPYKCEECGKAFSQSSTLTRHKRLHTGEKPYKCGECGKAFKESSALTKHKIIHTGEKPYKCEKCGKAFNQSSILTNHKKIHTITPVIPLLWEAEAGGSRGQEMETILANTVKPLLY

SEQ ID NO: 101627 - protein, 122 aa, Homo sapiens
  Payload ID: 20250
  Gene Name: zinc finger protein 91
  ENSP ID: ENSP00000468867
MPGTPGSLEMGLLTFRDVAIEFSPEEWQCLDTAQQNLYRNVMLENYRNLAFLGIALSKPDLITYLEQGKEPWNMKQHEMVDEPTDGVLLHRQAGVQWRDLVPLLTATSASPIEVILLSQPPE

SEQ ID NO: 101628 - protein, 185 aa, Homo sapiens
  Payload ID: 20250
  Gene Name: zinc finger protein 91
  ENSP ID: ENSP00000471709
MEDSFQKVLLRKYEKCGHENLQLRKGCKSVDECKVHKEGYNKLNQCLTTAQSKVFQCGKYLKVFYKFLNSNRHTIRHTGKKCFKCKKCVKSFCIRLHKTQHKCVYITEKSCKCKECEKTFHWSSTLTNHKEIHTEDKPYKCEECGKAFKQLSTLTTHKIICAKEKIYKCEECGKAFLWSSTLTRH

SEQ ID NO: 101629 - protein, 586 aa, Homo sapiens
  Payload ID: 20251
  Gene Name: zinc finger protein 92
  Uniprot ID: Q03936
  ENSP ID: ENSP00000332595
MGPLTFRDVKIEFSLEEWQCLDTAQRNLYRDVMLENYRNLVFLGIAVSKPDLITWLEQGKEPWNLKRHEMVDKTPVMCSHFAQDVWPEHSIKDSFQKVILRTYGKYGHENLQLRKDHKSVDACKVYKGGYNGLNQCLTTTDSKIFQCDKYVKVFHKFPNVNRNKIRHTGKKPFKCKNRGKSFCMLSQLTQHKKIHTREYSYKCEECGKAFNWSSTLTKHKIIHTGEKPYKCEECGKAFNRSSNLTKHKIIHTGEKPYKCEECGKAFNRSSTLTKHKRIHTEEKPYKCEECGKAFNQFSILNKHKRIHMEDKPYKCEECGKAFRVFSILKKHKIIHTGEKPYKCEECGKAFNQFSNLTKHKIIHTGEKPYKCDECGKAFNQSSTLTKHKRIHTGEKPYKCEECGKAFKQSSTLTEHKIIHTGEKPYKCEKCGKAFSWSSAFTKHKRNHMEDKPYKCEECGKAFSVFSTLTKHKIIHTREKPYKCEECGKAFNQSSIFTKHKIIHTEGKSYKCEKCGNAFNQSSNLTARKIIYTGEKPYKYEECDKAFNKFSTLITHQIIYTGEKPCKHECGRAFNKSSNYTKEKLQT

SEQ ID NO: 101630 - protein, 554 aa, Homo sapiens
  Payload ID: 20251
  Gene Name: zinc finger protein 92
  Uniprot ID: Q03936
  ENSP ID: ENSP00000350113
MGPLTFRDVKIEFSLEEWQCLDTAQRNLYRDVMLENYRNLVFLVMCSHFAQDVWPEHSIKDSFQKVILRTYGKYGHENLQLRKDHKSVDACKVYKGGYNGLNQCLTTTDSKIFQCDKYVKVFHKFPNVNRNKIRHTGKKPFKCKNRGKSFCMLSQLTQHKKIHTREYSYKCEECGKAFNWSSTLTKHKIIHTGEKPYKCEECGKAFNRSSNLTKHKIIHTGEKPYKCEECGKAFNRSSTLTKHKRIHTEEKPYKCEECGKAFNQFSILNKHKRIHMEDKPYKCEECGKAFRVFSILKKHKIIHTGEKPYKCEECGKAFNQFSNLTKHKIIHTGEKPYKCDECGKAFNQSSTLTKHKRIHTGEKPYKCEECGKAFKQSSTLTEHKIIHTGEKPYKCEKCGKAFSWSSAFTKHKRNHMEDKPYKCEECGKAFSVFSTLTKHKIIHTREKPYKCEECGKAFNQSSIFTKHKIIHTEGKSYKCEKCGNAFNQSSNLTARKIIYTGEKPYKYEECDKAFNKFSTLITHQIIYTGEKPCKHECGRAFNKSSNYTKEKLQT

SEQ ID NO: 101631 - protein, 517 aa, Homo sapiens
  Payload ID: 20251
  Gene Name: zinc finger protein 92
  Uniprot ID: Q03936
  ENSP ID: ENSP00000396126
MVDKTPVMCSHFAQDVWPEHSIKDSFQKVILRTYGKYGHENLQLRKDHKSVDACKVYKGGYNGLNQCLTTTDSKIFQCDKYVKVFHKFPNVNRNKIRHTGKKPFKCKNRGKSFCMLSQLTQHKKIHTREYSYKCEECGKAFNWSSTLTKHKIIHTGEKPYKCEECGKAFNRSSNLTKHKIIHTGEKPYKCEECGKAFNRSSTLTKHKRIHTEEKPYKCEECGKAFNQFSILNKHKRIHMEDKPYKCEECGKAFRVFSILKKHKIIHTGEKPYKCEECGKAFNQFSNLTKHKIIHTGEKPYKCDECGKAFNQSSTLTKHKRIHTGEKPYKCEECGKAFKQSSTLTEHKIIHTGEKPYKCEKCGKAFSWSSAFTKHKRNHMEDKPYKCEECGKAFSVFSTLTKHKIIHTREKPYKCEECGKAFNQSSIFTKHKIIHTEGKSYKCEKCGNAFNQSSNLTARKIIYTGEKPYKYEECDKAFNKFSTLITHQIIYTGEKPCKHECGRAFNKSSNYTKEKLQT

SEQ ID NO: 101632 - protein, 510 aa, Homo sapiens
  Payload ID: 20251
  Gene Name: zinc finger protein 92
  ENSP ID: ENSP00000400495
MCSHFAQDVWPEHSIKDSFQKVILRTYGKYGHENLQLRKDHKSVDACKVYKGGYNGLNQCLTTTDSKIFQCDKYVKVFHKFPNVNRNKIRHTGKKPFKCKNRGKSFCMLSQLTQHKKIHTREYSYKCEECGKAFNWSSTLTKHKIIHTGEKPYKCEECGKAFNRSSNLTKHKIIHTGEKPYKCEECGKAFNRSSTLTKHKRIHTEEKPYKCEECGKAFNQFSILNKHKRIHMEDKPYKCEECGKAFRVFSILKKHKIIHTGEKPYKCEECGKAFNQFSNLTKHKIIHTGEKPYKCDECGKAFNQSSTLTKHKRIHTGEKPYKCEECGKAFKQSSTLTEHKIIHTGEKPYKCEKCGKAFSWSSAFTKHKRNHMEDKPYKCEECGKAFSVFSTLTKHKIIHTREKPYKCEECGKAFNQSSIFTKHKIIHTEGKSYKCEKCGNAFNQSSNLTARKIIYTGEKPYKYEECDKAFNKFSTLITHQIIYTGEKPCKHECGRAFNKSSNYTKEKLQT

SEQ ID NO: 101633 - protein, 620 aa, Homo sapiens
  Payload ID: 20252
  Gene Name: zinc finger protein 93
  Uniprot ID: P35789
  ENSP ID: ENSP00000342002
MGPLQFRDVAIEFSLEEWHCLDTAQRNLYRNVMLENYSNLVFLGIVVSKPDLIAHLEQGKKPLTMKRHEMVANPSVICSHFAQDLWPEQNIKDSFQKVILRRYEKRGHGNLQLIKRCESVDECKVHTGGYNGLNQCSTTTQSKVFQCDKYGKVFHKFSNSNRHNIRHTEKKPFKCIECGKAFNQFSTLITHKKIHTGEKPYICEECGKAFKYSSALNTHKRIHTGEKPYKCDKCDKAFIASSTLSKHEIIHTGKKPYKCEECGKAFNQSSTLTKHKKIHTGEKPYKCEECGKAFNQSSTLTKHKKIHTGEKPYVCEECGKAFKYSRILTTHKRIHTGEKPYKCNKCGKAFIASSTLSRHEFIHMGKKHYKCEECGKAFIWSSVLTRHKRVHTGEKPYKCEECGKAFKYSSTLSSHKRSHTGEKPYKCEECGKAFVASSTLSKHEIIHTGKKPYKCEECGKAFNQSSSLTKHKKIHTGEKPYKCEECGKAFNQSSSLTKHKKIHTGEKPYKCEECGKAFNQSSTLIKHKKIHTREKPYKCEECGKAFHLSTHLTTHKILHTGEKPYRCRECGKAFNHSATLSSHKKIHSGEKPYECDKCGKAFISPSSLSRHEIIHTGEKP

SEQ ID NO: 101634 - protein, 123 aa, Homo sapiens
  Payload ID: 20252
  Gene Name: zinc finger protein 93
  ENSP ID: ENSP00000467377
MGPLQFRDVAIEFSLEEWHCLDTAQRNLYRNVMLENYSNLVFLGIVVSKPDLIAHLEQGKKPLTMKRHEMVANPSGARLLSQHFGRPRWVDPEVRRSRPSGQHGEIPSLLKYKKLARHGGPCL

SEQ ID NO: 101635 - protein, 120 aa, Homo sapiens
  Payload ID: 20252
  Gene Name: zinc finger protein 93
  ENSP ID: ENSP00000467553
MKRHEMVANPSVICSHFAQDLWPEQNIKDSFQKVILRRYEKRGHGNLQLIKRCESVDECKVHTGGYNGLNQCSTTTQSKVFQCDKYGKVFHKFSNSNRHNIRHTEKKPFKCIECGKAFNQ

SEQ ID NO: 101636 - protein, 119 aa, Homo sapiens
  Payload ID: 20252
  Gene Name: zinc finger protein 93
  ENSP ID: ENSP00000467652
MGPLQFRDVAIEFSLEEWHCLDTAQRNLYRNVMLENYSNLVFLGIVVSKPDLIAHLEQGKKPLTMKRHEMVANPSGPGVVVVLMCNPRILGGQAKRIPGAQKFENSLGNIWRPLSMKKI

SEQ ID NO: 101637 - protein, 84 aa, Homo sapiens
  Payload ID: 20252
  Gene Name: zinc finger protein 93
  ENSP ID: ENSP00000468563
MGPLQFRDVAIEFSLEEWHCLDTAQRNLYRNVMLENYSNLVFLGIVVSKPDLIAHLEQGKKPLTMKRHEMVANPSDGVNLCHPG

SEQ ID NO: 101638 - protein, 572 aa, Homo sapiens
  Payload ID: 20253
  Gene Name: zinc finger protein 98
  Uniprot ID: A6NK75
  ENSP ID: ENSP00000350418
MPGPLGSLEMGVLTFRDVALEFSLEEWQCLDTAQQNLYRNVMLENYRNLVFVGIAASKPDLITCLEQGKEPWNVKRHEMVTEPPVVYSYFAQDLWPKQGKKNYFQKVILRTYKKCGRENLQLRKYCKSMDECKVHKECYNGLNQCLTTTQNKIFQYDKYVKVFHKFSNSNRHKIGHTGKKSFKCKECEKSFCMLSHLAQHKRIHSGEKPYKCKECGKAYNEASNLSTHKRIHTGKKPYKCEECGKAFNRLSHLTTHKIIHTGKKPYKCEECGKAFNQSANLTTHKRIHTGEKPYKCEECGRAFSQSSTLTAHKIIHAGEKPYKCEECGKAFSQSSTLTTHKIIHTGEKFYKCEECGKAFSRLSHLTTHKRIHSGEKPYKCEECGKAFKQSSTLTTHKRIHAGEKFYKCEVCSKAFSRFSHLTTHKRIHTGEKPYKCEECGKAFNLSSQLTTHKIIHTGEKPYKCEECGKAFNQSSTLSKHKVIHTGEKPYKCEECGKAFNQSSHLTTHKMIHTGEKPYKCEECGKAFNNSSILNRHKMIHTGEKLYKPESCNNACDNIAKISKYKRNCAGEK

SEQ ID NO: 101639 - protein, 87 aa, Homo sapiens
  Payload ID: 20253
  Gene Name: zinc finger protein 98
  ENSP ID: ENSP00000470558
MPGPLGSLEMGVLTFRDVALEFSLEEWQCLDTAQQNLYRNVMLENYRNLVFVGIAASKPDLITCLEQGKEPWNVKRHEMVTEPPGLQ

SEQ ID NO: 101640 - protein, 130 aa, Homo sapiens
  Payload ID: 20253
  Gene Name: zinc finger protein 98
  ENSP ID: ENSP00000470736
MLENYRNLVFVGIAASKPDLITCLEQGKEPWNVKRHEMVTEPPVVYSYFAQDLWPKQGKKNYFQKVILRTYKKCGRENLQLRKYCKSMDECKVHKECYNGLNQCLTTTQNKIFQYDKYVKVFHKFSNSNR

SEQ ID NO: 101641 - protein, 131 aa, Homo sapiens
  Payload ID: 20253
  Gene Name: zinc finger protein 98
  ENSP ID: ENSP00000472301
MSEETLQSKLAAAKKKLPWGAVQGSRAMSDLLLLLLDLTLLLLLMLLGFAGYSGQLAGVAVSAGSPPIPTSSMWSPMVRLGGFSPELQHLPQTLLHRCPLGQPCMGVLTFRDVALEFSLEEWQCLDTAQQN

SEQ ID NO: 101642 - protein, 1037 aa, Homo sapiens [sequence omitted]

SEQ ID NO: 101643 - protein, 864 aa, Homo sapiens
  Payload ID: 20254
  Gene Name: zinc finger protein 99
  Uniprot ID: A8MXY4
  ENSP ID: ENSP00000472969
MGSLTFWDVTIEFALEEWQCLDMAQQNLYRNVMLENYRNLVFLGIAVSKLDLITCLKQGKEPWNMKRHEMVTKPPVISSHFTQDFWPDQSIKDSFQEIILRTYARCGHKNLRLRKDCESVNEGKMHEEAYNKLNQCWTTTQGKIFQCNKYVKVFHKYSNSNRYKIRHTKKKTFKCMKCSKSFFMLSHLIQHKRIHTRENIYKCEERGKAFKWFSTLIKHKIIHTEDKPYKYKKCGKAFNISSMFTKCKIIHTGKKPCKCEECGKVFNNSSTLMKHKIIHTGKKPYKCEECGKAFKQSSHLTRHKAIHTGEKPYKCEECGKAFNHFSALRKHQIIHTGKKPYKCEECGKAFSQSSTLRKHEIIHTEEKPYKYEECGKAFSNLSALRKHEIIHTGQKPYKCEECGKAFKWSSKLTVHKVIHTAEKPCKCEECGKAFKRFSALRKHKIIHTGKQPYKCEECSKAFSNFSALRKHEIIHTGEKPYKCEECGKAFKWSSKLTVHKVIHMEEKPCKCEECGKAFKHFSALRKHKIIHTGKKPYKCEECGKAFNNSSTLMKHKIIHTGKKPYKCEECGKAFKQSSHLTRHKAIHTGEKPYKCEECGKAFNHFSALRKHQIIHTGKKPYKCEECGKAFSQSSTLRKHEIIHTGEKPYKCEECGKAFKWSSHLTRHKVIHTEEKPYKCEECGKAFNHFSALRKHKIIHTGKKPYKCEECGKAFSQSSTLRKHEIIHTGEKPYKCEECGKAFKWSSKLTVHKVIHTAEKPCKCEECGKAFKHFSALRKHKIIHTGKKPYKCEECGKAFNNSSTLRKHEIIHTGEKSYKCEECGKAFQWSSKLTLHKVIHMERNPANVKNVAKLLNISQPLENMR

SEQ ID NO: 101644 - protein, 29 aa, Homo sapiens
  Payload ID: 20255
  Gene Name: zinc finger protein interacting with K protein 1
  ENSP ID: ENSP00000303820
MAAAALRAPTQVVAMEQRMKRHLLTRMFL

SEQ ID NO: 101645 - protein, 474 aa, Homo sapiens
  Payload ID: 20255
  Gene Name: zinc finger protein interacting with K protein 1
  ENSP ID: ENSP00000438487
MAAAALRAPTQGCVTFEDIAIYFSQDEWGLLDEAQRLLYLEVMLENFALVASLGCGHGTEDEETPSDQNVSVGVSQSKAGSSTQKTQSCEMCVPVLKDILHLADLPGQKPYLVGECTNHHQHQKHHSAKKSLKRDMDRASYVKCCLFCMSLKPFRKWEVGKDLPAMLRLLRSLVFPGGKKPGTITECGEDIRSQKSHYKSGECGKASRHKHTPVYHPRVYTGKKLYECSKCGKAFRGKYSLVQHQRVHTGERPWECNECGKFFSQTSHLNDHRRIHTGERPYECSECGKLFRQNSSLVDHQKIHTGARPYECSQCGKSFSQKATLVKHQRVHTGERPYKCGECGNSFSQSAILNQHRRIHTGAKPYECGQCGKSFSQKATLIKHQRVHTGERPYKCGDCGKSFSQSSILIQHRRIHTGARPYECGQCGKSFSQKSGLIQHQVVHTGERPYECNKCGNSFSQCSSLIHHQKCHNT

SEQ ID NO: 101646 - protein, 432 aa, Homo sapiens
  Payload ID: 20255
  Gene Name: zinc finger protein interacting with K protein 1
  Uniprot ID: Q3SY52
  ENSP ID: ENSP00000468937
MLENFALVASLGCGHGTEDEETPSDQNVSVGVSQSKAGSSTQKTQSCEMCVPVLKDILHLADLPGQKPYLVGECTNHHQHQKHHSAKKSLKRDMDRASYVKCCLFCMSLKPFRKWEVGKDLPAMLRLLRSLVFPGGKKPGTITECGEDIRSQKSHYKSGECGKASRHKHTPVYHPRVYTGKKLYECSKCGKAFRGKYSLVQHQRVHTGERPWECNECGKFFSQTSHLNDHRRIHTGERPYECSECGKLFRQNSSLVDHQKIHTGARPYECSQCGKSFSQKATLVKHQRVHTGERPYKCGECGNSFSQSAILNQHRRIHTGAKPYECGQCGKSFSQKATLIKHQRVHTGERPYKCGDCGKSFSQSSILIQHRRIHTGARPYECGQCGKSFSQKSGLIQHQVVHTGERPYECNKCGNSFSQCSSLIHHQKCHNT

SEQ ID NO: 101647 - protein, 107 aa, Homo sapiens
  Payload ID: 20255
  Gene Name: zinc finger protein interacting with K protein 1
  ENSP ID: ENSP00000469971
MAAAALRAPTQDEWGLLDEAQRLLYLEVMLENFALVASLGCGHGTEDEETPSDQNVSVGVSQSKAGSSTQKTQSCEMCVPVLKDILHLADLPGQKPYLVGECTNHHQ

SEQ ID NO: 101648 - protein, 30 aa, Homo sapiens
  Payload ID: 20255
  Gene Name: zinc finger protein interacting with K protein 1
  ENSP ID: ENSP00000470019
MDLTKGCVTFEDIAIYFSQDEWGLLDEAQR

SEQ ID NO: 101649 - protein, 110 aa, Homo sapiens
  Payload ID: 20255
  Gene Name: zinc finger protein interacting with K protein 1
  ENSP ID: ENSP00000472088
MDLTKGCVTFEDIAIYFSQDEWGLLDEAQRLLYLEVMLENFALVASLGCGHGTEDEETPSDQNVSVGVSQSKAGSSTQKTQSCEMCVPVLKDILHLADLPGQKPYLVGEC

SEQ ID NO: 101650 - protein, 487 aa, Homo sapiens
  Payload ID: 20255
  Gene Name: zinc finger protein interacting with K protein 1
  Uniprot ID: Q3SY52
  ENSP ID: ENSP00000472867
MAAAALRAPTQVTVSPETHMDLTKGCVTFEDIAIYFSQDEWGLLDEAQRLLYLEVMLENFALVASLGCGHGTEDEETPSDQNVSVGVSQSKAGSSTQKTQSCEMCVPVLKDILHLADLPGQKPYLVGECTNHHQHQKHHSAKKSLKRDMDRASYVKCCLFCMSLKPFRKWEVGKDLPAMLRLLRSLVFPGGKKPGTITECGEDIRSQKSHYKSGECGKASRHKHTPVYHPRVYTGKKLYECSKCGKAFRGKYSLVQHQRVHTGERPWECNECGKFFSQTSHLNDHRRIHTGERPYECSECGKLFRQNSSLVDHQKIHTGARPYECSQCGKSFSQKATLVKHQRVHTGERPYKCGECGNSFSQSAILNQHRRIHTGAKPYECGQCGKSFSQKATLIKHQRVHTGERPYKCGDCGKSFSQSSILIQHRRIHTGARPYECGQCGKSFSQKSGLIQHQVVHTGERPYECNKCGNSFSQCSSLIHHQKCHNT

SEQ ID NO: 101651 - protein, 1006 aa, Homo sapiens
  Payload ID: 20256
  Gene Name: zinc finger protein, FOG family member 1
  Uniprot ID: Q8IX07
  ENSP ID: ENSP00000326630
MSRRKQSNPRQIKRSLGDMEAREEVQLVGASHMEQKATAPEAPSPPSADVNSPPPLPPPTSPGGPKELEGQEPEPRPTEEEPGSPWSGPDELEPVVQDGQRRIRARLSLATGLSWGPFHGSVQTRASSPRQAEPSPALTLLLVDEACWLRTLPQALTEAEANTEIHRKDDALWCRVTKPVPAGGLLSVLLTAEPHSTPGHPVKKEPAEPTCPAPAHDLQLLPQQAGMASILATAVINKDVFPCKDCGIWYRSERNLQAHLLYYCASRQGTGSPAAAATDEKPKETYPNERVCPFPQCRKSCPSASSLEIHMRSHSGERPFVCLICLSAFTTKANCERHLKVHTDTLSGVCHSCGFISTTRDILYSHLVTNHMVCQPGSKGEIYSPGAGHPATKLPPDSLGSFQQQHTALQGPLASADLGLAPTPSPGLDRKALAEATNGEARAEPLAQNGGSSEPPAAPRSIKVEAVEEPEAAPILGPGEPGPQAPSRTPSPRSPAPARVKAELSSPTPGSSPVPGELGLAGALFLPQYVFGPDAAPPASEILAKMSELVHSRLQQGAGAGAGGAQTGLFPGAPKGATCFECEITFSNVNNYYVHKRLYCSGRRAPEDAPAARRPKAPPGPARAPPGQPAEPDAPRSSPGPGAREEGAGGAATPEDGAGGRGSEGSQSPGSSVDDAEDDPSRTLCEACNIRFSRHETYTVHKRYYCASRHDPPPRRPAAPPGPPGPAAPPAPSPAAPVRTRRRRKLYELHAAGAPPPPPPGHAPAPESPRPGSGSGSGPGLAPARSPGPAADGPIDLSKKPRRPLPGAPAPALADYHECTACRVSFHSLEAYLAHKKYSCPAAPPPGALGLPAAACPYCPPNGPVRGDLLEHFRLAHGLLLGAPLAGPGVEARTPADRGPSPAPAPAASPQPGSRGPRDGLGPEPQEPPPGPPPSPAAAPEAVPPPPAPPSYSDKGVQTPSKGTPAPLPNGNHRYCRLCNIKFSSLSTFIAHKKYYCSSHAAEHVK

SEQ ID NO: 101652 - protein, 151 aa, Homo sapiens
  Payload ID: 20256
  Gene Name: zinc finger protein, FOG family member 1
  ENSP ID: ENSP00000480412
MSRRKQSNPRQIKRSLGDMEAREEVQLVGASHMEQKATAPEAPSPPSADVNSPPPLPPPTSPGGPKELEGQEPEPRPTEEEPGSPWSGPDELEPVVQDGQRRIRARLSLATGLSWGPFHGSVQTRASSPRQAEPRGAISALAPSVQTHRTR

SEQ ID NO: 101653 - protein, 158 aa, Homo sapiens
  Payload ID: 20256
  Gene Name: zinc finger protein, FOG family member 1
  ENSP ID: ENSP00000482796
MSRRKQSNPRQIKRSLGDMEAREEVQLVGASHMEQKATAPEAPSPPSADVNSPPPLPPPTSPGGPKELEGQEPEPRPTEEEPGSPWSGPDELEPVVQDGQRRIRARLSLATGLSWGPFHGSVQTRASSPRQAEPMRKLRLQDVKSIAQIPRIKQQREK

SEQ ID NO: 101654 - protein, 117 aa, Homo sapiens
  Payload ID: 20256
  Gene Name: zinc finger protein, FOG family member 1
  ENSP ID: ENSP00000484216
MSRRKQSNPRQIKRSLGDMEAREEVQLVGASHMEQKATAPEAPSPPSADELEPVVQDGQRRIRARLSLATGLSWGPFHGSVQTRASSPRQAEPMRKLRLQDVKSIAQIPRIKQQREK

SEQ ID NO: 101655 - protein, 1151 aa, Homo sapiens
  Payload ID: 20257
  Gene Name: zinc finger protein, FOG family member 2
  Uniprot ID: Q8WW38
  ENSP ID: ENSP00000384179
MSRRKQSKPRQIKRPLEDAIEDEEEECPSEETDIISKGDFPLEESFSTEFGPENLSCEEVEYFCNKGDDEGIQETAESDGDTQSEKPGQPGVETDDWDGPGELEVFQKDGERKIQSRQQLPVGTTWGPFPGKMDLNNNSLKTKAQVPMVLTAGPKWLLDVTWQGVEDNKNNCIVYSKGGQLWCTTTKAISEGEELIAFVVDFDSRLQAASQMTLTEGMYPARLLDSIQLLPQQAAMASILPTAIVNKDIFPCKSCGIWYRSERNLQAHLMYYCSGRQREAAPVSEENEDSAHQISSLCPFPQCTKSFSNARALEMHLNSHSGVKMEEFLPPGASLKCTVCSYTADSVINFHQHLFSHLTQAAFRCNHCHFGFQTQRELLQHQELHVPSGKLPRESDMEHSPSATEDSLQPATDLLTRSELPQSQKAMQTKDASSDTELDKCEKKTQLFLTNQRPEIQPTTNKQSFSYTKIKSEPSSPRLASSPVQPNIGPSFPVGPFLSQFSFPQDITMVPQASEILAKMSELVHRRLRHGSSSYPPVIYSPLMPKGATCFECNITFNNLDNYLVHKKHYCSSRWQQMAKSPEFPSVSEKMPEALSPNTGQTSINLLNPAAHSADPENPLLQTSCINSSTVLDLIGPNGKGHDKDFSTQTKKLSTSSNNDDKINGKPVDVKNPSVPLVDGESDPNKTTCEACNITFSRHETYMVHKQYYCATRHDPPLKRSASNKVPAMQRTMRTRKRRKMYEMCLPEQEQRPPLVQQRFLDVANLNNPCTSTQEPTEGLGECYHPRCDIFPGIVSKHLETSLTINKCVPVSKCDTTHSSVSCLEMDVPIDLSKKCLSQSERTTTSPKRLLDYHECTVCKISFNKVENYLAHKQNFCPVTAHQRNDLGQLDGKVFPNPESERNSPDVSYERSIIKCEKNGNLKQPSPNGNLFSSHLATLQGLKVFSEAAQLIATKEENRHLFLPQCLYPGAIKKAKGADQLSPYYGIKPSDYISGSLVIHNTDIEQSRNAENESPKGQASSNGCAALKKDSLPLLPKNRGMVIVNGGLKQDERPAANPQQENISQNPQHEDDHKSPSWISENPLAANENVSPGIPSAEEQLSSIAKGVNGSSQAPTSGKYCRLCDIQFNNLSNFITHKKFYCSSHAAEHVK

SEQ ID NO: 101656 - protein, 26 aa, Homo sapiens
  Payload ID: 20257
  Gene Name: zinc finger protein, FOG family member 2
  ENSP ID: ENSP00000428149
MDLNNNSLKTKAQVPMVLTAGPKWLL

SEQ ID NO: 101657 - protein, 1019 aa, Homo sapiens
  Payload ID: 20257
  Gene Name: zinc finger protein, FOG family member 2
  ENSP ID: ENSP00000428720
MDLNNNSLKTKAQVPMVLTAGPKWLLDVTWQGVEDNKNNCIVYSKGGQLWCTTTKAISEGEELIAFVVDFDSRLQAASQMTLTEGMYPARLLDSIQLLPQQAAMASILPTAIVNKDIFPCKSCGIWYRSERNLQAHLMYYCSGRQREAAPVSEENEDSAHQISSLCPFPQCTKSFSNARALEMHLNSHSGVKMEEFLPPGASLKCTVCSYTADSVINFHQHLFSHLTQAAFRCNHCHFGFQTQRELLQHQELHVPSGKLPRESDMEHSPSATEDSLQPATDLLTRSELPQSQKAMQTKDASSDTELDKCEKKTQLFLTNQRPEIQPTTNKQSFSYTKIKSEPSSPRLASSPVQPNIGPSFPVGPFLSQFSFPQDITMVPQASEILAKMSELVHRRLRHGSSSYPPVIYSPLMPKGATCFECNITFNNLDNYLVHKKHYCSSRWQQMAKSPEFPSVSEKMPEALSPNTGQTSINLLNPAAHSADPENPLLQTSCINSSTVLDLIGPNGKGHDKDFSTQTKKLSTSSNNDDKINGKPVDVKNPSVPLVDGESDPNKTTCEACNITFSRHETYMVHKQYYCATRHDPPLKRSASNKVPAMQRTMRTRKRRKMYEMCLPEQEQRPPLVQQRFLDVANLNNPCTSTQEPTEGLGECYHPRCDIFPGIVSKHLETSLTINKCVPVSKCDTTHSSVSCLEMDVPIDLSKKCLSQSERTTTSPKRLLDYHECTVCKISFNKVENYLAHKQNFCPVTAHQRNDLGQLDGKVFPNPESERNSPDVSYERSIIKCEKNGNLKQPSPNGNLFSSHLATLQGLKVFSEAAQLIATKEENRHLFLPQCLYPGAIKKAKGADQLSPYYGIKPSDYISGSLVIHNTDIEQSRNAENESPKGQASSNGCAALKKDSLPLLPKNRGMVIVNGGLKQDERPAANPQQENISQNPQHEDDHKSPSWISENPLAANENVSPGIPSAEEQLSSIAKGVNGSSQAPTSGKYCRLCDIQFNNLSNFITHKKFYCSSHAAEHVK

SEQ ID NO: 101658 - protein, 1019 aa, Homo sapiens; identical to SEQ ID NO: 101657
  Payload ID: 20257
  Gene Name: zinc finger protein, FOG family member 2
  ENSP ID: ENSP00000430757

SEQ ID NO: 101659 - protein, 805 aa, Homo sapiens
  Payload ID: 20258
  Gene Name: zinc finger protein, X-linked
  Uniprot ID: P17010
  ENSP ID: ENSP00000304985
MDEDGLELQQEPNSFFDATGADGTHMDGDQIVVEVQETVFVSDVVDSDITVHNFVPDDPDSVVIQDVIEDVVIEDVQCPDIMEEADVSETVIIPEQVLDSDVTEEVSLAHCTVPDDVLASDITSASMSMPEHVLTGDSIHVSDVGHVGHVGHVEHVVHDSVVEAEIVTDPLTTDVVSEEVLVADCASEAVIDANGIPVDQQDDDKGNCEDYLMISLDDAGKIEHDGSSGMTMDTESEIDPCKVDGTCPEVIKVYIFKADPGEDDLGGTVDIVESEPENDHGVELLDQNSSIRVPREKMVYMTVNDSQPEDEDLNVAEIADEVYMEVIVGEEDAAAAAAAAAVHEQQMDDNEIKTFMPIAWAAAYGNNSDGIENRNGTASALLHIDESAGLGRLAKQKPKKRRRPDSRQYQTAIIIGPDGHPLTVYPCMICGKKFKSRGFLKRHMKNHPEHLAKKKYRCTDCDYTTNKKISLHNHLESHKLTSKAEKAIECDECGKHFSHAGALFTHKMVHKEKGANKMHKCKFCEYETAEQGLLNRHLLAVHSKNFPHICVECGKGFRHPSELKKHMRIHTGEKPYQCQYCEYRSADSSNLKTHVKTKHSKEMPFKCDICLLTFSDTKEVQQHALIHQESKTHQCLHCDHKSSNSSDLKRHIISVHTKDYPHKCDMCDKGFHRPSELKKHVAAHKGKKMHQCRHCDFKIADPFVLSRHILSVHTKDLPFRCKRCRKGFRQQSELKKHMKTHSGRKVYQCEYCEYSTTDASGFKRHVISIHTKDYPHRCEYCKKGFRRPSEKNQHIMRHHKEVGLP

SEQ ID NO: 101660 - protein, 755 aa, Homo sapiens
  Payload ID: 20258
  Gene Name: zinc finger protein, X-linked
  ENSP ID: ENSP00000343384
MDEDGLELQQEPNSFFDATGADGTHMDGDQIVVEVQETVFVSDVVDSDITVHNFVPDDPDSVVIQDVIEDVVIEDVQCPDIMEEADVSETVIIPEQVLDSDVTEEVSLAHCTVPDDVLASDITSASMSMPEHVLTGDSIHVSDVGHVGHVGHVEHVVHDSVVEAEIVTDPLTTDVVSEEVLVADCASEAVIDANGIPVDQQDDDKGNCEDYLMISCGTVDIVESEPENDHGVELLDQNSSIRVPREKMVYMTVNDSQPEDEDLNVAEIADEVYMEVIVGEEDAAAAAAAAAVHEQQMDDNEIKTFMPIAWAAAYGNNSDGIENRNGTASALLHIDESAGLGRLAKQKPKKRRRPDSRQYQTAIIIGPDGHPLTVYPCMICGKKFKSRGFLKRHMKNHPEHLAKKKYRCTDCDYTTNKKISLHNHLESHKLTSKAEKAIECDECGKHFSHAGALFTHKMVHKEKGANKMHKCKFCEYETAEQGLLNRHLLAVHSKNFPHICVECGKGFRHPSELKKHMRIHTGEKPYQCQYCEYRSADSSNLKTHVKTKHSKEMPFKCDICLLTFSDTKEVQQHALIHQESKTHQCLHCDHKSSNSSDLKRHIISVHTKDYPHKCDMCDKGFHRPSELKKHVAAHKGKKMHQCRHCDFKIADPFVLSRHILSVHTKDLPFRCKRCRKGFRQQSELKKHMKTHSGRKVYQCEYCEYSTTDASGFKRHVISIHTKDYPHRCEYCKKGFRRPSEKNQHIMRHHKEVGLP

SEQ ID NO: 101661 - protein, 805 aa, Homo sapiens; identical to SEQ ID NO: 101659
  Payload ID: 20258
  Gene Name: zinc finger protein, X-linked
  Uniprot ID: P17010
  ENSP ID: ENSP00000368475

SEQ ID NO: 101662 - protein, 844 aa, Homo sapiens
  Payload ID: 20258
  Gene Name: zinc finger protein, X-linked
  Uniprot ID: P17010
  ENSP ID: ENSP00000368486
MDEDGLELQQEPNSFFDATDRVSFCHPGWSTVAPSGSTATSASQAQVICSASRVTGATGADGTHMDGDQIVVEVQETVFVSDVVDSDITVHNFVPDDPDSVVIQDVIEDVVIEDVQCPDIMEEADVSETVIIPEQVLDSDVTEEVSLAHCTVPDDVLASDITSASMSMPEHVLTGDSIHVSDVGHVGHVGHVEHVVHDSVVEAEIVTDPLTTDVVSEEVLVADCASEAVIDANGIPVDQQDDDKGNCEDYLMISLDDAGKIEHDGSSGMTMDTESEIDPCKVDGTCPEVIKVYIFKADPGEDDLGGTVDIVESEPENDHGVELLDQNSSIRVPREKMVYMTVNDSQPEDEDLNVAEIADEVYMEVIVGEEDAAAAAAAAAVHEQQMDDNEIKTFMPIAWAAAYGNNSDGIENRNGTASALLHIDESAGLGRLAKQKPKKRRRPDSRQYQTAIIIGPDGHPLTVYPCMICGKKFKSRGFLKRHMKNHPEHLAKKKYRCTDCDYTTNKKISLHNHLESHKLTSKAEKAIECDECGKHFSHAGALFTHKMVHKEKGANKMHKCKFCEYETAEQGLLNRHLLAVHSKNFPHICVECGKGFRHPSELKKHMRIHTGEKPYQCQYCEYRSADSSNLKTHVKTKHSKEMPFKCDICLLTFSDTKEVQQHALIHQESKTHQCLHCDHKSSNSSDLKRHIISVHTKDYPHKCDMCDKGFHRPSELKKHVAAHKGKKMHQCRHCDFKIADPFVLSRHILSVHTKDLPFRCKRCRKGFRQQSELKKHMKTHSGRKVYQCEYCEYSTTDASGFKRHVISIHTKDYPHRCEYCKKGFRRPSEKNQHIMRHHKEVGLP

SEQ ID NO: 101663 - protein, 135 aa, Homo sapiens
  Payload ID: 20258
  Gene Name: zinc finger protein, X-linked
  ENSP ID: ENSP00000411637
MDEDGLELQQEPNSFFDATGADGTHMDGDQIVVEVQETVFVSDVVDSDITVHNFVPDDPDSVVIQDVIEDVVIEDVQCPDIMEEADVSETVIIPEQVLDSDVTEEVSLAHCTVPDDVLASDITSASMSMPEHVLT

SEQ ID NO: 101664 - protein, 31 aa, Homo sapiens
  Payload ID: 20258
  Gene Name: zinc finger protein, X-linked
  ENSP ID: ENSP00000416298
MDEDGLELQQEPNSFFDATGADGTHMDGDQI

SEQ ID NO: 101665 - protein, 576 aa, Homo sapiens
  Payload ID: 20258
  Gene Name: zinc finger protein, X-linked
  Uniprot ID: P17010
  ENSP ID: ENSP00000438233
MTMDTESEIDPCKVDGTCPEVIKVYIFKADPGEDDLGGTVDIVESEPENDHGVELLDQNSSIRVPREKMVYMTVNDSQPEDEDLNVAEIADEVYMEVIVGEEDAAAAAAAAAVHEQQMDDNEIKTFMPIAWAAAYGNNSDGIENRNGTASALLHIDESAGLGRLAKQKPKKRRRPDSRQYQTAIIIGPDGHPLTVYPCMICGKKFKSRGFLKRHMKNHPEHLAKKKYRCTDCDYTTNKKISLHNHLESHKLTSKAEKAIECDECGKHFSHAGALFTHKMVHKEKGANKMHKCKFCEYETAEQGLLNRHLLAVHSKNFPHICVECGKGFRHPSELKKHMRIHTGEKPYQCQYCEYRSADSSNLKTHVKTKHSKEMPFKCDICLLTFSDTKEVQQHALIHQESKTHQCLHCDHKSSNSSDLKRHIISVHTKDYPHKCDMCDKGFHRPSELKKHVAAHKGKKMHQCRHCDFKIADPFVLSRHILSVHTKDLPFRCKRCRKGFRQQSELKKHMKTHSGRKVYQCEYCEYSTTDASGFKRHVISIHTKDYPHRCEYCKKGFRRPSEKNQHIMRHHKEVGLP

SEQ ID NO: 101666 - protein, 801 aa, Homo sapiens
  Payload ID: 20259
  Gene Name: zinc finger protein, Y-linked
  Uniprot ID: P08048
  ENSP ID: ENSP00000155093
MDEDEFELQPQEPNSFFDGIGADATHMDGDQIVVEIQEAVFVSNIVDSDITVHNFVPDDPDSVVIQDVVEDVVIEEDVQCSDILEEADVSENVIIPEQVLDSDVTEEVSLPHCTVPDDVLASDITSTSMSMPEHVLTSESMHVCDIGHVEHMVHDSVVEAEIITDPLTSDIVSEEVLVADCAPEAVIDASGISVDQQDNDKASCEDYLMISLDDAGKIEHDGSTGVTIDAESEMDPCKVDSTCPEVIKVYIFKADPGEDDLGGTVDIVESEPENDHGVELLDQNSSIRVPREKMVYMTVNDSQQEDEDLNVAEIADEVYMEVIVGEEDAAVAAAAAAVHEQQIDEDEMKTFVPIAWAAAYGNNSDGIENRNGTASALLHIDESAGLGRLAKQKPKKKRRPDSRQYQTAIIIGPDGHPLTVYPCMICGKKFKSRGFLKRHMKNHPEHLAKKKYHCTDCDYTTNKKISLHNHLESHKLTSKAEKAIECDECGKHFSHAGALFTHKMVHKEKGANKMHKCKFCEYETAEQGLLNRHLLAVHSKNFPHICVECGKGFRHPSELRKHMRIHTGEKPYQCQYCEYRSADSSNLKTHIKTKHSKEMPFKCDICLLTFSDTKEVQQHTLVHQESKTHQCLHCDHKSSNSSDLKRHVISVHTKDYPHKCEMCEKGFHRPSELKKHVAVHKGKKMHQCRHCDFKIADPFVLSRHILSVHTKDLPFRCKRCRKGFRQQNELKKHMKTHSGRKVYQCEYCEYSTTDASGFKRHVISIHTKDYPHRCEYCKKGFRRPSEKNQHIMRHHKEVGLP

SEQ ID NO: 101667 - protein, 801 aa, Homo sapiens; identical to SEQ ID NO: 101666
  Payload ID: 20259
  Gene Name: zinc finger protein, Y-linked
  Uniprot ID: P08048
  ENSP ID: ENSP00000372525

SEQ ID NO: 101668 - protein, 91 aa, Homo sapiens
  Payload ID: 20259
  Gene Name: zinc finger protein, Y-linked
  ENSP ID: ENSP00000388814
MDEDEFELQPQEPNSFFDGIGADATHMDGDQIVVEIQEAVFVSNIVDSDITVHNFVPDDPDSVVIQDVVEDVVIEEDVQCSDILEEADVSE

SEQ ID NO: 101669 - protein, 724 aa, Homo sapiens
  Payload ID: 20259
  Gene Name: zinc finger protein, Y-linked
  Uniprot ID: P08048
  ENSP ID: ENSP00000393908
MDGDQIVVEIQEAVFVSNIVDSDITVHNFVPDDPDSVVIQDVVEDVVIEEDVQCSDILEEADVSENVIIPEQVLDSDVTEEVSLPHCTVPDDVLASDITSTSMSMPEHVLTSESMHVCDIGHVEHMVHDSVVEAEIITDPLTSDIVSEEVLVADCAPEAVIDASGISVDQQDNDKASCEDYLMISLDDAGKIEHDGSTGVTIDAESEMDPCKVDSTCPEVIKVYIFKADPGEDDLGGTVDIVESEPENDHGVELLDQNSSIRVPREKMVYMTVNDSQQEDEDLSNNSDGIENRNGTASALLHIDESAGLGRLAKQKPKKKRRPDSRQYQTAIIIGPDGHPLTVYPCMICGKKFKSRGFLKRHMKNHPEHLAKKKYHCTDCDYTTNKKISLHNHLESHKLTSKAEKAIECDECGKHFSHAGALFTHKMVHKEKGANKMHKCKFCEYETAEQGLLNRHLLAVHSKNFPHICVECGKGFRHPSELRKHMRIHTGEKPYQCQYCEYRSADSSNLKTHIKTKHSKEMPFKCDICLLTFSDTKEVQQHTLVHQESKTHQCLHCDHKSSNSSDLKRHVISVHTKDYPHKCEMCEKGFHRPSELKKHVAVHKGKKMHQCRHCDFKIADPFVLSRHILSVHTKDLPFRCKRCRKGFRQQNELKKHMKTHSGRKVYQCEYCEYSTTDASGFKRHVISIHTKDYPHRCEYCKKGFRRPSEKNQHIMRHHKEVGLP

SEQ ID NO: 101670 - protein, 610 aa, Homo sapiens
  Payload ID: 20259
  Gene Name: zinc finger protein, Y-linked
  Uniprot ID: P08048
  ENSP ID: ENSP00000485605
MDEDEFELQPQEPNSFFDGIVDDAGKIEHDGSTGVTIDAESEMDPCKVDSTCPEVIKVYIFKADPGEDDLGGTVDIVESEPENDHGVELLDQNSSIRVPREKMVYMTVNDSQQEDEDLNVAEIADEVYMEVIVGEEDAAVAAAAAAVHEQQIDEDEMKTFVPIAWAAAYGNNSDGIENRNGTASALLHIDESAGLGRLAKQKPKKKRRPDSRQYQTAIIIGPDGHPLTVYPCMICGKKFKSRGFLKRHMKNHPEHLAKKKYHCTDCDYTTNKKISLHNHLESHKLTSKAEKAIECDECGKHFSHAGALFTHKMVHKEKGANKMHKCKFCEYETAEQGLLNRHLLAVHSKNFPHICVECGKGFRHPSELRKHMRIHTGEKPYQCQYCEYRSADSSNLKTHIKTKHSKEMPFKCDICLLTFSDTKEVQQHTLVHQESKTHQCLHCDHKSSNSSDLKRHVISVHTKDYPHKCEMCEKGFHRPSELKKHVAVHKGKKMHQCRHCDFKIADPFVLSRHILSVHTKDLPFRCKRCRKGFRQQNELKKHMKTHSGRKVYQCEYCEYSTTDASGFKRHVISIHTKDYPHRCEYCKKGFRRPSEKNQHIMRHHKEVGLP

SEQ ID NO: 101671 - protein, 310 aa, Homo sapiens
  Payload ID: 20260
  Gene Name: zinc finger protein-like 1
  Uniprot ID: O95159
  ENSP ID: ENSP00000294258
MGLCKCPKRKVTNLFCFEHRVNVCEHCLVANHAKCIVQSYLQWLQDSDYNPNCRLCNIPLASRETTRLVCYDLFHWACLNERAAQLPRNTAPAGYQCPSCNGPIFPPTNLAGPVASALREKLATVNWARAGLGLPLIDEVVSPEPEPLNTSDFSDWSSFNASSTPGPEEVDSASAAPAFYSQAPRPPASPGRPEQHTVIHMGNPEPLTHAPRKVYDTRDDDRTPGLHGDCDDDKYRRRPALGWLARLLRSRAGSRKRPLTLLQRAGLLLLLGLLGFLALLALMSRLGRAAADSDPNLDPLMNPHIRVGPS

SEQ ID NO: 101672 - protein, 109 aa, Homo sapiens
  Payload ID: 20260
  Gene Name: zinc finger protein-like 1
  ENSP ID: ENSP00000415088
MGLCKCPKRKVTNLFCFEHRVNVCEHCLVANHAKCIVQSYLQWLQDSDYNPNCRLCNIPLASRETTRLVCYGEALAPRGDQASLRGQLGDWFPGPPQAAGQSLSLGLPQ

SEQ ID NO: 101673 - protein, 53 aa, Homo sapiens
  Payload ID: 20260
  Gene Name: zinc finger protein-like 1
  ENSP ID: ENSP00000432377
  MOD_RES (1)..(1): Any amino acid
XDYNPNCRLCNIPLASRETTRLVCYDSFLQIDEVVSPEPEPLNTSDFSDWSSF

SEQ ID NO: 101674 - protein, 172 aa, Homo sapiens
  Payload ID: 20260
  Gene Name: zinc finger protein-like 1
  ENSP ID: ENSP00000432529
MGLCKCPKRKVTNLFCFEHRVNVCEHCLCIVQSYLQWLQDSDYNPNCRLCNIPLASRETTRLVCYDLFHWACLNERAAQLPRNTAPAGYQCPSCNGPIFPPTNLAGPVASALREKLATVNWARAGLGLPLIDEVVSPEPEPLNTSDFSDWSSFNASSTPGPEEVDSASAAPA

SEQ ID NO: 101675 - protein, 65 aa, Homo sapiens
  Payload ID: 20260
  Gene Name: zinc finger protein-like 1
  ENSP ID: ENSP00000432833
MGLCKCPKRKVTNLFCFEHRVNVCEHCLVANHAKVGPSGERLSRALGGQGGIGFLQIHEGPRARM

SEQ ID NO: 101676 - protein, 65 aa, Homo sapiens; identical to SEQ ID NO: 101675
  Payload ID: 20260
  Gene Name: zinc finger protein-like 1
  ENSP ID: ENSP00000433673

SEQ ID NO: 101677 - protein, 188 aa, Homo sapiens
  Payload ID: 20260
  Gene Name: zinc finger protein-like 1
  ENSP ID: ENSP00000434454
MGLCKCPKRKVTNLFCFEHRVNVCEHCLVANHAKCIVQSYLQWLQDSDYNPNCRLCNIPLASRETTRLVCYDLFHWACLNERAAQLPRNTAPAGYQCPSCNGPIFPPTNLAGPVASALREKLATVNWARAGLGLPLIDEVVSPEPEPLNTSDFSDWSSFNASSTPGPEEVDSASAAPAFYSQAPRPPA

SEQ ID NO: 101678 - protein, 10 aa, Homo sapiens
  Payload ID: 20260
  Gene Name: zinc finger protein-like 1
  ENSP ID: ENSP00000434780
  MOD_RES (1)..(1): Any amino acid
XPGPPQAAGQ

SEQ ID NO: 101679 - protein, 80 aa, Homo sapiens
  Payload ID: 20260
  Gene Name: zinc finger protein-like 1
  ENSP ID: ENSP00000435677
MGLCKCPKRKVTNLFCFEHRVNVCEHCLVANHAKISFTGPASMNVLPSYPETRHLPAISAPAAMAPSSPQPTWLAPWPPH

SEQ ID NO: 101680 - protein, 207 aa, Homo sapiens
  Payload ID: 20260
  Gene Name: zinc finger protein-like 1
  ENSP ID: ENSP00000437090
MGLCKCPKRKVTNLFCFEHRVNVCEHCLVANHAKCIVQSYLQWLQDSDYNPNCRLCNIPLASRETTRLVCYDLFHWACLNERAAQLPRNTAPAGYQCPSCNGPIFPPTNLAGPVASALREKLATVNWARAGLGLPLIDEVVSPEPEPLNTSDFSDWSSFNASSTPGPEEVDSASAAPAFYSQAPRPPASPGRPEQHTVIHMGNPEPL

SEQ ID NO: 101681 - protein, 1074 aa, Homo sapiens
  Payload ID: 20261
  Gene Name: zinc finger RNA binding protein
  Uniprot ID: Q96KR1
  ENSP ID: ENSP00000265069
MIPICPVVSFTYVPSRLGEDAKMATGNYFGFTHSGAAAAAAAAQYSQQPASGVAYSHPTTVASYTVHQAPVAAHTVTAAYAPAAATVAVARPAPVAVAAAATAAAYGGYPTAHTATDYGYTQRQQEAPPPPPPATTQNYQDSYSYVRSTAPAVAYDSKQYYQQPTATAAAVAAAAQPQPSVAETYYQTAPKAGYSQGATQYTQAQQTRQVTAIKPATPSPATTTFSIYPVSSTVQPVAAAATVVPSYTQSATYSTTAVTYSGTSYSGYEAAVYSAASSYYQQQQQQQKQAAAAAAAAAATAAWTGTTFTKKAPFQNKQLKPKQPPKPPQIHYCDVCKISCAGPQTYKEHLEGQKHKKKEAALKASQNTSSSNSSTRGTQNQLRCELCDVSCTGADAYAAHIRGAKHQKVVKLHTKLGKPIPSTEPNVVSQATSSTAVSASKPTASPSSIAANNCTVNTSSVATSSMKGLTTTGNSSLNSTSNTKVSAVPTNMAAKKTSTPKINFVGGNKLQSTGNKAEDIKGTECVKSTPVTSAVQIPEVKQDTVSEPVTPASLAALQSDVQPVGHDYVEEVRNDEGKVIRFHCKLCECSFNDPNAKEMHLKGRRHRLQYKKKVNPDLQVEVKPSIRARKIQEEKMRKQMQKEEYWRRREEEERWRMEMRRYEEDMYWRRMEEEQHHWDDRRRMPDGGYPHGPPGPLGLLGVRPGMPPQPQGPAPLRRPDSSDDRYVMTKHATIYPTEEELQAVQKIVSITERALKLVSDSLSEHEKNKNKEGDDKKEGGKDRALKGVLRVGVLAKGLLLRGDRNVNLVLLCSEKPSKTLLSRIAENLPKQLAVISPEKYDIKCAVSEAAIILNSCVEPKMQVTITLTSPIIREENMREGDVTSGMVKDPPDVLDRQKCLDALAALRHAKWFQARANGLQSCVIIIRILRDLCQRVPTWSDFPSWAMELLVEKAISSASSPQSPGDALRRVFECISSGIILKGSPGLLDPCEKDPFDTLATMTDQQREDITSSAQFALRLLAFRQIHKVLGMDPLPQMSQRFNIHNNRKRRRDSDGVDGFEAEGKKDKKDYDNF

SEQ ID NO: 101682 - protein, 182 aa, Homo sapiens
  Payload ID: 20261
  Gene Name: zinc finger RNA binding protein
  ENSP ID: ENSP00000422300
  MOD_RES (1)..(1): Any amino acid
XGVRPGMPPQPQGPAPLRRPDSSDDRYVMTKHATIYPTEEELQAVQKIVSITERALKLVSDSLSEHEKNKNKEGDDKKEGGKDRALKGVLRVGVLAKGLLLRGDRNVNLVLLCSEKPSKTLLSRIAENLPKQLAVISPEKYDIKCAVSEAAIILNSCVEPKMQVTITLTSPIIREENMREGG

SEQ ID NO: 101683 - protein, 939 aa, Homo sapiens
  Payload ID: 20262
  Gene Name: zinc finger RNA binding protein 2
  Uniprot ID: Q9UPR6
  ENSP ID: ENSP00000262961
MATSQYFDFAQGGGPQYSAQPPTLPLPTVGASYTAQPTPGMDPAVNPAFPPAAPAGYGGYQPHSGQDFAYGSRPQEPVPTATTMATYQDSYSYGQSAAARSYEDRPYFQSAALQSGRMTAADSGQPGTQEACGQPSPHGSHSHAQPPQQAPIVESGQPASTLSSGYTYPTATGVQPESSASIVTSYPPPSYNPTCTAYTAPSYPNYDASVYSAASPFYPPAQPPPPPGPPQQLPPPPAPAGSGSSPRADSKPPLPSKLPRPKAGPRQLQLHYCDICKISCAGPQTYREHLGGQKHRKKEAAQKTGVQPNGSPRGVQAQLHCDLCAVSCTGADAYAAHIRGSKHQKVFKLHAKLGKPIPTLEPALATESPPGAEAKPTSPTGPSVCASSRPALAKRPVASKALCEGPPEPQAAGCRPQWGKPAQPKLEGPGAPTQGGSKEAPAGCSDAQPVGPEYVEEVFSDEGRVLRFHCKLCECSFNDLNAKDLHVRGRRHRLQYRKKVNPDLPIATEPSSRARKVLEERMRKQRHLAEERLEQLRRWHAERRRLEEEPPQDVPPHAPPDWAQPLLMGRPESPASAPLQPGRRPASSDDRHVMCKHATIYPTEQELLAVQRAVSHAERALKLVSDTLAEEDRGRREEEGDKRSSVAPQTRVLKGVMRVGILAKGLLLRGDRNVRLALLCSEKPTHSLLRRIAQQLPRQLQMVTEDEYEVSSDPEANIVISSCEEPRMQVTISVTSPLMREDPSTDPGVEEPQADAGDVLSPKKCLESLAALRHARWFQARASGLQPCVIVIRVLRDLCRRVPTWGALPAWAMELLVEKAVSSAAGPLGPGDAVRRVLECVATGTLLTDGPGLQDPCERDQTDALEPMTLQEREDVTASAQHALRMLAFRQTHKVLGMDLLPPRHRLGARFRKRQRGPGEGEEGAGEKKRGRRGGEGLV

SEQ ID NO: 101684 - protein, 70 aa, Homo sapiens
  Payload ID: 20262
  Gene Name: zinc finger RNA binding protein 2
  Uniprot ID: Q9UPR6
  ENSP ID: ENSP00000388567
MATSQYFDFAQGGGPQYSPEVETTPPALASGLPCALPWTVGCSGSDAVTALCPSLRGLACICSILWDPAW

SEQ ID NO: 101685 - protein, 366 aa, Homo sapiens
  Payload ID: 20262
  Gene Name: zinc finger RNA binding protein 2
  Uniprot ID: Q9UPR6
  ENSP ID: ENSP00000388974
MATSQYFDFAQGGGPQYSAQPPTLPLPTVGASYTAQPTPGMDPAVNPAFPPAAPAGYGGYQPHSGQDFAYGSRPQEPVPTATTMATYQDSYSYGQSAAARSYEDRPYFQSAALQSGRMTAADSGQPGTQEACGQPSPHGSHSHAQPPQQAPIVESGQPASTLSSGYTYPTATGVQPESSASIVTSYPPPSYNPTCTAYTAPSYPNYDASVYSAASPFYPPAQPPPPPGPPQQLPPPPAPAGSGSSPRADSKPPLPSKLPRPKAGPRQLQLHYCDICKISCAGPQTYREHLGGQKHRKKEAAQKTGVQPNGSPRGVQAQLHCDLCAVSCTGADAYAAHIRGSKHQKGLLSHRQQAADPSGGNQPNLN

SEQ ID NO: 101686 - protein, 44 aa, Homo sapiens
  Payload ID: 20262
  Gene Name: zinc finger RNA binding protein 2
  ENSP ID: ENSP00000465574
  MOD_RES (1)..(1): Any amino acid
XATSQYFDFAQGGGPQYSTLLEDGTLVWLFPAAVTAPMTAAGPH

SEQ ID NO: 101687 - protein, 44 aa, Homo sapiens
  Payload ID: 20262
  Gene Name: zinc finger RNA binding protein 2
  ENSP ID: ENSP00000467592
MATSQYFDFAQGGGPQYSTLLEDGTLVWLFPAAVTAPMTAAGPH

SEQ ID NO: 101688 - protein, 68 aa, Homo sapiens
  Payload ID: 20262
  Gene Name: zinc finger RNA binding protein 2
  ENSP ID: ENSP00000467762
MNLPPDRPGLLSLSVSPEVETTPPALASGLPCALPWTVGCSGSDAVTALCPSLRGLACICSILWDPAW

SEQ ID NO: 101689 - protein, 68 aa, Homo sapiens; identical to SEQ ID NO: 101688
  Payload ID: 20262
  Gene Name: zinc finger RNA binding protein 2
  ENSP ID: ENSP00000468289

SEQ ID NO: 101690 - protein, 563 aa, Homo sapiens
  Payload ID: 20263
  Gene Name: zinc finger with KRAB and SCAN domains 1
  Uniprot ID: P17029
  ENSP ID: ENSP00000323148
MMTAESREATGLSPQAAQEKDGIVIVKVEEEDEEDHMWGQDSTLQDTPPPDPEIFRQRFRRFCYQNTFGPREALSRLKELCHQWLRPEINTKEQILELLVLEQFLSILPKELQVWLQEYRPDSGEEAVTLLEDLELDLSGQQVPGQVHGPEMLARGMVPLDPVQESSSFDLHHEATQSHFKHSSRKPRLLQSRALPAAHIPAPPHEGSPRDQAMASALFTADSQAMVKIEDMAVSLILEEWGCQNLARRNLSRDNRQENYGSAFPQGGENRNENEESTSKAETSEDSASRGETTGRSQKEFGEKRDQEGKTGERQQKNPEEKTRKEKRDSGPAIGKDKKTITGERGPREKGKGLGRSFSLSSNFTTPEEVPTGTKSHRCDECGKCFTRSSSLIRHKIIHTGEKPYECSECGKAFSLNSNLVLHQRIHTGEKPHECNECGKAFSHSSNLILHQRIHSGEKPYECNECGKAFSQSSDLTKHQRIHTGEKPYECSECGKAFNRNSYLILHRRIHTREKPYKCTKCGKAFTRSSTLTLHHRIHARERASEYSPASLDAFGAFLKSCV

SEQ ID NO: 101691 - protein, 125 aa, Homo sapiens
  Payload ID: 20263
  Gene Name: zinc finger with KRAB and SCAN domains 1
  ENSP ID: ENSP00000394445
MMTAESREATGLSPQAAQEKDGIVIVKVEEEDEEDHMWGQDSTLQDTPPPDPEIFRQRFRRFCYQNTFGPREALSRLKELCHQWLRPEINTKEQILELLVLEQFLSILPKELQVWLQEYRPDSGE

SEQ ID NO: 101692 - protein, 527 aa, Homo sapiens
  Payload ID: 20263
  Gene Name: zinc finger with KRAB and SCAN domains 1
  ENSP ID: ENSP00000409172
MWGQDSTLQDTPPPDPEIFRQRFRRFCYQNTFGPREALSRLKELCHQWLRPEINTKEQILELLVLEQFLSILPKELQVWLQEYRPDSGEEAVTLLEDLELDLSGQQVPGQVHGPEMLARGMVPLDPVQESSSFDLHHEATQSHFKHSSRKPRLLQSRALPAAHIPAPPHEGSPRDQAMASALFTADSQAMVKIEDMAVSLILEEWGCQNLARRNLSRDNRQENYGSAFPQGGENRNENEESTSKAETSEDSASRGETTGRSQKEFGEKRDQEGKTGERQQKNPEEKTRKEKRDSGPAIGKDKKTITGERGPREKGKGLGRSFSLSSNFTTPEEVPTGTKSHRCDECGKCFTRSSSLIRHKIIHTGEKPYECSECGKAFSLNSNLVLHQRIHTGEKPHECNECGKAFSHSSNLILHQRIHSGEKPYECNECGKAFSQSSDLTKHQRIHTGEKPYECSECGKAFNRNSYLILHRRIHTREKPYKCTKCGKAFTRSSTLTLHHRIHARERASEYSPASLDAFGAFLKSCV

SEQ ID NO: 101693 - protein, 350 aa, Homo sapiens
  Payload ID: 20263
  Gene Name: zinc finger with KRAB and SCAN domains 1
  ENSP ID: ENSP00000443508
MASALFTADSQAMVKIEDMAVSLILEEWGCQNLARRNLSRDNRQENYGSAFPQGGENRNENEESTSKAETSEDSASRGETTGRSQKEFGEKRDQEGKTGERQQKNPEEKTRKEKRDSGPAIGKDKKTITGERGPREKGKGLGRSFSLSSNFTTPEEVPTGTKSHRCDECGKCFTRSSSLIRHKIIHTGEKPYECSECGKAFSLNSNLVLHQRIHTGEKPHECNECGKAFSHSSNLILHQRIHSGEKPYECNECGKAFSQSSDLTKHQRIHTGEKPYECSECGKAFNRNSYLILHRRIHTREKPYKCTKCGKAFTRSSTLTLHHRIHARERASEYSPASLDAFGAFLKSCV

SEQ ID NO: 101694 - protein, 527 aa, Homo sapiens; identical to SEQ ID NO: 101692
  Payload ID: 20263
  Gene Name: zinc finger with KRAB and SCAN domains 1
  ENSP ID: ENSP00000480305

SEQ ID NO: 101695 - protein, 967 aa, Homo sapiens
  Payload ID: 20264
  Gene Name: zinc finger with KRAB and SCAN domains 2
  Uniprot ID: Q63HK3
  ENSP ID: ENSP00000331626
MAVALDSQIDAPLEVEGCLIMKVEKDPEWASEPILEGSDSSETFRKCFRQFCYEDVTGPHEAFSKLWELCCRWLKPEMRSKEQILELLVIEQFLTILPEKIQAWAQKQCPQSGEEAVALVVHLEKETGRLRQQVSSPVHREKHSPLGAAWEVADFQPEQVETQPRAVSREEPGSLHSGHQEQLNRKRERRPLPKNARPSPWVPALADEWNTLDQEVTTTRLPAGSQEPVKDVHVARGFSYRKSVHQIPAQRDLYRDFRKENVGNVVSLGSAVSTSNKITRLEQRKEPWTLGLHSSNKRSILRSNYVKEKSVHAIQVPARSAGKTWREQQQWGLEDEKIAGVHWSYEETKTFLAILKESRFYETLQACPRNSQVYGAVAEWLRECGFLRTPEQCRTKFKSLQKSYRKVRNGHMLEPCAFFEDMDALLNPAARAPSTDKPKEMIPVPRLKRIAISAKEHISLVEEEEAAEDSDDDEIGIEFIRKSEIHGAPVLFQNLSGVHWGYEETKTFLDILRETRFYEALQACHRKSKLYGAVAEQLRECGFLRTPEQCRTKFKSLQKSYRKVKNGHVLESCAFYKEMDALINSRASAPSPSTPEEVPSPSRQERGGIEVEPQEPTGWEPEETSQEAVIEDSCSERMSEEEIVQEPEFQGPPGLLQSPNDFEIGSSIKEDPTQIVYKDMEQHRALIEKSKRVVSQSTDPSKYRKRECISGRQWENLQGIRQGKPMSQPRDLGKAVVHQRPFVGKRPYRLLKYGESFGRSTRLMCRMTHHKENPYKCGVCGKCFGRSRSLIRHQRIHTGEKPFKCLDCGKSFNDSSNFGAHQRIHTGEKPYRCGECGKCFSQSSSLIIHQRTHTGEKPYQCGECGKSFTNSSHFSAHRRVHTGENPYKCVDCEKSFNNCTRFREHRRIHTGEKPYGCAQCGKRFSKSSVLTKHREVHVREKPLPHPPSLYCPENPHKGKTDEFRKTF

SEQ ID NO: 101696 - protein, 232 aa, Homo sapiens
  Payload ID: 20264
  Gene Name: zinc finger with KRAB and SCAN domains 2
  ENSP ID: ENSP00000455586
MAVALDSQIDAPLEVEGCLIMKVEKDPEWASEPILEGSDSSETFRKCFRQFCYEDVTGPHEAFSKLWELCCRWLKPEMRSKEQILELLVIEQFLTILPEKIQAWAQKQCPQSGEEAVALVVHLEKETGRLRQQVSSPVHREKHSPLGAAWEVADFQPEQVETQPRAVSREEPGSLHSGHQEQLNRKRERRPLPKNARPSPWVPALADEWNTLDQEVTTTRLPAGSQCHYRNQ

SEQ ID NO: 101697 - protein, 538 aa, Homo sapiens
  Payload ID: 20265
  Gene Name: zinc finger with KRAB and SCAN domains 3
  Uniprot ID: Q9BRR0
  ENSP ID: ENSP00000252211
MARELSESTALDAQSTEDQMELLVIKVEEEEAGFPSSPDLGSEGSRERFRGFRYPEAAGPREALSRLRELCRQWLQPEMHSKEQILELLVLEQFLTILPGNLQSWVREQHPESGEEVVVLLEYLERQLDEPAPQVSGVDQGQELLCCKMALLTPAPGSQSSQFQLMKALLKHESVGSQPLQDRVLQVPVLAHGGCCREDKVVASRLTPESQGLLKVEDVALTLTPEWTQQDSSQGNLCRDEKQENHGSLVSLGDEKQTKSRDLPPAEELPEKEHGKISCHLREDIAQIPTCAEAGEQEGRLQRKQKNATGGRRHICHECGKSFAQSSGLSKHRRIHTGEKPYECEECGKAFIGSSALVIHQRVHTGEKPYECEECGKAFSHSSDLIKHQRTHTGEKPYECDDCGKTFSQSCSLLEHHRIHTGEKPYQCSMCGKAFRRSSHLLRHQRIHTGDKNVQEPEQGEAWKSRMESQLENVETPMSYKCNECERSFTQNTGLIEHQKIHTGEKPYQCNACGKGFTRISYLVQHQRSHVGKNILSQ

SEQ ID NO: 101698 - protein, 390 aa, Homo sapiens
  Payload ID: 20265
  Gene Name: zinc finger with KRAB and SCAN domains 3
  Uniprot ID: Q9BRR0
  ENSP ID: ENSP00000341883
MALLTPAPGSQSSQFQLMKALLKHESVGSQPLQDRVLQVPVLAHGGCCREDKVVASRLTPESQGLLKVEDVALTLTPEWTQQDSSQGNLCRDEKQENHGSLVSLGDEKQTKSRDLPPAEELPEKEHGKISCHLREDIAQIPTCAEAGEQEGRLQRKQKNATGGRRHICHECGKSFAQSSGLSKHRRIHTGEKPYECEECGKAFIGSSALVIHQRVHTGEKPYECEECGKAFSHSSDLIKHQRTHTGEKPYECDDCGKTFSQSCSLLEHHRIHTGEKPYQCSMCGKAFRRSSHLLRHQRIHTGDKNVQEPEQGEAWKSRMESQLENVETPMSYKCNECERSFTQNTGLIEHQKIHTGEKPYQCNACGKGFTRISYLVQHQRSHVGKNILSQ

SEQ ID NO: 101699 - protein, 538 aa, Homo sapiens; identical to SEQ ID NO: 101697
  Payload ID: 20265
  Gene Name: zinc finger with KRAB and SCAN domains 3
  Uniprot ID: Q9BRR0
  ENSP ID: ENSP00000366465

SEQ ID NO: 101700 - protein, 545 aa, Homo sapiens
  Payload ID: 20266
  Gene Name: zinc finger with KRAB and SCAN domains 4
  Uniprot ID: Q969J2
  ENSP ID: ENSP00000366509
MAREPRKNAALDAQSAEDQTGLLTVKVEKEEASALTAEVRAPCSPARGPERSRQRFRGFRYPEAAGPREALSRLRELCGQWLQPEMHSKEQILELLVLEQFLTILPGNLQSWVREQHPESGEEVVVLLEYLERQLDEPAPQVPVGDQGQELLCCKMALLTQTQGSQSSQCQPMKALFKHESLGSQPLHDRVLQVPGLAQGGCCREDAMVASRLTPGSQGLLKMEDVALTLTPGWTQLDSSQVNLYRDEKQENHSSLVSLGGEIQTKSRDLPPVKKLPEKEHGKICHLREDIAQIPTHAEAGEQEGRLQRKQKNAIGSRRHYCHECGKSFAQSSGLTKHRRIHTGEKPYECEDCGKTFIGSSALVIHQRVHTGEKPYECEECGKVFSHSSNLIKHQRTHTGEKPYECDDCGKTFSQSCSLLEHHKIHTGEKPYQCNMCGKAFRRNSHLLRHQRIHGDKNVQNPEHGESWESQGRTESQWENTEAPVSYKCNECERSFTRNRSLIEHQKIHTGEKPYQCDTCGKGFTRTSYLVQHQRSHVGKKTLSQ

SEQ ID NO: 101701 - protein, 839 aa, Homo sapiens
  Payload ID: 20267
  Gene Name: zinc finger with KRAB and SCAN domains 5
  Uniprot ID: Q9Y2L8
  ENSP ID: ENSP00000322872
MIMTESREVIDLDPPAETSQEQEDLFIVKVEEEDCTWMQEYNPPTFETFYQRFRHFQYHEASGPREALSQLRVLCCEWLRPELHTKEQILELLVLEQFLTILPEEFQPWVREHHPESGEEAVAVIENIQRELEERRQQIVACPDVLPRKMATPGAVQESCSPHPLTVDTQPEQAPQKPRLLEENALPVLQVPSLPLKDSQELTASLLSTGSQKLVKIEEVADVAVSFILEEWGHLDQSQKSLYRDDRKENYGSITSMGYESRDNMELIVKQISDDSESHWVAPEHTERSVPQDPDFAEVSDLKGMVQRWQVNPTVGKSRQNPSQKRDLDAITDISPKQSTHGERGHRCSDCGKFFLQASNFIQHRRIHTGEKPFKCGECGKSYNQRVHLTQHQRVHTGEKPYKCQVCGKAFRVSSHLVQHHSVHSGERPYGCNECGKNFGRHSHLIEHLKRHFREKSQRCSDKRSKNTKLSVKKKISEYSEADMELSGKTQRNVSQVQDFGEGCEFQGKLDRKQGIPMKEILGQPSSKRMNYSEVPYVHKKSSTGERPHKCNECGKSFIQSAHLIQHQRIHTGEKPFRCEECGKSYNQRVHLTQHQRVHTGEKPYTCPLCGKAFRVRSHLVQHQSVHSGERPFKCNECGKGFGRRSHLAGHLRLHSREKSHQCRECGEIFFQYVSLIEHQVLHMGQKNEKNGICEEAYSWNLTVIEDKKIELQEQPYQCDICGKAFGYSSDLIQHYRTHTAEKPYQCDICRENVGQCSHTKQHQKIYSSTKSHQCHECGRGFTLKSHLNQHQRIHTGEKPFQCKECGMNFSWSCSLFKHLRSHERTDPINTLSVEGSLL

SEQ ID NO: 101702 - protein, 839 aa, Homo sapiens; identical to SEQ ID NO: 101701
  Payload ID: 20267
  Gene Name: zinc finger with KRAB and SCAN domains 5
  Uniprot ID: Q9Y2L8
  ENSP ID: ENSP00000377725

SEQ ID NO: 101703 - protein, 839 aa, Homo sapiens; identical to SEQ ID NO: 101701
  Payload ID: 20267
  Gene Name: zinc finger with KRAB and SCAN domains 5
  Uniprot ID: Q9Y2L8
  ENSP ID: ENSP00000392104

SEQ ID NO: 101704 - protein, 222 aa, Homo sapiens
  Payload ID: 20267
  Gene Name: zinc finger with KRAB and SCAN domains 5
  ENSP ID: ENSP00000405716
MIMTESREVIDLDPPAETSQEQEDLFIVKVEEEDCTWMQEYNPPTFETFYQRFRHFQYHEASGPREALSQLRVLCCEWLRPELHTKEQILELLVLEQFLTILPEEFQPWVREHHPESGEEAVAVIENIQRELEERRQQIVACPDVLPRKMATPGAVQESCSPHPLTVDTQPEQAPQKPRLLEENALPVLQVPSLPLKDSQELTASLLSTGSQVMSPGTIWSS

SEQ ID NO: 101705 - protein, 754 aa, Homo sapiens
  Payload ID: 20268
  Gene Name: zinc finger with KRAB and SCAN domains 7
  Uniprot ID: Q9P0L1
  ENSP ID: ENSP00000273320
MTTAGRGNLGLIPRSTAFQKQEGRLTVKQEPANQTWGQGSSLQKNYPPVCEIFRLHFRQLCYHEMSGPQEALSRLRELCRWWLMPEVHTKEQILELLVLEQFLSILPGELRTWVQLHHPESGEEAVAVVEDFQRHLSGSEEVSAPAQKQEMHFEETTALGTTKESPPTSPLSGGSAPGAHLEPPYDPGTHHLPSGDFAQCTSPVPTLPQVGNSGDQAGATVLRMVRPQDTVAYEDLSVDYTQKKWKSLTLSQRALQWNMMPENHHSMASLAGENMMKGSELTPKQEFFKGSESSNRTSGGLFGVVPGAAETGDVCEDTFKELEGQTSDEEGSRLENDFLEITDEDKKKSTKDRYDKYKEVGEHPPLSSSPVEHEGVLKGQKSYRCDECGKAFNRSSHLIGHQRIHTGEKPYECNECGKTFRQTSQLIVHLRTHTGEKPYECSECGKAYRHSSHLIQHQRLHNGEKPYKCNECAKAFTQSSRLTDHQRTHTGEKPYECNECGEAFIRSKSLARHQVLHTGKKPYKCNECGRAFCSNRNLIDHQRIHTGEKPYECSECGKAFSRSKCLIRHQSLHTGEKPYKCSECGKAFNQNSQLIEHERIHTGEKPFECSECGKAFGLSKCLIRHQRLHTGEKPYKCNECGKSFNQNSHLIIHQRIHTGEKPYECNECGKVFSYSSSLMVHQRTHTGEKPYKCNDCGKAFSDSSQLIVHQRVHTGEKPYECSECGKAFSQRSTFNHHQRTHTGEKSSGLAWSVS

SEQ ID NO: 101706 - protein, 276 aa, Homo sapiens
  Payload ID: 20268
  Gene Name: zinc finger with KRAB and SCAN domains 7
  Uniprot ID: Q9P0L1
  ENSP ID: ENSP00000345404
MTTAGRGNLGLIPRSTAFQKQEGRLTVKQEPANQTWGQGSSLQKNYPPVCEIFRLHFRQLCYHEMSGPQEALSRLRELCRWWLMPEVHTKEQILELLVLEQFLSILPGELRTWVQLHHPESGEEAVAVVEDFQRHLSGSEEVSAPAQKQEMHFEETTALGTTKESPPTSPLSGGSAPGAHLEPPYDPGTHHLPSGDFAQCTSPVPTLPQVGNSGDQAGATVLRMVRPQDTVAYEDLSVDYTQKKWKSLTLSQRALQWNMMPENHHSMASLGWSTMA

SEQ ID NO: 101707 - protein, 121 aa, Homo sapiens
  Payload ID: 20268
  Gene Name: zinc finger with KRAB and SCAN domains 7
  ENSP ID: ENSP00000389243
PPTSPLSGGSAPGAHLEPPYDPGTHHLPSGDFAQCTSPVPTLPQVGNSGDQAGATVLRMVRPQDTVAYEDLSVDYTQKKWKSLTLSQRALQWNMMPENHHSMASLDGETGTEEELIPKHHS

SEQ ID NO: 101708 - protein, 754 aa, Homo sapiens; identical to SEQ ID NO: 101705
  Payload ID: 20268
  Gene Name: zinc finger with KRAB and SCAN domains 7
  Uniprot ID: Q9P0L1
  ENSP ID: ENSP00000395524

SEQ ID NO: 101709 - protein, 373 aa, Homo sapiens
  Payload ID: 20268
  Gene Name: zinc finger with KRAB and SCAN domains 7
  ENSP ID: ENSP00000405034
MHFEETTALGTTKESPPTSPLSGGSAPGAHLEPPYDPGTHHLPSGDFAQCTSPVPTLPQVGNSGDQAGATVLRMVRPQDTVAYEDLSVDYTQKKWKSLTLSQRALQWNMMPENHHSMASLGENMMKGSELTPKQEFFKGSESSNRTSGGLFGVVPGAAETGDVCEDTFKELEGQTSDEEGSRLENDFLEITDEDKKKSTKDRYDKYKEVGEHPPLSSSPVEHEGVLKGQKSYRCDECGKAFNRSSHLIGHQRIHTGEKPYECNECGKTFRQTSQLIVHLRTHTGEKPYECSECGKAYRHSSHLIQHQRLHNGEKPYKCNECAKAFTQSSRLTDHQRTHTGEKPYECNECGEAFIRSKSLARHQVLHTGWSTMA

SEQ ID NO: 101710 - protein, 202 aa, Homo sapiens
  Payload ID: 20268
  Gene Name: zinc finger with KRAB and SCAN domains 7
  ENSP ID: ENSP00000415710
MTTAGRGNLGLIPRSTAFQKQEGRLTVKQEPANQTWGQGSSLQKNYPPVCEIFRLHFRQLCYHEMSGPQEALSRLRELCRWWLMPEVHTKEQILELLVLEQFLSILPGELRTWVQLHHPESGEEAVAVVEDFQRHLSGSEEVSAPAQKQEMHFEETTALGTTKESPPTSPLSGGSAPGAHLEPPYDPGTHHLPSGDFGYCGI

SEQ ID NO: 101711 - protein, 276 aa, Homo sapiens; identical to SEQ ID NO: 101706
  Payload ID: 20268
  Gene Name: zinc finger with KRAB and SCAN domains 7
  Uniprot ID: Q9P0L1
  ENSP ID: ENSP00000416681

SEQ ID NO: 101712 - protein, 373 aa, Homo sapiens; identical to SEQ ID NO: 101709
  Payload ID: 20268
  Gene Name: zinc finger with KRAB and SCAN domains 7
  ENSP ID: ENSP00000485833

SEQ ID NO: 101713 - protein, 754 aa, Homo sapiens; identical to SEQ ID NO: 101705
  Payload ID: 20268
  Gene Name: zinc finger with KRAB and SCAN domains 7
  Uniprot ID: Q9P0L1
  ENSP ID: ENSP00000485942

SEQ ID NO: 101714 - protein, 754 aa, Homo sapiens; identical to SEQ ID NO: 101705
  Payload ID: 20268
  Gene Name: zinc finger with KRAB and SCAN domains 7
  Uniprot ID: Q9P0L1
  ENSP ID: ENSP00000485948

SEQ ID NO: 101715 - protein, 276 aa, Homo sapiens; identical to SEQ ID NO: 101706
  Payload ID: 20268
  Gene Name: zinc finger with KRAB and SCAN domains 7
  Uniprot ID: Q9P0L1
  ENSP ID: ENSP00000486331

SEQ ID NO: 101716 - protein, 276 aa, Homo sapiens; identical to SEQ ID NO: 101706
  Payload ID: 20268
  Gene Name: zinc finger with KRAB and SCAN domains 7
  Uniprot ID: Q9P0L1
  ENSP ID: ENSP00000486642

SEQ ID NO: 101717 - protein, 121 aa, Homo sapiens; identical to SEQ ID NO: 101707
  Payload ID: 20268
  Gene Name: zinc finger with KRAB and SCAN domains 7
  ENSP ID: ENSP00000486803

SEQ ID NO: 101718 - protein, 202 aa, Homo sapiens; identical to SEQ ID NO: 101710
  Payload ID: 20268
  Gene Name: zinc finger with KRAB and SCAN domains 7
  ENSP ID: ENSP00000487540

SEQ ID NO: 101719 - protein, 578 aa, Homo sapiens
  Payload ID: 20269
  Gene Name: zinc finger with KRAB and SCAN domains 8
  Uniprot ID: Q15776
  ENSP ID: ENSP00000332750
MAEESRKPSAPSPPDQTPEEDLVIVKVEEDHGWDQESSLHESNPLGQEVFRLRFRQLRYQETLGPREALIQLRALCHQWLRPDLNTKEQILELLVLEQFLTILPEELQTLVKEHQLENGEEVVTLLEDLERQIDILGRPVSARVHGHRVLWEEVVHSASAPEPPNTQLQSEATQHKSPVPQESQERAMSTSQSPTRSQKGSSGDQEMTATLLTAGFQTLEKIEDMAVSLIREEWLLDPSQKDLCRDNRPENFRNMFSLGGETRSENRELASKQVISTGIQPHGETAAKCNGDVIRGLEHEEARDLLGRLERQRGNPTQERRHKCDECGKSFAQSSGLVRHWRIHTGEKPYQCNVCGKAFSYRSALLSHQDIHNKVKRYHCKECGKAFSQNTGLILHQRIHTGEKPYQCNQCGKAFSQSAGLILHQRIHSGERPYECNECGKAFSHSSHLIGHQRIHTGEKPYECDECGKTFRRSSHLIGHQRSHTGEKPYKCNECGRAFSQKSGLIEHQRIHTGERPYKCKECGKAFNGNTGLIQHLRIHTGEKPYQCNECGKAFIQRSSLIRHQRIHSGEKSESISV

SEQ ID NO: 101720 - protein, 578 aa, Homo sapiens; identical to SEQ ID NO: 101719
  Payload ID: 20269
  Gene Name: zinc finger with KRAB and SCAN domains 8
  Uniprot ID: Q15776
  ENSP ID: ENSP00000402948

SEQ ID NO: 101721 - protein, 158 aa, Homo sapiens
  Payload ID: 20269
  Gene Name: zinc finger with KRAB and SCAN domains 8
  Uniprot ID: Q15776
  ENSP ID: ENSP00000439117
MAEESRKPSAPSPPDQTPEEDLVIVKVEEDHGWDQESSLHESNPLGQEVFRLRFRQLRYQETLGPREALIQLRALCHQWLRPDLNTKEQILELLVLEQFLTILPEELQTLVKEHQLENGEEVVTLLEDLERQIDILGRPVSRRRSQLAYMDIGYSGRR

SEQ ID NO: 101722 - protein, 158 aa, Homo sapiens; identical to SEQ ID NO: 101721
  Payload ID: 20269
  Gene Name: zinc finger with KRAB and SCAN domains 8
  Uniprot ID: Q15776
  ENSP ID: ENSP00000475589

SEQ ID NO: 101723 - protein, 280 aa, Homo sapiens
  Payload ID: 20270
  Gene Name: zinc finger with UFM1-specific peptidase domain
  ENSP ID: ENSP00000357562
MLSCNICGETVTSEPDMKAHLIVHMESEIICPFCKLSGVNYDEMCFHIETAHFEQNTLERNFERINTVQYGTSDNKKDNTLQCGMEVNSSILSGCASNHPKNSAQNLTKDSTLKHEGFYSENLTESRKFLKSREKQSSLTEIKGSVYETTYSPPECPFCGKIEEHSEDMETHVKTKHANLLDIPLEDCDQPLYDCPMCGLICTNYHILQEHVDLHLEENSFQQGMDRVQCSGDLQLAHQLQQEEDRKRRSEESRQEIEEFQKLQELLKHFIGIIRMLPQM

SEQ ID NO: 101724 - protein, 578 aa, Homo sapiens
  Payload ID: 20270
  Gene Name: zinc finger with UFM1-specific peptidase domain
  Uniprot ID: Q96AP4
  ENSP ID: ENSP00000357565
MLSCNICGETVTSEPDMKAHLIVHMESEIICPFCKLSGVNYDEMCFHIETAHFEQNTLERNFERINTVQYGTSDNKKDNTLQCGMEVNSSILSGCASNHPKNSAQNLTKDSTLKHEGFYSENLTESRKFLKSREKQSSLTEIKGSVYETTYSPPECPFCGKIEEHSEDMETHVKTKHANLLDIPLEDCDQPLYDCPMCGLICTNYHILQEHVDLHLEENSFQQGMDRVQCSGDLQLAHQLQQEEDRKRRSEESRQEIEEFQKLQRQYGLDNSGGYKQQQLRNMEIEVNRGRMPPSEFHRRKADMMESLALGFDDGKTKTSGIIEALHRYYQNAATDVRRVWLSSVVDHFHSSLGDKGWGCGYRNFQMLLSSLLQNDAYNDCLKGMLIPCIPKIQSMIEDAWKEGFDPQGASQLNNRLQGTKAWIGACEVYILLTSLRVKCHIVDFHKSTGPLGTHPRLFEWILNYYSSEGEGSPKVVCTSKPPIYLQHQGHSRTVIGIEEKKNRTLCLLILDPGCPSREMQKLLKQDIEASSLKQLRKSMGNLKHKQYQILAVEGALSLEEKLARRQASQVFTAEKIP

SEQ ID NO: 101725 - protein, 268 aa, Homo sapiens
  Payload ID: 20271
  Gene Name: zinc finger, AN1-type domain 1
  Uniprot ID: Q8TCF1
  ENSP ID: ENSP00000220669
MAELDIGQHCQVEHCRQRDFLPFVCDDCSGIFCLEHRSRESHGCPEVTVINERLKTDQHTSYPCSFKDCAERELVAVICPYCEKNFCLRHRHQSDHECEKLEIPKPRMAATQKLVKDIIDSKTGETASKRWKGAKNSETAAKVALMKLKMHADGDKSLPQTERIYFQVFLPKGSKEKSKPMFFCHRWSIGKAIDFAASLARLKNDNNKFTAKKLRLCHITSGEALPLDHTLETWIAKEDCPLYNGGNIILEYLNDEEQFCKNVESYLE

SEQ ID NO: 101726 - protein, 53 aa, Homo sapiens
  Payload ID: 20271
  Gene Name: zinc finger, AN1-type domain 1
  ENSP ID: ENSP00000427811
MAATQKLVKDIIDSKTGETASKRWKGAKNSETAAKVALMKLKMHADGDKSLPQ

SEQ ID NO: 101727 - protein, 61 aa, Homo sapiens
  Payload ID: 20271
  Gene Name: zinc finger, AN1-type domain 1
  ENSP ID: ENSP00000427957
MAATQKLVKDIIDSKTGETASKRWKGAKNSETAAKVALMKLKMHADGDKSLPQTERIYFQV

SEQ ID NO: 101728 - protein, 97 aa, Homo sapiens
  Payload ID: 20271
  Gene Name: zinc finger, AN1-type domain 1
  ENSP ID: ENSP00000428101
MAATQKLVKDIIDSKTGETASKRWKGAKNSETAAKVALMKLKMHADGDKSLPQTERIYFQVFLPKGSKEKSKPMFFCHRWSIGKAIDFAASLARLKN

SEQ ID NO: 101729 - protein, 161 aa, Homo sapiens
  Payload ID: 20271
  Gene Name: zinc finger, AN1-type domain 1
  Uniprot ID: Q8TCF1
  ENSP ID: ENSP00000428139
MAATQKLVKDIIDSKTGETASKRWKGAKNSETAAKVALMKLKMHADGDKSLPQTERIYFQVFLPKGSKEKSKPMFFCHRWSIGKAIDFAASLARLKNDNNKFTAKKLRLCHITSGEALPLDHTLETWIAKEDCPLYNGGNIILEYLNDEEQFCKNVESYLE

SEQ ID NO: 101730 - protein, 118 aa, Homo sapiens
  Payload ID: 20271
  Gene Name: zinc finger, AN1-type domain 1
  ENSP ID: ENSP00000428278
MAATQKLVKDIIDSKTGETASKRWKGAKNSETAAKVALMKLKMHADGDKSLPQTERIYFQVFLPKGSKEKSKPMFFCHRWSIGKAIDFAASLARLKNDNNKFTAKKLRLCHITSGEAL

SEQ ID NO: 101731 - protein, 165 aa, Homo sapiens
  Payload ID: 20271
  Gene Name: zinc finger, AN1-type domain 1
  ENSP ID: ENSP00000428375
MAELDIGQHCQVEHCRQRDFLPFVCDDCSGIFCLEHRSRESHGCPEVTVINERLKTDQHTSYPCSFKDCAERELVAVICPYCEKNFCLRHRHQSDHECEKLEIPKPRMAATQKLVKDIIDSKTGETASKRWKGAKNSETAAKVALMKLKMHADGDKSLPQMSNLE

SEQ ID NO: 101732 - protein, 43 aa, Homo sapiens
  Payload ID: 20271
  Gene Name: zinc finger, AN1-type domain 1
  ENSP ID: ENSP00000428527
MAATQKLVKDIIDSKTGETASKRWKGAKNSETAAKVALMKLKM

SEQ ID NO: 101733 - protein, 58 aa, Homo sapiens
  Payload ID: 20271
  Gene Name: zinc finger, AN1-type domain 1
  ENSP ID: ENSP00000428927
MAATQKLVKDIIDSKTGETASKRWKGAKNSETAAKVALMKLKMHADGDKSLPQMSNLE

SEQ ID NO: 101734 - protein, 227 aa, Homo sapiens
  Payload ID: 20271
  Gene Name: zinc finger, AN1-type domain 1
  Uniprot ID: Q8TCF1
  ENSP ID: ENSP00000429167
MAELDIGQHCQVEHCRQRDFLPFVCDDCSGIFCLEHRSRESHGCPEVTVINERLKTDQHTSYPCSFKDCAERELVAVICPYCEKNFCLRHRHQSDHECEKLEIPKPRMAATQKLVKDIIDSKTGETASKRWKGAKNSETAAKVALMKLKMHADGDKSLPQTERIYFQVFLPKGSKEKSKPMFFCHRWSIGKAIDFAASLARLKNDNNKFTAKVTSHYNNISILIKVL

SEQ ID NO: 101735 - protein, 126 aa, Homo sapiens
  Payload ID: 20271
  Gene Name: zinc finger, AN1-type domain 1
  ENSP ID: ENSP00000429527
MAATQKLVKDIIDSKTGETASKRWKGAKNSETAAKVALMKLKMHADGDKSLPQTERIYFQVFLPKGSKEKSKPMFFCHRWSIGKAIDFAASLARLKNDNNKFTAKAVSHYFRRSLTLGSYFGNLDC

SEQ ID NO: 101736 - protein, 161 aa, Homo sapiens; identical to SEQ ID NO: 101729
  Payload ID: 20271
  Gene Name: zinc finger, AN1-type domain 1
  Uniprot ID: Q8TCF1
  ENSP ID: ENSP00000429999

SEQ ID NO: 101737 - protein, 120 aa, Homo sapiens
  Payload ID: 20271
  Gene Name: zinc finger, AN1-type domain 1
  ENSP ID: ENSP00000430214
MAATQKLVKDIIDSKTGETASKRWKGAKNSETAAKVALMKLKMHADGDKSLPQTERIYFQVFLPKGSKEKSKPMFFCHRWSIGKAIDFAASLARLKNDNNKFTAKVTSHYNNISILIKVL

SEQ ID NO: 101738 - protein, 53 aa, Homo sapiens; identical to SEQ ID NO: 101726
  Payload ID: 20271
  Gene Name: zinc finger, AN1-type domain 1
  ENSP ID: ENSP00000430405

SEQ ID NO: 101739 - protein, 61 aa, Homo sapiens
  Payload ID: 20271
  Gene Name: zinc finger, AN1-type domain 1
  ENSP ID: ENSP00000430499
DSKTGETASKRWKGAKNSETAAKVALMKLKMHADGDKSLPQGAKRRANQCSFATDGALERP

SEQ ID NO: 101740 - protein, 42 aa, Homo sapiens
  Payload ID: 20271
  Gene Name: zinc finger, AN1-type domain 1
  ENSP ID: ENSP00000430719
MAATQKLVKDIIDSKTGETASKRWKGAKNSETAAKVALMKLK

SEQ ID NO: 101741 - protein, 261 aa, Homo sapiens
  Payload ID: 20271
  Gene Name: zinc finger, AN1-type domain 1
  Uniprot ID: Q8TCF1
  ENSP ID: ENSP00000430736
MAELDIGQHCQVEHCRQRDFLPFVCDDCSGIFCLEHRSRESHGCPEVTVINERLKTDQHTSYPCSFKDCAERELVAVICPYCEKNFCLRHRHQSDHECEKLEIPKPRMAATQKLVKDIIDSKTGETASKRWKGAKNSETAAKVALMKLKMHADGDKSLPQVFLPKGSKEKSKPMFFCHRWSIGKAIDFAASLARLKNDNNKFTAKKLRLCHITSGEALPLDHTLETWIAKEDCPLYNGGNIILEYLNDEEQFCKNVESYLE

SEQ ID NO: 101742 - protein, 145 aa, Homo sapiens
  Payload ID: 20272
  Gene Name: zinc finger, AN1-type domain 2A
  Uniprot ID: Q8N6M9
  ENSP ID: ENSP00000314619
MEFPDLGKHCSEKTCKQLDFLPVKCDACKQDFCKDHFPYAAHKCPFAFQKDVHVPVCPLCNTPIPVKKGQIPDVVVGDHIDRDCDSHPGKKKEKIFTYRCSKEGCKKKEMLQMVCAQCHGNFCIQHRHPLDHSCRHGSRPTIKAG

SEQ ID NO: 101743 - protein, 205 aa, Homo sapiens
  Payload ID: 20272
  Gene Name: zinc finger, AN1-type domain 2A
  ENSP ID: ENSP00000380273
MEFPDLGKHCSEKTCKQLDFLPVKCDACKQDFCKDHFPYAAHKCPFAFQKDVHVPVCPLCNTPIPVKKGQIPDVVVGDHIDRDCDSHPGKKKEKSLCSLRFLHTVAQKRAARRKRCCRWYVPNVTATSVSSTDTLWTTAADTGVAPPSKLGEKRLRCDGSEHAVACVEAAYTLVGSGAPLSTIPHWLLILFVEGDGTIIKLNAEV

SEQ ID NO: 101744 - protein, 180 aa, Homo sapiens
  Payload ID: 20272
  Gene Name: zinc finger, AN1-type domain 2A
  ENSP ID: ENSP00000386031
MEFPDLGKHCSEKTCKQLDFLPVKCDACKQDFCKDHFPYAAHKCPFAFQKDVHVPVCPLCNTPIPVKKGQIPDVVVGDHIDRDCDSHPGKKKEKIFTYRCSKEGCKKKEMLQMVCAQCHGNFCIQHRHPLDHSCRHGSRPTIKAGCSPMTVSESRPLGDFLTLAPGGLAQRLGYWFTRLM

SEQ ID NO: 101745 - protein, 90 aa, Homo sapiens
  Payload ID: 20272
  Gene Name: zinc finger, AN1-type domain 2A
  ENSP ID: ENSP00000459173
  MOD_RES (1)..(1): Any amino acid
XDACKQDFCKDHFPYAAHKCPFAFQKDVHVPVCPLCNTPIPVKKGQIPDVVVGDHIDRDCDSHPGKKKEKHRHPLDHSCRHGSRPTIKAG

SEQ ID NO: 101746 - protein, 257 aa, Homo sapiens
  Payload ID: 20273
  Gene Name: zinc finger, AN1-type domain 2B
  Uniprot ID: Q8WV99
  ENSP ID: ENSP00000289528
MEFPDLGAHCSEPSCQRLDFLPLKCDACSGIFCADHVAYAQHHCGSAYQKDIQVPVCPLCNVPVPVARGEPPDRAVGEHIDRDCRSDPAQQKRKIFTNKCERAGCRQREMMKLTCERCSRNFCIKHRHPLDHDCSGEGHPTSRAGLAAISRAQAVASTSTVPSPSQTMPSCTSPSRATTRSPSWTAPPVIALQNGLSEDEALQRALEMSLAETKPQVPSCQEEEDLALAQALSASEAEYQRQQAQSRSSKPSNCSLC

SEQ ID NO: 101747 - protein, 224 aa, Homo sapiens
  Payload ID: 20273
  Gene Name: zinc finger, AN1-type domain 2B
  ENSP ID: ENSP00000386370
MEFPDLGAHCSEPSCQRLDFLPLKCDACSGIFCADHVAYAQHHCGSAYQKDIQVPVCPLCNVPVPVARGEPPDRAVGEHIDRDCRSDPAQQKRKIFTNKCERAGCRQREMMKLTCERCSRNFCIKHRHPLDHDCSGEGHPTSRAGLAAISRAQAVASTSTVPSPSQTMPSCTSPSRATTRSPSWTAPPVIALQNGLSEDEALQRALEMSLAETKPQVPRYLTLL

SEQ ID NO: 101748 - protein, 176 aa, Homo sapiens
  Payload ID: 20273
  Gene Name: zinc finger, AN1-type domain 2B
  Uniprot ID: Q8WV99
  ENSP ID: ENSP00000386399
MEFPDLGAHCSEPSCQRLDFLPLKCDACSGIFCADHVAYAQHHCGSAYQKDIQVPVCPLCNVPVPVARGEPPDRAVGEHIDRDCRSDPAQQKRKIFTNKCERAGCRQREMMKLTCERCSRNFCIKHRHPLDHDCSGEGHPTSRAGLAAISRAQAVASTSTVPSPSQTMPSCTSPSR

SEQ ID NO: 101749 - protein, 176 aa, Homo sapiens; identical to SEQ ID NO: 101748
  Payload ID: 20273
  Gene Name: zinc finger, AN1-type domain 2B
  Uniprot ID: Q8WV99
  ENSP ID: ENSP00000386824

SEQ ID NO: 101750 - protein, 145 aa, Homo sapiens
  Payload ID: 20273
  Gene Name: zinc finger, AN1-type domain 2B
  ENSP ID: ENSP00000386847
MEFPDLGAHCSEPSCQRLDFLPLKCDACSGIFCADHVAYAQHHCGSAYQKDIQVPVCPLCNVPVPVARGEPPDRAVGEHIDRDCRSDPAQQKRKIFTNKCERAGCRQREMMKLTCERCSRNFCIKHRHPLDHDCSGEGHPTSRAG

SEQ ID NO: 101751 - protein, 257 aa, Homo sapiens; identical to SEQ ID NO: 101746
  Payload ID: 20273
  Gene Name: zinc finger, AN1-type domain 2B
  Uniprot ID: Q8WV99
  ENSP ID: ENSP00000386898

SEQ ID NO: 101752 - protein, 225 aa, Homo sapiens
  Payload ID: 20273
  Gene Name: zinc finger, AN1-type domain 2B
  ENSP ID: ENSP00000387179
MEFPDLGAHCSEPSCQRLDFLPLKCDACSGIFCADHVAYAQHHCGSAYQKDIQVPVCPLCNVPVPVARGEPPDRAVGEHIDRDCRSDPAQQKRKIFTNKCERAGCRQREMMKLTCERCSRNFCIKHRHPLDHDCSGEGHPTSRAGLAAISRAQAVASTSTVPSPSQTMPSCTSPSRATTRSPSWTAPPVIALQNGLVSWAEVGWTETNTQRVKSKDAGLLSPFVE

SEQ ID NO: 101753 - protein, 145 aa, Homo sapiens; identical to SEQ ID NO: 101750
  Payload ID: 20273
  Gene Name: zinc finger, AN1-type domain 2B
  ENSP ID: ENSP00000387312

SEQ ID NO: 101754 - protein, 96 aa, Homo sapiens
  Payload ID: 20273
  Gene Name: zinc finger, AN1-type domain 2B
  ENSP ID: ENSP00000388773
MEFPDLGAHCSEPSCQRLDFLPLKCDACSGIFCADHVAYAQHHCGSAYQKDIQVPVCPLCNVPVPVARGEPPDRAVGEHIDRDCRSDPAQQKHLHQ

SEQ ID NO: 101755 - protein, 50 aa, Homo sapiens
  Payload ID: 20273
  Gene Name: zinc finger, AN1-type domain 2B
  ENSP ID: ENSP00000400760
MEFPDLGAHCSEPSCQRLDFLPLKCDACSGIFCADHVAYAQHHCGSAYQK

SEQ ID NO: 101756 - protein, 214 aa, Homo sapiens
  Payload ID: 20273
  Gene Name: zinc finger, AN1-type domain 2B
  ENSP ID: ENSP00000409931
MEFPDLGAHCSEPSCQRLDFLPLKCDACSGIFCADHVAYAQHHCGSAYQKDIQVPVCPLCNVPVPVARGEPPDRAVGEHIDRDCRSDPAQQKRKIFTNKCERAGCRQREMMKLTCERCSRNFCIKHRHPLDHDCSGEGHPTSRAGLAAISRAQAVASTSTVPSPSQTMPSCTSPSRATTRSPSWTAPPVIALQNGLVSWAEVGWTETNTQRVKS

SEQ ID NO: 101757 - protein, 257 aa, Homo sapiens; identical to SEQ ID NO: 101746
  Payload ID: 20273
  Gene Name: zinc finger, AN1-type domain 2B
  Uniprot ID: Q8WV99
  ENSP ID: ENSP00000411334

SEQ ID NO: 101758 - protein, 152 aa, Homo sapiens
  Payload ID: 20273
  Gene Name: zinc finger, AN1-type domain 2B
  ENSP ID: ENSP00000416138
  MOD_RES (1)..(1): Any amino acid
XPVIALQNGLSEDEALQRALEMSLAETKPQVPRPRAAARSRPTAACARALGLGREVHLRRTVALTPLGYTGRGGPEHPGGQRQAGVMWRSPWEPLEGLASAPAAWKRAASNCSLVGPSVDAGQALLLAPSSCHLPYAGAAPMWSGQEGAWKK

SEQ ID NO: 101759 - protein, 213 aa, Homo sapiens
  Payload ID: 20273
  Gene Name: zinc finger, AN1-type domain 2B
  ENSP ID: ENSP00000483320
MEFPDLGAHCSEPSCQRLDFLPLKCDACSGIFCADHVAYAQHHCGSAYQKIFTNKCERAGCRQREMMKLTCERCSRNFCIKHRHPLDHDCSGEGHPTSRAGLAAISRAQAVASTSTVPSPSQTMPSCTSPSRATTRSPSWTAPPVIALQNGLSEDEALQRALEMSLAETKPQVPSCQEEEDLALAQALSASEAEYQRQQAQSRSSKPSNCSLC

SEQ ID NO: 101760 - protein, 227 aa, Homo sapiens
  Payload ID: 20274
  Gene Name: zinc finger, AN1-type domain 3
  Uniprot ID: Q9H8U3
  ENSP ID: ENSP00000287218
MGDAGSERSKAPSLPPRCPCGFWGSSKTMNLCSKCFADFQKKQPDDDSAPSTSNSQSDLFSEETTSDNNNTSITTPTLSPSQQPLPTELNVTSPSKEECGPCTDTAHVSLITPTKRSCGTDSQSENEASPVKRPRLLENTERSEETSRSKQKSRRRCFQCQTKLELVQQELGSCRCGYVFCMLHRLPEQHDCTFDHMGRGREEAIMKMVKLDRKVGRSCQRIGEGCS

SEQ ID NO: 101761 - protein, 164 aa, Homo sapiens
  Payload ID: 20274
  Gene Name: zinc finger, AN1-type domain 3
  ENSP ID: ENSP00000362487
  MOD_RES (1)..(1): Any amino acid
XSSKTMNLCSKCFADFQKKQPDDDSAPSTSNSQSDLFSEETTSDNNNTSITTPTLSPSQQPLPTELNVTSPSKEECGPCTDTAHVSLITPTKRSCGTDSQSENEASPVKRPRLLENTERSEETSRSKQKSRRRCFQCQTKLELVQQELGSCRCGVSLERDVWHL

SEQ ID NO: 101762 - protein, 205 aa, Homo sapiens
  Payload ID: 20274
  Gene Name: zinc finger, AN1-type domain 3
  ENSP ID: ENSP00000362489
MGDAGSERSKAPSLPPRCPCGFWGSSKTMNLCSKCFADFQKKQPDDDSAPSTSNSQSDLFSEETTSDNNNTSITTPTLSPSQQPLPTELNVTSPSKEEYSQSENEASPVKRPRLLENTERSEETSRSKQKSRRRCFQCQTKLELVQQELGSCRCGYVFCMLHRLPEQHDCTFDHMGRGREEAIMKMVKLDRKVGRSCQRIGEGCS

SEQ ID NO: 101763 - protein, 186 aa, Homo sapiens
  Payload ID: 20274
  Gene Name: zinc finger, AN1-type domain 3
  ENSP ID: ENSP00000420240
MGDAGSERSKAPSLPPRCPCGFWGSSKTMNLCSKCFAETGFCHVDQAGLELLSSSDPPASASQSAGITDFQKKQPDDDSAPSTSNSQSDLFSEETTSDNNNTSITTPTLSPSQQPLPTELNVTSPSKEECGPCTDTAHVSLITPTKRSCGTDSQSENEASPVKRPRLLENTERSEETSRSKQKSRR

SEQ ID NO: 101764 - protein, 727 aa, Homo sapiens
  Payload ID: 20275
  Gene Name: zinc finger, AN1-type domain 4
  Uniprot ID: Q86XD8
  ENSP ID: ENSP00000339484
MDNRKEPPFFNDDNMGPFYYRLHFCDTMELFIETLTGTCFELRVSPFETVISVKAKIRRLEGIPICRQHLIWNNMELENDYCLNDYNISEGCTLKLVLAMRGGPINTRRVPTDDPLRKMAEYLDSSRVEVWEKTSCSKQVTFLVYQEGDQLNFFPAVDRGDGTLTPLSDSSKKIDFHLHVLRRKGEHRMSGGSMYNSDTDEDEETEPSSSGQQIIENSITMNKMKLLKAKMKNMNLSKKPKKAVKIKPHPPVAPRPSSGSTAPSRHRLLRVLPNIGQSCSPAFGNAYPPEISRNGISSLATQLSAERYISSITGEFLKEDNSWENNTLSHFSSNVKLPPQIPHLELGNDQELADSVLHLGSSLPRQTKHFLGNLPSSNGNIVLPSEECVTEQSLLPKVGSLASFAEGNADEQSSGLEGACKVNLELLLTNADKGLKAPEQHLKHVAGVLNGESVETSVLNYRELSPHKNRLLSPLRCSAPMSLHNSLVKPERQSKCFEFGKLQPSSSQSLDVQNITDSSFSRTTCFQGVKVDSLGKRSDVISKVEARDITEMTNKASKEPVGCVNNISFLASLAGSTSRNRLQSTRGAGRLQNSGTGLSTNLQHFQEENFRKSSPQLEHTGVFLSTHGVGMNGNNAAAGKSVGECTTHHLPPVKAPLQTKKKTTNHCFLCGKKTGLASSYECRCGNNFCASHRYAETHGCTYDYKSAGRRYLHEANPVVNAPKLPKI

SEQ ID NO: 101765 - protein, 653 aa, Homo sapiens
  Payload ID: 20275
  Gene Name: zinc finger, AN1-type domain 4
  ENSP ID: ENSP00000363486
MELENDYCLNDYNISEGCTLKLVLAMRGGPINTRRVPTDDPLRKMAEYLDSSRVEVWEKTSCSKQVTFLVYQEGDQLNFFPAVDRGDGTLTPLSDSSKKIDFHLHVLRRKGEHRMSGGSMYNSDTDEDEETEPSSSGQQIIENSITMNKMKLLKAKMKNMNLSKKPKKAVKIKPHPPVAPRPSSGSTAPSRHRLLRVLPNIGQSCSPAFGNAYPPEISRNGISSLATQLSAERYISSITGEFLKEDNSWENNTLSHFSSNVKLPPQIPHLELGNDQELADSVLHLGSSLPRQTKHFLGNLPSSNGNIVLPSEECVTEQSLLPKVGSLASFAEGNADEQSSGLEGACKVNLELLLTNADKGLKAPEQHLKHVAGVLNGESVETSVLNYRELSPHKNRLLSPLRCSAPMSLHNSLVKPERQSKCFEFGKLQPSSSQSLDVQNITDSSFSRTTCFQGVKVDSLGKRSDVISKVEARDITEMTNKASKEPVGCVNNISFLASLAGSTSRNRLQSTRGAGRLQNSGTGLSTNLQHFQEENFRKSSPQLEHTGVFLSTHGVGMNGNNAAAGKSVGECTTHHLPPVKAPLQTKKKTTNHCFLCGKKTGLASSYECRCGNNFCASHRYAETHGCTYDYKSAGRRYLHEANPVVNAPKLPKI

SEQ ID NO: 101766 - protein, 224 aa, Homo sapiens
  Payload ID: 20275
  Gene Name: zinc finger, AN1-type domain 4
  ENSP ID: ENSP00000363491
MDNRKEPPFFNDDNMGPFYYRLHFCDTMELFIETLTGTCFELRVSPFETVISVKAKIRRLEGIPICRQHLIWNNMELENDYCLNDYNISEGCTLKLVLAMRGGPINTRRVPTDDPLRKMAEYLDSSRVEVWEKTSCSKQVTFLVYQEGDQLNFFPAVDRGDGTLTPLSDSSKKIDFHLHVLRRKGEHRMRRMYYSSPPTCESPSSDKEENNKSLFSLWKENRTG

SEQ ID NO: 101767 - protein, 211 aa, Homo sapiens
  Payload ID: 20275
  Gene Name: zinc finger, AN1-type domain 4
  ENSP ID: ENSP00000434854
MDNRKEPPFFNDDNMGPFYYRLHFCDTMELFIETLTGTCFELRVSPFETVISVKAKIRRLEGIPICRQHLIWNNMELENDYCLNDYNISEGCTLKLVLAMRGGPINTRRVPTDDPLRKMAEYLDSSRVEVWEKTSCSKQVTFLVYQEGDQLNFFPAVDRGDGTLTPLSDSSKKIDFHLHVLRRKGEHRMSENLLRMTKNLYFSPVPNLKKF

SEQ ID NO: 101768 - protein, 93 aa, Homo sapiens
  Payload ID: 20275
  Gene Name: zinc finger, AN1-type domain 4
  ENSP ID: ENSP00000477595
MDNRKEPPFFNDDNMGPFYYRLHFCDTMELFIETLTGTCFELRVSPFETVISVKAKIRRLEDPGDPTEVSGWPSPVTTSAHSVMTLEAFVCPK

SEQ ID NO: 101769 - protein, 213 aa, Homo sapiens
  Payload ID: 20276
  Gene Name: zinc finger, AN1-type domain 5
  Uniprot ID: O76080
  ENSP ID: ENSP00000237937
MAQETNQTPGPMLCSTGCGFYGNPRTNGMCSVCYKEHLQRQQNSGRMSPMGTASGSNSPTSDSASVQRADTSLNNCEGAAGSTSEKSRNVPVAALPVTQQMTEMSISREDKITTPKTEVSEPVVTQPSPSVSQPSTSQSEEKAPELPKPKKNRCFMCRKKVGLTGFDCRCGNLFCGLHRYSDKHNCPYDYKAEAAAKIRKENPVVVAEKIQRI

SEQ ID NO: 101770 - protein, 213 aa, Homo sapiens; identical to SEQ ID NO: 101769
  Payload ID: 20276
  Gene Name: zinc finger, AN1-type domain 5
  Uniprot ID: O76080
  ENSP ID: ENSP00000350586

SEQ ID NO: 101771 - protein, 211 aa, Homo sapiens
  Payload ID: 20276
  Gene Name: zinc finger, AN1-type domain 5
  ENSP ID: ENSP00000366155
MAKPEQAADGGVRGRGARPPAQEAQRRRRHPVVVARDLAPGVPGSLHSTQKNMAQETNQTPGPMLCSTGCGFYGNPRTNGMCSVCYKEHLQRQQNSGRMSPMGTASGSNSPTSDSASVQRADTSLNNCEGAAGSTSEKSRNVPVAALPVTQQMTEMSISREDKITTPKTEVSEPVVTQPSPSVSQPSTSQSEEKAPELPKPKKNRCFMCRK

SEQ ID NO: 101772 - protein, 213 aa, Homo sapiens; identical to SEQ ID NO: 101769
  Payload ID: 20276
  Gene Name: zinc finger, AN1-type domain 5
  Uniprot ID: O76080
  ENSP ID: ENSP00000366159

SEQ ID NO: 101773 - protein, 213 aa, Homo sapiens; identical to SEQ ID NO: 101769
  Payload ID: 20276
  Gene Name: zinc finger, AN1-type domain 5
  Uniprot ID: O76080
  ENSP ID: ENSP00000366161

SEQ ID NO: 101774 - protein, 208 aa, Homo sapiens
  Payload ID: 20277
  Gene Name: zinc finger, AN1-type domain 6
  Uniprot ID: Q6FIF0
  ENSP ID: ENSP00000261749
MAQETNHSQVPMLCSTGCGFYGNPRTNGMCSVCYKEHLQRQNSSNGRISPPATSVSSLSESLPVQCTDGSVPEAQSALDSTSSSMQPSPVSNQSLLSESVASSQLDSTSVDKAVPETEDVQASVSDTAQQPSEEQSKSLEKPKQKKNRCFMCRKKVGLTGFECRCGNVYCGVHRYSDVHNCSYNYKADAAEKIRKENPVVVGEKIQKI

SEQ ID NO: 101775 - protein, 174 aa, Homo sapiens
  Payload ID: 20277
  Gene Name: zinc finger, AN1-type domain 6
  ENSP ID: ENSP00000452625
MLLLPNRDKGVQLRNMAQETNHSQVPMLCSTGCGFYGNPRTNGMCSVCYKEHLQRQNSSNGRISPPATSVSSLSESLPVQCTDGSVPEAQSALDSTSSSMQPSPVSNQSLLSESVASSQLDSTSVDKAVPETEDVQASVSDTAQQPSEEQSKSLEKPKQKKNRCFMCRKKVGLT

SEQ ID NO: 101776 - protein, 177 aa, Homo sapiens
  Payload ID: 20277
  Gene Name: zinc finger, AN1-type domain 6
  ENSP ID: ENSP00000452664
MAQETNHSQVPMLCSTGCGFYGNPRTNGMCSVCYKEHLQRQNSSNGRISPPATSVSSLSESLPVQCTDGSVPEAQSALDSTSSSMQPSPVSNQSLLSESVASSQLDSTSVDKAVPETEDVQASVSDTAQQPSEEQSKSLEKPKQKKNRCFMCRKKVGLTGKDLNQMFKIKMMFYNNA

SEQ ID NO: 101777 - protein, 208 aa, Homo sapiens; identical to SEQ ID NO: 101774
  Payload ID: 20277
  Gene Name: zinc finger, AN1-type domain 6
  Uniprot ID: Q6FIF0
  ENSP ID: ENSP00000452735

SEQ ID NO: 101778 - protein, 208 aa, Homo sapiens; identical to SEQ ID NO: 101774
  Payload ID: 20277
  Gene Name: zinc finger, AN1-type domain 6
  Uniprot ID: Q6FIF0
  ENSP ID: ENSP00000453291

SEQ ID NO: 101779 - protein, 158 aa, Homo sapiens
  Payload ID: 20277
  Gene Name: zinc finger, AN1-type domain 6
  ENSP ID: ENSP00000453308
MKGFIFLKAIGVQLRNMAQETNHSQVPMLCSTGCGFYGNPRTNGMCSVCYKEHLQRQNSSNGRISPPATSVSSLSESLPVQCTDGSVPEAQSALDSTSSSMQPSPVSNQSLLSESVASSQLDSTSVDKAVPETEDVQASVSDTAQQPSEEQSKSLEKP

SEQ ID NO: 101780 - protein, 159 aa, Homo sapiens
  Payload ID: 20277
  Gene Name: zinc finger, AN1-type domain 6
  ENSP ID: ENSP00000453571
MAQETNHSQVPMLCSTGCGFYGNPRTNGMCSVCYKEHLQRQNSSNGRISPPATSVSSLSESLPVQCTDGSVPEAQSALDSTSSSMQPSPVSNQSLLSESVASSQLDSTSVDKAVPETEDVQASVSDTAQQPSEEQSKSLEKPKQKKNRCFMCRKKVGLT

SEQ ID NO: 101781 - protein, 72 aa, Homo sapiens
  Payload ID: 20277
  Gene Name: zinc finger, AN1-type domain 6
  ENSP ID: ENSP00000453590
MSIRSFLESIFRCKQYSGLLLEIQRLRTRNYCMQQETLISSTYAKLGVQLRNMAQETNHSQVPMLCSTGCGF

SEQ ID NO: 101782 - protein, 208 aa, Homo sapiens; identical to SEQ ID NO: 101774
  Payload ID: 20277
  Gene Name: zinc finger, AN1-type domain 6
  Uniprot ID: Q6FIF0
  ENSP ID: ENSP00000453709

SEQ ID NO: 101783 - protein, 155 aa, Homo sapiens
  Payload ID: 20277
  Gene Name: zinc finger, AN1-type domain 6
  ENSP ID: ENSP00000453710
MKGFIFLKAIGVQLRNMAQETNHSQVPMLCSTGCGFYGNPRTNGMCSVCYKEHLQRQNSSNGRISPPATSVSSLSESLPVQCTDGSVPEAQSALDSTSSSMQPSPVSNQSLLSESVASSQLDSTSVDKAVPETEDVQASVSDTAQQPSEEQSKSL

SEQ ID NO: 101784 - protein, 208 aa, Homo sapiens; identical to SEQ ID NO: 101774
  Payload ID: 20277
  Gene Name: zinc finger, AN1-type domain 6
  Uniprot ID: Q6FIF0
  ENSP ID: ENSP00000453888

SEQ ID NO: 101785 - protein, 208 aa, Homo sapiens; identical to SEQ ID NO: 101774
  Payload ID: 20277
  Gene Name: zinc finger, AN1-type domain 6
  Uniprot ID: Q6FIF0
  ENSP ID: ENSP00000454137

SEQ ID NO: 101786 - protein, 196 aa, Homo sapiens
  Payload ID: 20277
  Gene Name: zinc finger, AN1-type domain 6
  Uniprot ID: Q6FIF0
  ENSP ID: ENSP00000454152
MAQETNHSQVPMLCSTGCGFYGNPRTNGMCSVCYKEHLQRQNSSNGRISPPVQCTDGSVPEAQSALDSTSSSMQPSPVSNQSLLSESVASSQLDSTSVDKAVPETEDVQASVSDTAQQPSEEQSKSLEKPKQKKNRCFMCRKKVGLTGFECRCGNVYCGVHRYSDVHNCSYNYKADAAEKIRKENPVVVGEKIQKI

SEQ ID NO: 101787 - protein, 148 aa, Homo sapiens
  Payload ID: 20277
  Gene Name: zinc finger, AN1-type domain 6
  ENSP ID: ENSP00000454273
MAQETNHSQVPMLCSTGCGFYGNPRTNGMCSVCYKEHLQRQNSSNGRISPPATSVSSLSESLPVQCTDGSVPEAQSALDSTSSSMQPSPVSNQSLLSESVASSQLDSTSVDKAVPETEDVQGFECRCGNVYCGVHRYSDVHNCSYNYK

SEQ ID NO: 101788 - protein, 32 aa, Homo sapiens
  Payload ID: 20277
  Gene Name: zinc finger, AN1-type domain 6
  ENSP ID: ENSP00000454409
MAQETNHSQVPMLCSTGCGFYGNPRTNGMCSV

SEQ ID NO: 101789 - protein, 87 aa, Homo sapiens
  Payload ID: 20277
  Gene Name: zinc finger, AN1-type domain 6
  ENSP ID: ENSP00000455146
MAQETNHSQVPMLCSTGCGFYGNPRTNGMCSVCYKEHLQRQNSSNGRISPPATSVSSLSESLPVQCTDGSVPEAQSALDSTSSSMQP

SEQ ID NO: 101790 - protein, 20 aa, Homo sapiens
  Payload ID: 20277
  Gene Name: zinc finger, AN1-type domain 6
  ENSP ID: ENSP00000455515
MAQETNHSQVPMLCSTGCGF

SEQ ID NO: 101791 - protein, 64 aa, Homo sapiens
  Payload ID: 20277
  Gene Name: zinc finger, AN1-type domain 6
  ENSP ID: ENSP00000456973
MAQETNHSQVPMLCSTGCGFYGNPRTNGMCSVCYKEHLQRQNSSNGRISPPATSVSSLSESLPV

SEQ ID NO: 101792 - protein, 208 aa, Homo sapiens; identical to SEQ ID NO: 101774
  Payload ID: 20277
  Gene Name: zinc finger, AN1-type domain 6
  Uniprot ID: Q6FIF0
  ENSP ID: ENSP00000478129

SEQ ID NO: 101793 - protein, 208 aa, Homo sapiens; identical to SEQ ID NO: 101774
  Payload ID: 20277
  Gene Name: zinc finger, AN1-type domain 6
  Uniprot ID: Q6FIF0
  ENSP ID: ENSP00000479071

SEQ ID NO: 101794 - protein, 208 aa, Homo sapiens; identical to SEQ ID NO: 101774
  Payload ID: 20277
  Gene Name: zinc finger, AN1-type domain 6
  Uniprot ID: Q6FIF0
  ENSP ID: ENSP00000484971

SEQ ID NO: 101795 - protein, 839 aa, Homo sapiens
  Payload ID: 20278
  Gene Name: zinc finger, B-box domain containing
  Uniprot ID: A8MT70
  ENSP ID: ENSP00000305065
MNRKDFVVLPWGKPGNSVKLKYRNAQELRMEKVQLEFENQEMEKKLQEFRSTRNKEKEDRESSEYYWKSGKVGKLVNQSYMMSQNKGNVVKFSAGKVKLKLLKEQIQEPVKPTVNYKMANSSECEKPKINGKVCGQCENKAALLVCLECGEDYCSGCFAKVHQKGALKLHRTTLLQAKSQILFNVLDVAHQFIKDVNPDEPKEENNSTKETSKIQHKPKSVLLQRSSSEVEITTMKRAQRTKPRKSLLCEGSFDEEASAQSFQEVLSQWRTGNHDDNKKQNLHAAVKDSLEECEVQTNLKIWREPLNIELKEDILSYMEKLWLKKHRRTPQEQLFKMLPDTFPHPHETTGDAQCSQNENDEDSDGEETKVQHTALLLPVETLNIERPEPSLKIVELDDTYEEEFEEAENIVPYKVKLADADSQRSCAFHDCQKNSFPYENGIHQHHVFDKGKRDFLNLCLRNSSTYYKDNSKAETSNTDFDNIVDPDVYSSDIEKIEESTSFERNLKEKNIGLESNQKSDDSCVSLESKDTLLGRDLEKAPIEEKLSQDIKESLELSNLYKRPSFEESKTTKSSLLLQEIACRSKPITKQYQGLERFFIFDTNERLNLLPSHRLECNNSSTRITLAEDREWIPDHSLSEYADNAIVLGVLQGAQSPSSSRKQQKMGQKSQRPSTANFPLSNSVKESSSCLSSSHPRSRSAAAQSSSRAASEISEIEYIDITDQNELSLDDTTDQHTLDNLEKELQVLRSLADTSEKLYSLTSEEFPDFSSQSLNISQISTDFLKTSHVRGPCGVEELSCSGRDTKIQSLLSLSESSTDEEEEDFLNKQHVITLPWSKST

SEQ ID NO: 101796 - protein, 771 aa, Homo sapiens
  Payload ID: 20278
  Gene Name: zinc finger, B-box domain containing
  Uniprot ID: A8MT70
  ENSP ID: ENSP00000376517
MEKVQLEFENQEMEKKLQEFRSTRNKEKEDRESSEYYWKSGKVGKLVNQSYMMSQNKGNVVKFSAGKVKLKLLKEQIQEPVKPTVNYKMANSSECEKPKINGKVCGQCENKAALLVCLECGEDYCSGCFAKVHQKGALKLHRTTLLQAKSQILFNVLDVAHQFIKDVNPDEPKEENNSTKETSKIQHKPKSVLLQRSSSEVEITTMKRAQRTKPRKSLLCEGSFDEEASAQSFQEVLSQWRTGNHDDNKKQNLHAAVKDSLEECEVQTNLKIWREPLNIELKEDILSYMEKLWLKKHRRTPQEQLFKMLPDTFPHPHETTGDAQCSQNENDEDSDGEETKVQHTALLLPVETLNIERPEPSLKIVELDDTYEEEFEEAENIVPYKVKLADADSQRSCAFHDCQKNSFPYENGIHQHHVFDKGKRDFLNLCLRNSSTYYKDNSKAETSNTDFDNIVDPDVYSSDIEKIEESTSFERNLKEKNIGLESNQKSDDSCVSLESKDTLLGRDLEKAPIEEKLSQDIKESLELSNLYKRPSFEESKTTKSSLLLQEIACRSKPITKQYQGLERFFIFDTNERLNLLPSHRLECNNSSTRITLAGQKSQRPSTANFPLSNSVKESSSCLSSSHPRSRSAAAQSSSRAASEISEIEYIDITDQNELSLDDTTDQHTLDNLEKELQVLRSLADTSEKLYSLTSEEFPDFSSQSLNISQISTDFLKTSHVRGPCGVEELSCSGRDTKIQSLLSLSESSTDEEEEDFLNKQHVITLPWSKST

SEQ ID NO: 101797 - protein, 800 aa, Homo sapiens
  Payload ID: 20278
  Gene Name: zinc finger, B-box domain containing
  Uniprot ID: A8MT70
  ENSP ID: ENSP00000376519
MNRKDFVVLPWGKPGNSVKLKYRNAQELRMEKVQLEFENQEMEKKLQEFRSTRNKEKEDRESSEYYWKSGKVGKLVNQSYMMSQNKGNVVKFSAGKVKLKLLKEQIQEPVKPTVNYKMANSSECEKPKINGKVCGQCENKAALLVCLECGEDYCSGCFAKVHQKGALKLHRTTLLQAKSQILFNVLDVAHQFIKDVNPDEPKEENNSTKETSKIQHKPKSVLLQRSSSEVEITTMKRAQRTKPRKSLLCEGSFDEEASAQSFQEVLSQWRTGNHDDNKKQNLHAAVKDSLEECEVQTNLKIWREPLNIELKEDILSYMEKLWLKKHRRTPQEQLFKMLPDTFPHPHETTGDAQCSQNENDEDSDGEETKVQHTALLLPVETLNIERPEPSLKIVELDDTYEEEFEEAENIVPYKVKLADADSQRSCAFHDCQKNSFPYENGIHQHHVFDKGKRDFLNLCLRNSSTYYKDNSKAETSNTDFDNIVDPDVYSSDIEKIEESTSFERNLKEKNIGLESNQKSDDSCVSLESKDTLLGRDLEKAPIEEKLSQDIKESLELSNLYKRPSFEESKTTKSSLLLQEIACRSKPITKQYQGLERFFIFDTNERLNLLPSHRLECNNSSTRITLAGQKSQRPSTANFPLSNSVKESSSCLSSSHPRSRSAAAQSSSRAASEISEIEYIDITDQNELSLDDTTDQHTLDNLEKELQVLRSLADTSEKLYSLTSEEFPDFSSQSLNISQISTDFLKTSHVRGPCGVEELSCSGRDTKIQSLLSLSESSTDEEEEDFLNKQHVITLPWSKST

SEQ ID NO: 101798 - protein, 771 aa, Homo sapiens; identical to SEQ ID NO: 101796
  Payload ID: 20278
  Gene Name: zinc finger, B-box domain containing
  Uniprot ID: A8MT70
  ENSP ID: ENSP00000376520

SEQ ID NO: 101799 - protein, 839 aa, Homo sapiens; identical to SEQ ID NO: 101795
  Payload ID: 20278
  Gene Name: zinc finger, B-box domain containing
  Uniprot ID: A8MT70
  ENSP ID: ENSP00000390232

SEQ ID NO: 101800 - protein, 68 aa, Homo sapiens
  Payload ID: 20278
  Gene Name: zinc finger, B-box domain containing
  ENSP ID: ENSP00000417088
MEKVQLEFENQEMEKKLQEFRSTRNKEKEDREMTKFIMCLAAFNDPVANSFTFTDLDLVWTSKWIMIL

SEQ ID NO: 101801 - protein, 45 aa, Homo sapiens
  Payload ID: 20278
  Gene Name: zinc finger, B-box domain containing
  ENSP ID: ENSP00000417678
  MOD_RES (1)..(1): Any amino acid
XKKAPVAFHPLILDQEVQLLNHHLELLLKFQKLNILILLTRMSFP

SEQ ID NO: 101802 - protein, 86 aa, Homo sapiens
  Payload ID: 20278
  Gene Name: zinc finger, B-box domain containing
  ENSP ID: ENSP00000418861
  MOD_RES (1)..(1): Any amino acid
XLSNSVKESSSCLSSSHPRSRSAAAQSSSRAASEISEIEYIDITDQNELSLDDTTDQHTLDNLEKELQVLRSLAGPQPEAWSPVWD

SEQ ID NO: 101803 - protein, 49 aa, Homo sapiens
  Payload ID: 20278
  Gene Name: zinc finger, B-box domain containing
  ENSP ID: ENSP00000419264
  MOD_RES (1)..(1): Any amino acid
XELSLDDTTDQHTLDNLEKELQVLRSLAGCIHFFFLSSMKNNHVKELGE

SEQ ID NO: 101804 - protein, 163 aa, Homo sapiens
  Payload ID: 20278
  Gene Name: zinc finger, B-box domain containing
  ENSP ID: ENSP00000419307
MNRKDFVVLPWGKPGNSVKLKYRNAQELRMEKVQLEFENQEMEKKLQEFRSTRNKEKEDRESSEYYWKSGKVGKLVNQSYMMSQNKGNVVKFSAGKVKLKLLKEQIQEPVKPTVNYKMANSSECEKPKINGKVCGQCENKAALLVCLECGEDYCSGCFAKVHQ

SEQ ID NO: 101805 - protein, 694 aa, Homo sapiens
  Payload ID: 20279
  Gene Name: zinc finger, BED-type containing 1
  Uniprot ID: O96006
  ENSP ID: ENSP00000370616
MENKSLESSQTDLKLVAHPRAKSKVWKYFGFDTNAEGCILQWKKIYCRICMAQIAYSGNTSNLSYHLEKNHPEEFCEFVKSNTEQMREAFATAFSKLKPESSQQPGQDALAVKAGHGYDSKKQQELTAAVLGLICEGLYPASIVDEPTFKVLLKTADPRYELPSRKYISTKAIPEKYGAVREVILKELAEATWCGISTDMWRSENQNRAYVTLAAHFLGLGAPNCLSMGSRCLKTFEVPEENTAETITRVLYEVFIEWGISAKVFGATTNYGKDIVKACSLLDVAVHMPCLGHTFNAGIQQAFQLPKLGALLSRCRKLVEYFQQSAVAMYMLYEKQKQQNVAHCMLVSNRVSWWGSTLAMLQRLKEQQFVIAGVLVEDSNNHHLMLEASEWATIEGLVELLQPFKQVAEMLSASRYPTISMVKPLLHMLLNTTLNIKETDSKELSMAKEVIAKELSKTYQETPEIDMFLNVATFLDPRYKRLPFLSAFERQQVENRVVEEAKGLLDKVKDGGYRPAEDKIFPVPEEPPVKKLMRTSTPPPASVINNMLAEIFCQTGGVEDQEEWHAQVVEELSNFKSQKVLGLNEDPLKWWSDRLALFPLLPKVLQKYWCVTATRVAPERLFGSAANVVSAKRNRLAPAHVDEQVFLYENARSGAEAEPEDQDEGEWGLDQEQVFSLGDGVSGGFFGIRDSSFL

SEQ ID NO: 101806 - protein, 694 aa, Homo sapiens; identical to SEQ ID NO: 101805
  Payload ID: 20279
  Gene Name: zinc finger, BED-type containing 1
  Uniprot ID: O96006
  ENSP ID: ENSP00000370620

SEQ ID NO: 101807 - protein, 694 aa, Homo sapiens; identical to SEQ ID NO: 101805
  Payload ID: 20279
  Gene Name: zinc finger, BED-type containing 1
  Uniprot ID: O96006
  ENSP ID: ENSP00000370621

SEQ ID NO: 101808 - protein, 271 aa, Homo sapiens
  Payload ID: 20279
  Gene Name: zinc finger, BED-type containing 1
  ENSP ID: ENSP00000419148
MENKSLESSQTDLKLVAHPRAKSKVWKYFGFDTNAEGCILQWKKIYCRICMAQIAYSGNTSNLSYHLEKNHPEEFCEFVKSNTEQMREAFATAFSKLKPESSQQPGQDALAVKAGHGYDSKKQQELTAAVLGLICEGLYPASIVDEPTFKVLLKTADPRYELPSRKYISTKAIPEKYGAVREVILKELAEATWCGISTDMWRSENQNRAYVTLAAHFLGLGAPNCLSMGSRCLKTFEVPEENTAETITRVLYEVFIEWGISAKVFGATTNY

SEQ ID NO: 101809 - protein, 218 aa, Homo sapiens
  Payload ID: 20280
  Gene Name: zinc finger, BED-type containing 2
  Uniprot ID: Q9BTP6
  ENSP ID: ENSP00000321370
MMRREDEEEEGTMMKAKGDLEMKEEEEISETGELVGPFVSAMPTPMPHNKGTRFSEAWEYFHLAPARAGHHPNQYATCRLCGRQVSRGPGVNVGTTALWKHLKSMHREELEKSGHGQAGQRQDPRPHGPQLPTGIEGNWGRLLEQVGTMALWASQREKEVLRRERAVEWRERAVEKRERALEEVERAILEMKWKVRAEKEACQREKELPAAVHPFHFV

SEQ ID NO: 101810 - protein, 234 aa, Homo sapiens
  Payload ID: 20281
  Gene Name: zinc finger, BED-type containing 3
  Uniprot ID: Q96IU2
  ENSP ID: ENSP00000255198
MRSGEPACTMDQARGLDDAAARGGQCPGLGPAPTPTPPGRLGAPYSEAWGYFHLAPGRPGHPSGHWATCRLCGEQVGRGPGFHAGTSALWRHLRSAHRRELESSGAGSSPPAAPCPPPPGPAAAPEGDWARLLEQMGALAVRGSRRERELERRELAVEQGERALERRRRALQEEERAAAQARRELQAEREALQARLRDVSRREGALGWAPAAPPPLKDDPEGDRDGCVITKVLL

SEQ ID NO: 101811 - protein, 150 aa, Homo sapiens
  Payload ID: 20281
  Gene Name: zinc finger, BED-type containing 3
  ENSP ID: ENSP00000427487
MRSGEPACTMDQARGLDDAAARGGQCPGLGPAPTPTPPGRLGAPYSEAWGYFHLAPGRPGHPSGHWATCRLCGEQVGRGPGFHAGTSALWRHLRSAHRRELESSGAGSSPPAAPCPPPPGPAAAPEGDWARLLEQMGALAVRGSRREREL

SEQ ID NO: 101812 - protein, 1171 aa, Homo sapiens
  Payload ID: 20282
  Gene Name: zinc finger, BED-type containing 4
  Uniprot ID: O75132
  ENSP ID: ENSP00000216268
MENNLKTCPKEDGDFVSDKIKFKIEEEDDDGIPPDSLERMDFKSEQEDMKQTDSGGERAGLGGTGCSCKPPGKYLSAESEDDYGALFSQYSSTLYDVAMEAVTQSLLSSRNMSSRKKSPAWKHFFISPRDSTKAICMYCVKEFSRGKNEKDLSTSCLMRHVRRAHPTVLIQENGSVSAVSSFPSPSLLLPPQPADAGDLSTILSPIKLVQKVASKIPSPDRITEESVSVVSSEEISSDMSVSEKCGREEALVGSSPHLPALHYDEPAENLAEKSLPLPKSTSGSRRRSAVWKHFYLSPLDNSKAVCIHCMNEFSRGKNGKDLGTSCLIRHMWRAHRAIVLQENGGTGIPPLYSTPPTLLPSLLPPEGELSSVSSSPVKPVRESPSASSSPDRLTEDLQSHLNPGDGLMEDVAAFSSSDDIGEASASSPEKQQADGLSPRLFESGAIFQQNKKVMKRLKSEVWHHFSLAPMDSLKAECRYCGCAISRGKKGDVGTSCLMRHLYRRHPEVVGSQKGFLGASLANSPYATLASAESSSSKLTDLPTVVTKNNQVMFPVNSKKTSKLWNHFSICSADSTKVVCLHCGRTISRGKKPTNLGTSCLLRHLQRFHSNVLKTEVSETARPSSPDTRVPRGTELSGASSFDDTNEKFYDSHPVAKKITSLIAEMIALDLQPYSFVDNVGFNRLLEYLKPQYSLPAPSYFSRTAIPGMYDNVKQIIMSHLKEAESGVIHFTSGIWMSNQTREYLTLTAHWVSFESPARPRCDDHHCSALLDVSQVDCDYSGNSIQKQLECWWEAWVTSTGLQVGITVTDNASIGKTLNEGEHSSVQCFSHTVNLIVSEAIKSQRMVQNLLSLARKICERVHRSPKAKEKLAELQREYALPQHHLIQDVPSKWSTSFHMLERLIEQKRAINEMSVECNFRELISCDQWEVMQSVCRALKPFEAASREMSTQMSTLSQVIPMVHILNRKVEMLFEETMGIDTMLRSLKEAMVSRLSATLHDPRYVFATLLDPRYKASLFTEEEAEQYKQDLIRELELMNSTSEDVAASHRCDAGSPSKDSAAEENLWSLVAKVKKKDPREKLPEAMVLAYLEEEVLEHSCDPLTYWNLKKASWPGLSALAVRFLGCPPSIVPSEKLFNTPTENGSLGQSRLMMEHFEKLIFLKVNLPLIYFQY

SEQ ID NO: 101813 - protein, 693 aa, Homo sapiens
  Payload ID: 20283
  Gene Name: zinc finger, BED-type containing 5
  Uniprot ID: Q49AG3
  ENSP ID: ENSP00000398106
MIAPLLCILSYNFNTFAILNVYSKLTMFCTTNSLPMDLLLKQGSLKQEVESFCYQIVSESNDQKVGILQSEDKQLQPSVSKKSEGELSRVKFISNSNKITFSKKPKRRKYDESYLSFGFTYFGNRDAPHAQCVLCKKILSNSSLAPSKLRRHLETKHAAYKDKDISFFKQHLDSPENNKPPTPKIVNTDNESATEASYNVSYHIALSGEAHTIGELLIKPCAKDVVMRMFDEQYSKKIDAVQLSNSTVARRIKDLAADIEEELVCRLKICDGFSLQLDESADVSGLAVLLVFVRYRFNKSIEEDLLLCESLQSNATGEEIFNCINSFMQKHEIEWEKCVDVCSDASRAVDGKIAEAVTLIKYVAPESTSSHCLLYRHALAVKIMPTSLKNVLDQAVQIINYIKARPHQSRLLKILCEEMGAQHTALLLNTEVRWLSRGKVLVRLFELRRELLVFMDSAFRLSDCLTNSSWLLRLAYLADIFTKLNEVNLSMQGKNVTVFTVFDKMSSLLRKLEFWASSVEEENFDCFPTLSDFLTEINSTVDKDICSAIVQHLRGLRATLLKYFPVTNDNNAWVRNPFTVTVKPASLVARDYESLIDLTSDSQVKQNFSELSLNDFWSSLIQEYPSIARRAVRVLLPFATMHLCETGFSYYAATKTKYRKRLDAAPHMRIRLSNITPNIKRICDKKTQKHCSH

SEQ ID NO: 101814 - protein, 693 aa, Homo sapiens; identical to SEQ ID NO: 101813
  Payload ID: 20283
  Gene Name: zinc finger, BED-type containing 5
  Uniprot ID: Q49AG3
  ENSP ID: ENSP00000415939

SEQ ID NO: 101815 - protein, 59 aa, Homo sapiens
  Payload ID: 20283
  Gene Name: zinc finger, BED-type containing 5
  ENSP ID: ENSP00000432764
MIAPLLCILSYNFNTFAILNVYSKLTMFCTTNSLPMDLLLKQGSLKQEVESFCYQIVSE

SEQ ID NO: 101816 - protein, 109 aa, Homo sapiens
  Payload ID: 20283
  Gene Name: zinc finger, BED-type containing 5
  ENSP ID: ENSP00000433093
MIAPLLCILSYNFNTFAILNVYSKLTMFCTTNSLPMDLLLKQGSLKQEVESFCYQIVSESNDQKVGILQSEDKQLQPSVSKKSEGELSRVKFISNSNKITFSKKPKRRK

SEQ ID NO: 101817 - protein, 69 aa, Homo sapiens
  Payload ID: 20283
  Gene Name: zinc finger, BED-type containing 5
  ENSP ID: ENSP00000435491
MIAPLLCILSYNFNTFAILNVYSKLTMFCTTNSLPMDLLLKQGSLKQEVESFCYQIVSESNDQKVGILQ

SEQ ID NO: 101818 - protein, 92 aa, Homo sapiens
  Payload ID: 20283
  Gene Name: zinc finger, BED-type containing 5
  ENSP ID: ENSP00000435663
MIAPLLCILSYNFNTFAILNVYSKLTMFCTTNSLPMDLLLKQGSLKQEVESFCYQIVSESNDQKVGILQSEDKQLQPSVSKKSEGELSRVKF

SEQ ID NO: 101819 - protein, 979 aa, Homo sapiens
  Payload ID: 20284
  Gene Name: zinc finger, BED-type containing 6
  Uniprot ID: P86452
  ENSP ID: ENSP00000447879
MSVCTLSVPVSSLSPGRRCNTFSDSGILGCVPINSNTDEEDVVEEKMVAEGVNKEAKQPAKKKRKKGLRIKGKRRRKKLILAKKFSKDLGSGRPVADAPALLASNDPEQDEESLFESNIEKQIYLPSTRAKTSIVWHFFHVDPQYTWRAICNLCEKSVSRGKPGSHLGTSTLQRHLQARHSPHWTRANKFGVASGEEDFTLDVSLSPSSGSNGSFEYIPTDPLDDNRMGKKHDKSASDALRAERGRFLIKSNIVKHALIPGTRAKTSAVWNFFYTDPQHISRAVCNICKRSVSRGRPGSHLGTSTLQRHLQATHPIHWAVANKDSGAVANGLDEAETERSDLLSDTLHGEKSTGSQDLTAEDLSDSDSDEPMLEVENRSESPIPVAEQGTLMRAQERETTCCGNPVSSHISQAIIQMIVEDMHPYNYFSTPAFQRFMQIVAPDYRLPSETYFFTKAVPQLYDCVREKIFLTLENVQSQKIHLTVDIWTHDPSTDYFIVTVHWVSLETASFLNNGRIPDFRKWAVLCVTGLAKDCLITNILQELNDQIGLWLSPNFLIPSFIVSDNSSNVVHAIKDGGFTHVPCFLHCLNMVIQDFFCEHKSIENMLVAARKTCHHFSHSVKARQILQEFQNDHQLPWKNLKQDETGHWISTFYMLKWLLEHCYSVHHSLGRASGVVLTSLQWTLMTYVCDILKPFEEATQKVSVKTAGLNQVLPLIHHLLLSLQKLREDFQVRGITQALNLVDSLSLKLETDTLLSAMLKSKPCILATLLDPCFKNSLEDFFPQGADLETYKQFLAEEVCNYMESSPEICQIPTSEASCPSVTVGADSFTSSLKEGTSSSGSVDSSAVDNVALGSKSFMFPSAVAVVDEYFKEKYSEFSGGDDPLIYWQRKISIWPALTQVAIQYLSCPMCSWQSECIFTKNSHFHPKQIMSLDFDNIEQLMFLKMNLKNVNYDYSTLVLSWDPEQNEVVQSSEKEILP

SEQ ID NO: 101820 - protein, 594 aa, Homo sapiens
  Payload ID: 20285
  Gene Name: zinc finger, BED-type containing 8
  Uniprot ID: Q8IZ13
  ENSP ID: ENSP00000386184
MSKKRKWDDDYVRYWFTCTTEVDGTQRPQCVLCNSVFSNADLRPSKLSDHFNRQHGGVAGHDLNSLKHMPAPSDQSETLKAFGVASHEDTLLQASYQFAYLCAKEKNPHTVAEKLVKPCALEIAQIVLGPDAQKKLQQVPLSDDVIHSRIDEMSQDILQQVLEDIKASPLKVGIQLAETTDMDDCSQLMAFVRYIKEREIVEEFLFCEPLQLSMKGIDVFNLFRDFFLKHKIALDVCGSVCTDGASSMLGENSEFVAYVKKEIPHIVVTHCLLNPHALVIKTLPTKLRDALFTVVRVINFIKGRAPNHRLFQAFFEEIGIEYSVLLFHTEMRWLSRGQILTHIFEMYEEINQFLHHKSSNLVDGFENKEFKIHLAYLADLFKHLNELSASMQRTGMNTVSAREKLSAFVRKFPFWQKRIEKRNFTNFPFLEEIIVSDNEGIFIAAEITLHLQQLSNFFHGYFSIGDLNEASKWILDPFLFNIDFVDDSYLMKNDLAELRASGQILMEFETMKLEDFWCAQFTAFPNLAKTALEILMPFATTYLCELGFSSLLHFKTKSRSCFNLSDDIRVAISKKVPRFSDIIEQKLQLQQKSL

SEQ ID NO: 101821 - protein, 594 aa, Homo sapiens; identical to SEQ ID NO: 101820
  Payload ID: 20285
  Gene Name: zinc finger, BED-type containing 8
  Uniprot ID: Q8IZ13
  ENSP ID: ENSP00000428831

SEQ ID NO: 101822 - protein, 1325 aa, Homo sapiens
  Payload ID: 20286
  Gene Name: zinc finger, BED-type containing 9
  Uniprot ID: Q6R2W3
  ENSP ID: ENSP00000395259
MEAVSRVFPALAGQAPEEQGEIIKVKVKEEDHTWDQESALRRNLSYTRELSRQRFRQFCYQETPGPREALSQLRELCRQWLNPEIHTKEQILELLVLEQFLTILPEELQSWVREHNPESGEEVVTLLEDLERELDEPRQQVSQGTYGQEVSMEEMIPLDSAKESLGTQLQSMEDRMECESPEPHPLQDNGSFLWFSMMSQSMGGDNLSSLDTNEAEIEPENMREKFFRSLARLLENKSNNTKIFSKAKYCQLIKEVKEAKAKAKKESVDYRRLARFDVILVQGNEKLIEAVNGETDKIRYYLHSEDLFDILHNTHLSIGHGGRTRMEKELQAKYKNITKEVIMLYLTLCKPCQQKNSKLKKVLTSKSIKEVSSRCQVDLIDMQLNPDGEYRFILHYQDLCTKLTFLRSLKSKRPTEVAHALLDIFTIIGAPSVLQSDNGREFSSQVVSELSNIWPELKIVHGKSQTCQSQSSAEQTEDIRKRIFSWMQTNNSSHWTEFLWFIQMSQNQPYHRSMQQTPCESAFSSEAKLGLSHSQLTEELVASLHTENELDQADKELENTLRAQYEENIETGTDSSDIEENLSVTPKVAEKSPPESRLRFLSCVVCEKECTGVNSCISCDGNIHAICGVPSQHGTEGCGRQITCSLCYETSTMKRKHDEIQRSLPVKPSKMLKPSGTPFSPDKVGDWMAKQASLDFFVKKRHAFSEHSSSNKRNVNNRSYPEEGKTKRVHASFTRKYDPSYIEFGFVAVIDGEVLKPQCIICGDVLANEAMKPSKLKRHLYSKHKEISSQPKEFFERKSSELKSQPKQVFNVSHINISALRASYKVALPVAKSKTPYTIAETLVKDCIKEVCLEMLGESAAKKVAQVPLSNDTIARRIQELANDMEDQLIEQIKLAKYFSLQLDECRDIANMIILLVYVRFEHDDDIKEEFFFSASLPTNTTSSELYEAVKNYIVNKCGLEFKFCVGVCSDGAASMTGKHSEVVTQIKELAPECKTTHCFIHRESLAMKKISAELNSVLNDIVKIVNYIKSNSLNSRLFSLLCDNMEADHKQLLLHAEIRWLSRGKVLSRMFEIRNELLVFLQGKKPMWSQLFKDVNWTARLAYLSDIFSIFNDLNASMQGKNATYFSMADKVEGQKQKLEAWKNRISTDCYDMFHNLTTIINEVGNDLDIAHLRKVISEHLTNLLECFEFYFPSKEDPRIGNLWIQNPFLSSKDNLNLTVTLQDKLLKLATDEGLKISFENTASLPSFWIKAKNDYPELAEIALKLLLLFPSTYLCETGFSTLSVIKTKHRNSLNIHYPLRVALSSIQPRLDKLTSKKQAHLSH

SEQ ID NO: 101823 - protein, 794 aa, Homo sapiens
  Payload ID: 20286
  Gene Name: zinc finger, BED-type containing 9
  ENSP ID: ENSP00000420877
MEAVSRVFPALAGQAPEEQGEIIKVKVKEEDHTWDQESALRRNLSYTRELSRQRFRQFCYQETPGPREALSQLRELCRQWLNPEIHTKEQILELLVLEQFLTILPEELQSWVREHNPESGEEVVTLLEDLERELDEPRQQVSQGTYGQEVSMEEMIPLDSAKESLGTQLQSMEDRMECESPEPHPLQDNGSFLWFSMMSQSMGGDNLSSLDTNEAEIEPENMREKFFRSLARLLENKSNNTKIFSKAKYCQLIKEVKEAKAKAKKESVDYRRLARFDVILVQGNEKLIEAVNGETDKIRYYLHSEDLFDILHNTHLSIGHGGRTRMEKELQAKYKNITKEVIMLYLTLCKPCQQKNSKLKKVLTSKSIKEVSSRCQVDLIDMQLNPDGEYRFILHYQDLCTKLTFLRSLKSKRPTEVAHALLDIFTIIGAPSVLQSDNGREFSSQVVSELSNIWPELKIVHGKSQTCQSQSSAEQTEDIRKRIFSWMQTNNSSHWTEFLWFIQMSQNQPYHRSMQQTPCESAFSSEAKLGLSHSQLTEELVASLHTENELDQADKELENTLRAQYEENIETGTDSSDIEENLSVTPKVAEKSPPESRLRFLSCVVCEKECTGVNSCISCDGNIHAICGVPSQHGTEGCGRQITCSLCYETSTMKRKHDEIQRSLPVKPSKMLKPSGTPFSPDKVGDWMAKQASLDFFVKKRHAFSEHSSSNKRNVNNRSYPEEGKTKRVHASFTRKYDPSYIEFGFVAVIDGEVLKPQCIICGDVLANEAMKPSKLKRHLYSKHKEISSQPKEF

SEQ ID NO: 101824 - protein, 325 aa, Homo sapiens
  Payload ID: 20287
  Gene Name: zinc finger, C2HC-type containing 1A
  Uniprot ID: Q96GY0
  ENSP ID: ENSP00000263849
MEGLEENGGVVQVGELLPCKICGRTFFPVALKKHGPICQKTATKKRKTFDSSRQRAEGTDIPTVKPLKPRPEPPKKPSNWRRKHEEFIATIRAAKGLDQALKEGGKLPPPPPPSYDPDYIQCPYCQRRFNENAADRHINFCKEQAARISNKGKFSTDTKGKPTSRTQVYKPPALKKSNSPGTASSGSSRLPQPSGAGKTVVGVPSGKVSSSSSSLGNKLQTLSPSHKGIAAPHAGANVKPRNSTPPSLARNPAPGVLTNKRKTYTESYIARPDGDCASSLNGGNIKGIEGHSPGNLPKFCHECGTKYPVEWAKFCCECGIRRMIL

SEQ ID NO: 101825 - protein, 197 aa, Homo sapiens
  Payload ID: 20287
  Gene Name: zinc finger, C2HC-type containing 1A
  ENSP ID: ENSP00000427797
  MOD_RES (1)..(1): Any amino acid
XYKPPALKKSNSPGTASSGSSRLPQPSGAGKTVVGVPSGKVSSSSSSLGNKLQTLSPSHKGIAAPHAGNMDKLGPPLRTGRLVQRLYDSDTKSDSAIKRHELLPIYKANVKPRNSTPPSLARNPAPGVLTNKRKTYTESYIARPDGDCASSLNGGNIKGIEGHSPGNLPKFCHECGTKYPVEWAKFCCECGIRRMIL

SEQ ID NO: 101826 - protein, 222 aa, Homo sapiens
  Payload ID: 20288
  Gene Name: zinc finger, C2HC-type containing 1B
  Uniprot ID: Q5TFG8
  ENSP ID: ENSP00000237275
MAGAEPFLADGNQELFPCEVCGRRFAADVLERHGPICKKLFNRKRKPFSSLKQRLQGTDIPTVKKTPQSKSPPVRKSNWRQQHEDFINAIRSAKQCMLAIKEGRPLPPPPPPSLNPDYIQRPYCMRRFNESAAERHTNFCKDQSSRRVFNPAQTAAKLASRAQGRAQMGPKKEPTVTSAVGALLQNRVLVATNEVPTKSGLAMDPASGAKLRQGFSKSSKKD

SEQ ID NO: 101827 - protein, 389 aa, Homo sapiens
  Payload ID: 20289
  Gene Name: zinc finger, C2HC-type containing 1C
  ENSP ID: ENSP00000238686
MAGLQRLASHLPVGVMLPHNTTEAPGPHSAKQDSYEQGDSSQQSLKGHLRNNFQKQLLSNKELILDKVYTHPKWNTQTKARSYSYPHCTGISQQDPESDSQGQGNGLFYSSGPQSWYPKANNQDFIPFTKKRVGVDRAFPLKPMVHRKSCSTGEAGTDGDHNVYPRPPEPREFSSRNFGVRNQGNFSVVGTVLAATQAEKAVANFDRTEWVQIRRLEAAGESLEEEIRRKQILLRGKLKKTEEELRRIQTQKEQAKENENGELQKIILPRSRVKGNKSNTMYKPIFSPEFEFEEEFSRDRREDETWGRSQQNSGPFQFSDYRIQRLKRERLVASNNKIRDPVSEPSVEKFSPPSETPVGALQGSARNSSLSMAPDSSGSSGSIEEPQLG

SEQ ID NO: 101828 - protein, 275 aa, Homo sapiens
  Payload ID: 20289
  Gene Name: zinc finger, C2HC-type containing 1C
  Uniprot ID: Q53FD0
  ENSP ID: ENSP00000390606
MAGLQRLASHLPVGVMLPHNTTEAPGPHSAKQDSYEQGDSSQQSLKGHLRNNFQKQLLSNKELILDKVYTHPKWNTQTKARSYSYPHCTGISQQDPESDSQGQGNGLFYSSGPQSWYPKANNQDFIPFTKKRVGVDRAFPLKPMVHRKSCSTGEAGTDGDHNVYPRPPEPREFSSRNFGVRNQGNFSVVGTVLAATQAEKAVANFDRTEWVQIRRLEAAGESLEEEIRRKQILLRGKLKKTEEELRRIQTQKEQAKENENGELQKIILPRSRVKG

SEQ ID NO: 101829 - protein, 157 aa, Homo sapiens
  Payload ID: 20289
  Gene Name: zinc finger, C2HC-type containing 1C
  ENSP ID: ENSP00000434733
  MOD_RES (1)..(1): Any amino acid
XVDRAFPLKPMVHRKSCSTGEAGTDGDHNVYPRPPEPREFSSRNFGVRNQGNFSVVGTVLAATQAEKAVANFDRTEWVQIRRLEAAGESLEEEIRRKQILLRGKLKKTEEELRRIQTQKEQAKENENGELQKIILPRSRVKVLCLWKLSGCTFLSFL

SEQ ID NO: 101830 - protein, 93 aa, Homo sapiens
  Payload ID: 20289
  Gene Name: zinc finger, C2HC-type containing 1C
  ENSP ID: ENSP00000434997
MAGLQRLASHLPVGVMLPHNTTEAPGPHSAKQDSYEQGDSSQQSLKGHLRNNFQKQLLSNKELILDKVYTHPKWNTQTKARSYSYPHCTGISQ

SEQ ID NO: 101831 - protein, 456 aa, Homo sapiens
  Payload ID: 20289
  Gene Name: zinc finger, C2HC-type containing 1C
  Uniprot ID: Q53FD0
  ENSP ID: ENSP00000435550
MAGLQRLASHLPVGVMLPHNTTEAPGPHSAKQDSYEQGDSSQQSLKGHLRNNFQKQLLSNKELILDKVYTHPKWNTQTKARSYSYPHCTGISQQDPESDSQGQGNGLFYSSGPQSWYPKANNQDFIPFTKKRVGVDRAFPLKPMVHRKSCSTGEAGTDGDHNVYPRPPEPREFSSRNFGVRNQGNFSVVGTVLAATQAEKAVANFDRTEWVQIRRLEAAGESLEEEIRRKQILLRGKLKKTEEELRRIQTQKEQAKENENGELQKIILPRSRVKGNKSNTMYKPIFSPEFEFEEEFSRDRREDETWGRSQQNSGPFQFSDYRIQRLKRERLVASNNKIRDPVSEPSVEKFSPPSETPVGALQGSARNSSLSMAPDSSGSSGSIEEPQLGECSHCGRKFLSFRLERHSNICSRMRGSKRKVFDSSRARAKGTELEQYLNWKGPASAKAEPPQKSNWR

SEQ ID NO: 101832 - protein, 92 aa, Homo sapiens
  Payload ID: 20289
  Gene Name: zinc finger, C2HC-type containing 1C
  ENSP ID: ENSP00000435684
MAGLQRLASHLPVGVMLPHNTTEAPGPHSAKQDSYEQGDSSQQSLKGHLRNNFQKQLLSNKELILDKVYTHPKWNTQTKARSYSYPHCTGIS

SEQ ID NO: 101833 - protein, 171 aa, Homo sapiens
  Payload ID: 20289
  Gene Name: zinc finger, C2HC-type containing 1C
  ENSP ID: ENSP00000437160
MAGLQRLASHLPVGVMLPHNTTEAPGPHSAKQDSYEQGDSSQQSLKGHLRNNFQKQLLSNKELILDKVYTHPKWNTQTKARSYSYPHCTGISQQDPESDSQGQGNGLFYSSGPQSWYPKANNQDFIPFTKKRVGVDRAFPLKPMVHRKSCSTGEAGTDGDHNVYPRPPEPR

SEQ ID NO: 101834 - protein, 161 aa, Homo sapiens
  Payload ID: 20289
  Gene Name: zinc finger, C2HC-type containing 1C
  ENSP ID: ENSP00000451195
MAGLQRLASHLPVGVMLPHNTTEAPGPHSAKQDSYEQGDSSQQSLKGHLRNNFQKQLLSNKELILDKVYTHPKWNTQTKARSYSYPHCTGISQQDPESDSQGQGNGLFYSSGPQSWYPKANNQDFIPFTKKRVGVDRAFPLKPMVHRKSCSTGEAGTDGDH

SEQ ID NO: 101835 - protein, 1989 aa, Homo sapiens
  Payload ID: 20290
  Gene Name: zinc finger, C3H1-type containing
  Uniprot ID: O60293
  ENSP ID: ENSP00000368017
MATADTPAPASSGLSPKEEGELEDGEISDDDNNSQIRSRSSSSSSGGGLLPYPRRRPPHSARGGGSGGGGGSSSSSSSSQQQLRNFSRSRHASERGHLRGPSSYRPKEPFRSHPPSVRMPSSSLSESSPRPSFWERSHLALDRFRFRGRPYRGGSRWSRGRGVGERGGKPGCRPPLGGGAGSGFSSSQSWREPSPPRKSSKSFGRSPSRKQNYSSKNENCVEETFEDLLLKYKQIQLELECINKDEKLALSSKEENVQEDPKTLNFEDQTSTDNVSITKDSSKEVAPEEKTQVKTFQAFELKPLRQKLTLPGDKNRLKKVKDGAKPLSLKSDTTDSSQGLQDKEQNLTRRISTSDILSEKKLGEDEEELSELQLRLLALQSASKKWQQKEQQVMKESKEKLTKTKTVQQKVKTSTKTHSAKKVSTTAKQALRKQQTKAWKKLQQQKEQERQKEEDQRKQAEEEERRKREEEIRKIRDLSNQEEQYNRFMKLVGGKRRSRSKSSDPDLRRSLDKQPTDSGGGIYQYDNYEEVAMDTDSETSSPAPSPVQPPFFSECSLGYFSPAPSLSLPPPPQVSSLPPLSQPYVEGLCVSLEPLPPLPPLPPLPPEDPEQPPKPPFADEEEEEEMLLREELLKSLANKRAFKPEETSSNSDPPSPPVLNNSHPVPRSNLSIVSINTVSQPRIQNPKFHRGPRLPRTVISLPKHKSVVVTLNDSDDSESDGEASKSTNSVFGGLESMIKEARRTAEQASKPKVPPKSEKENDPLRTPEALPEEKKIEYRLLKEEIANREKQRLIKSDQLKTSSSSPANSDVEIDGIGRIAMVTKQVTDAESKLKKHRILLMKDESVLKNLVQQEAKKKESVRNAEAKITKLTEQLQATEKILNVNRMFLKKLQEQIHRVQQRVTIKKALTLKYGEELARAKAVASKEIGKRKLEQDRFGPNKMMRLDSSPVSSPRKHSAELIAMEKRRLQKLEYEYALKIQKLKEARALKAKEQQNISPVVEEEPEFSLPQPSLHDLTQDKLTLDTEENDVDDEILSGSSRERRRSFLESNYFTKPNLKHTDTANKECINKLNKNTVEKPELFLGLKIGELQKLYSKADSLKQLILKTTTGITEKVLHGQEISVDVDFVTAQSKTMEVKPCPFRPYHSPLLVFKSYRFSPYYRTKEKLPLSSVSYSNMIEPDQCFCRFDLTGTCNDDDCQWQHIQDYTLSRKQLFQDILSYNLSLIGCAETSTNEEITASAEKYVEKLFGVNKDRMSMDQMAVLLVSNINESKGHTPPFTTYKDKRKWKPKFWRKPISDNSFSSDEEQSTGPIKYAFQPENQINVPALDTVVTPDDVRYFTNETDDIANLEASVLENPSHVQLWLKLAYKYLNQNEGECSESLDSALNVLARALENNKDNPEIWCHYLRLFSKRGTKDEVQEMCETAVEYAPDYQSFWTFLHLESTFEEKDYVCERMLEFLMGAAKQETSNILSFQLLEALLFRVQLHIFTGRCQSALAILQNALKSANDGIVAEYLKTSDRCLAWLAYIHLIEFNILPSKFYDPSNDNPSRIVNTESFVMPWQAVQDVKTNPDMLLAVFEDAVKACTDESLAVEERIEACLPLYTNMIALHQLLERYEAAMELCKSLLESCPINCQLLEALVALYLQTNQHDKARAVWLTAFEKNPQNAEVFYHMCKFFILQNRGDNLLPFLRKFIASFFKPGFEKYNNLDLFRYLLNIPGPIDIPSRLCKGNFDDDMFNHQVPYLWLIYCLCHPLQSSIKETVEAYEAALGVAMRCDIVQKIWMDYLVFANNRAAGSRNKVQEFKFFTDLVNRCLVTVPARYPIPFSSADYWSNYEFHNRVIFFYLSCVPKTQHSKTLERFCSVMPANSGLALRLLQHEWEESNVQILKLQAKMFTYNIPTCLATWKIAIAAEIVLKGQREVHRLYQRALQKLPLCASLWKDQLLFEASEGGKTDNLRKLVSKCQEIGVSLNELLNLNSNKTESKNH

SEQ ID NO: 101836 - protein, 1910 aa, Homo sapiens
  Payload ID: 20290
  Gene Name: zinc finger, C3H1-type containing
  Uniprot ID: O60293
  ENSP ID: ENSP00000446995
MATADTPAPASSGLSPKEEGELEDGEISDDDNNSQIRSRSSSSSSGGGLLPYPRRRPPHSARGGGSGGGGGSSSSSSSSQQQLRNFSRSRHASERGHLRGPSSYRPKEPFRSHPPSVRMPSSSLSESSPRPSFWERSHLALDRFRFRGRPYRGGSRWSRGRGVGERGGKPGCRPPLGGGAGSGFSSSQSWREPSPPRKSSKSFGRSPSRKQNYSSKNENCVEETFEDLLLKYKQIQLELECINKDEKLALSSKEENVQEDPKTLNFEDQTSTDNVSITKDSSKEVAPEEKTQVKTFQAFELKPLRQKLTLPGDKNRLKKVKDGAKPLSLKSDTTDSSQGLQDKEQNLTRRISTSDILSEKKLGEDEEELSELQLRLLALQSASKKWQQKEQQVMKESKEKLTKTKTVQQKVKTSTKTHSAKKVSTTAKQALRKQQTKAWKKLQQQKEQERQKEEDQRKQAEEEERRKREEEIRKIRDLSNQEEQYNRFMKLVGGKRRSRSKSSDPDLRRSLDKQPTDSGGGIYQYDNYEEVAMDTDSETSSPAPSPVQPPFFSECSLGYFSPAPSLSLPPPPQVSSLPPLSQPYVEGLCVSLEPLPPLPPLPPLPPEDPEQPPKPPFADEEEEEEMLLREELLKSLANKRAFKPEETSSNSDPPSPPVLNNSHPVPRSNLSIVSINTVSQPRIQNPKFHRGPRLPRTVISLPKHKSVVVTLNDSDDSESDGEASKSTNSVFGGLESMIKEARRTAEQASKPKVPPKSEKENDPLRTPEALPEEKKIEYRLLKEEIANREKQRLIKSDQLKTSSSSPANSDVEIDGIGRIAMVTKQVTDAESKLKKHRILLMKDESVLKNLVQQEAKKKESVRNAEAKITKLTEQLQATEKILNVNRMFLKKLQEQIHRVQQRVTIKKALTLKYGEELARAKAVASKEIGKRKLEQDRFGPNKMMRLDSSPVSSPRKHSAELIAMEKRRLQKLEYEYALKIQKLKEARALKAKEQQNISPVVEEEPEFSLPQPSLHDLTQDKLTLDTEENDVDDEILSGSSRERRRSFLESNYFTKPNLKHTDTANKECINKLNKNTVEKPELFLGLKIGELQKLYSKADSLKQLILKTTTGITEKVLHGQEISVDVDFVTAQSKTMEVKPCPFRPYHSPLLVFKSYRFSPYYRTKEKLPLSSVSYSNMIEPDQCFCRFDLTGTCNDDDCQWQHIQDYTLSRKQLFQDILSYNLSLIGCAETSTNEEITASAEKYVEKLFGVNKDRMSMDQMAVLLVSNINESKGHTPPFTTYKDKRKWKPKFWRKPISDNSFSSDEEQSTGPIKYAFQPENQINVPALDTVVTPDDVRYFTNETDDIANLEASVLENPSHVQLWLKLAYKYLNQNEGECSESLDSALNVLARALENNKDNPEIWCHYLRLFSKRGTKDEVQEMCETAVEYAPDYQSFWTFLHLESTFEEKDYVCERMLEFLMGAAKQETSNILSFQLLEALLFRVQLHIFTGRCQSALAILQNALKSANDGIVAEYLKTSDRCLAWLAYIHLIEFNILPSKFYDPSNDNPSRIVNTESFVMPWQAVQDVKTNPDMLLAVFEDAVKACTDESLAVEERIEACLPLYTNMIALHQLLERYEAAMELCKSLLESCPINCQLLEALVALYLQTNQHDKARAVWLTAFEKNPQNAEVFYHMCKFFILQNRGDNLLPFLRKFIASFFKPGFEKYNNLDLFRYLLNIPGPIDIPSRLCKGNFDDDMFNHQVPYLWLIYCLCHPLQSSIKETVEAYEAALGVAMRCDIVQKIWMDYLVFANNRAAGSRNKVQEFKFFTDLVNRCLVTVPARYPIPFSSADYWSNYEFHNRVIFFYLSCVPKTQHSKTLERFCSVMPANSGLALRLLQHEWEESNVQILKLQAKMFTYNIPTCLATWKM

SEQ ID NO: 101837 - protein, 358 aa, Homo sapiens
  Payload ID: 20290
  Gene Name: zinc finger, C3H1-type containing
  ENSP ID: ENSP00000447976
MATADTPAPASSGLSPKEEGELEDGEISDDDNNSQIRSRSSSSSSGGGLLPYPRRRPPHSARGGGSGGGGGSSSSSSSSQQQLRNFSRSRHASERGHLRGPSSYRPKEPFRSHPPSVRMPSSSLSESSPRPSFWERSHLALDRFRFRGRPYRGGSRWSRGRGVGERGGKPGCRPPLGGGAGSGFSSSQSWREPSPPRKSSKSFGRSPSRKQNYSSKNENCVEETFEDLLLKYKQIQLELECINKDEKLALSSKEENVQEDPKTLNFEDQTSTDNVSITKDSSKEVAPEEKTQVKTFQAFELKPLRQKLTLPGDKNRLKKVKDGAKPLSLKSDTTDSSQGIPYRVKEGFTPIPGLKFSA

SEQ ID NO: 101838 - protein, 346 aa, Homo sapiens
  Payload ID: 20290
  Gene Name: zinc finger, C3H1-type containing
  Uniprot ID: O60293
  ENSP ID: ENSP00000450044
MATADTPAPASSGLSPKEEGELEDGEISDDDNNSQIRSRSSSSSSGGGLLPYPRRRPPHSARGGGSGGGGGSSSSSSSSQQQLRNFSRSRHASERGHLRGPSSYRPKEPFRSHPPSVRMPSSSLSESSPRPSFWERSHLALDRFRFRGRPYRGGSRWSRGRGVGERGGKPGCRPPLGGGAGSGFSSSQSWREPSPPRKSSKSFGRSPSRKQNYSSKNENCVEETFEDLLLKYKQIQLELECINKDEKLALSSKEENVQEDPKTLNFEDQTSTDNVSITKDSSKEVAPEEKTQVKTFQAFELKPLRQKLTLPGDKNRLKKVKDGAKPLSLKSDTTDSSQGNGIKYFS

SEQ ID NO: 101839 - protein, 481 aa, Homo sapiens
  Payload ID: 20291
  Gene Name: zinc finger, C3HC-type containing 1
  Uniprot ID: Q86WB0
  ENSP ID: ENSP00000309301
MRGLPRKREAWTQPHPLEALYESLRVLEKDTSATSQSVNGSPQAEQPSLESTSKEAFFSRVETFSSLKWAGKPFELSPLVCAKYGWVTVECDMLKCSSCQAFLCASLQPAFDFDRYKQRCAELKKALCTAHEKFCFWPDSPSPDRFGMLPLDEPAILVSEFLDRFQSLCHLDLQLPSLRPEDLKTMCLTEDKISLLLHLLEDELDHRTDERKTTIKLGSDIQVHVTACILSVCGWACSSSLESMQLSLITCSQCMRKVGLWGFQQIESSMTDLDASFGLTSSPIPGLEGRPERLPLVPESPRRMMTRSQDATFSPGSEQAEKSPGPIVSRTRSWDSSSPVDRPEPEAASPTTRTRPVTRSMGTGDTPGLEVPSSPLRKAKRARLCSSSSSDTSSRSFFDPTSQHRDWCPWVNITLGKESRENGGTEPDASAPAEPGWKAVLTILLAHKQSSQPAETDSMSLSEKSRKVFRIFRQWESLCSC

SEQ ID NO: 101840 - protein, 502 aa, Homo sapiens
  Payload ID: 20291
  Gene Name: zinc finger, C3HC-type containing 1
  Uniprot ID: Q86WB0
  ENSP ID: ENSP00000351052
MAAPCEGQAFAVGVEKNWGAVVRSPEGTPQKIRQLIDEGIAPEEGGVDAKDTSATSQSVNGSPQAEQPSLESTSKEAFFSRVETFSSLKWAGKPFELSPLVCAKYGWVTVECDMLKCSSCQAFLCASLQPAFDFDRYKQRCAELKKALCTAHEKFCFWPDSPSPDRFGMLPLDEPAILVSEFLDRFQSLCHLDLQLPSLRPEDLKTMCLTEDKISLLLHLLEDELDHRTDERKTTIKLGSDIQVHVTACILSVCGWACSSSLESMQLSLITCSQCMRKVGLWGFQQIESSMTDLDASFGLTSSPIPGLEGRPERLPLVPESPRRMMTRSQDATFSPGSEQAEKSPGPIVSRTRSWDSSSPVDRPEPEAASPTTRTRPVTRSMGTGDTPGLEVPSSPLRKAKRARLCSSSSSDTSSRSFFDPTSQHRDWCPWVNITLGKESRENGGTEPDASAPAEPGWKAVLTILLAHKQSSQPAETDSMSLSEKSRKVFRIFRQWESLCSC

SEQ ID NO: 101841 - protein, 431 aa, Homo sapiens
  Payload ID: 20291
  Gene Name: zinc finger, C3HC-type containing 1
  Uniprot ID: Q86WB0
  ENSP ID: ENSP00000353933
MAAPCEGQAFAVGVEKNWGAVVRSPEGTPQKIRQLIDEGIAPEEGGVDAKDTSATSQSVNGSPQAEQPSLESTSKEAFFSRVETFSSLKWAGKPFELSPLVCAKYGWVTVECDMLKCSSCQAFLCASLQPAFDFDRYKQRCAELKKALCTAHEKFCFWPDSPSPDRFGMLPLDEPAILVSEFLDRFQSLCHLDLQLPSLRPEDLKTMCLTEDKISLLLHLLEDELDHRTDERKTTIKLGSDIQVHVTACILSVCGWACSSSLESMQLSLITCSQCMRKVGLWGFQQIESSMTDLDASFGLTSSPIPGLEGRPERLPLVPESPRRMMTRSQDATFSPGSEQDTSSRSFFDPTSQHRDWCPWVNITLGKESRENGGTEPDASAPAEPGWKAVLTILLAHKQSSQPAETDSMSLSEKSRKVFRIFRQWESLCSC

SEQ ID NO: 101842 - protein, 95 aa, Homo sapiens
  Payload ID: 20291
  Gene Name: zinc finger, C3HC-type containing 1
  ENSP ID: ENSP00000417217
MAAPCEGQAFAVGVEKNWGAVVRSPEGTPQKIRQLIDEGIAPEEGGVDAKDTSATSQSVNGSPQAEQPSLESTSKEAFFSRVETFSYFDQSPICA

SEQ ID NO: 101843 - protein, 49 aa, Homo sapiens
  Payload ID: 20291
  Gene Name: zinc finger, C3HC-type containing 1
  ENSP ID: ENSP00000417682
MAAPCEGQAFAVGVEKNWGAVVRSPEGTPQKIRQLIDEGIAPEEGGVDA

SEQ ID NO: 101844 - protein, 459 aa, Homo sapiens
  Payload ID: 20291
  Gene Name: zinc finger, C3HC-type containing 1
  ENSP ID: ENSP00000418533
MAAPCEGQAFAVGVEKNWGAVVRSPEGTPQKIRQLIDEGIAPEEGGVDAKDTSATSQSVNGSPQAEQPSLESTSKEAFFSRVETFSSLKWAGKPFELSPLVCAKYGWVTVECDMLKCSSCQAFLCASLQPAFDFDRYKQRCAELKKALCTAHEKFCFWPDSPSPDRFGMLPLDEPAILVSEFLDRFQSLCHLDLQLPSLRPEDLKTMCLTEDKISLLLHLLEDELDHRTDERKTTIKLGSDIQVHVTACILSVCGWACSSPIPGLEGRPERLPLVPESPRRMMTRSQDATFSPGSEQAEKSPGPIVSRTRSWDSSSPVDRPEPEAASPTTRTRPVTRSMGTGDTPGLEVPSSPLRKAKRARLCSSSSSDTSSRSFFDPTSQHRDWCPWVNITLGKESRENGGTEPDASAPAEPGWKAVLTILLAHKQSSQPAETDSMSLSEKSRKVFRIFRQWESLCSC

SEQ ID NO: 101845 - protein, 53 aa, Homo sapiens
  Payload ID: 20291
  Gene Name: zinc finger, C3HC-type containing 1
  ENSP ID: ENSP00000419509
MAAPCEGQAFAVGVEKNWGAVVRSPEGTPQKIRQLIDEGIAPEEGGVDATTPA

SEQ ID NO: 101846 - protein, 50 aa, Homo sapiens
  Payload ID: 20291
  Gene Name: zinc finger, C3HC-type containing 1
  ENSP ID: ENSP00000420068
MAAPCEGQAFAVGVEKNWGAVVRSPEGTPQKIRQLIDEGIAPEEGGVDAP

SEQ ID NO: 101847 - protein, 201 aa, Homo sapiens
  Payload ID: 20292
  Gene Name: zinc finger, C4H2 domain containing
  Uniprot ID: Q9NQZ6
  ENSP ID: ENSP00000338650
MEKIKARLKAEFEALESEERHLKEYKQEMDLLLQEKMAHVEELRLIHADINVMENTIKQSENDLNKLLESTRRLHDEYKPLKEHVDALRMTLGLQRLPDLCEEEEKLSLDYFEKQKAEWQTEPQEPPIPESLAAAAAAAQQLQVARKQDTRQTATFRQQPPPMKACLSCHQQIHRNAPICPLCKAKSRSRNPKKPKRKQDE

SEQ ID NO: 101848 - protein, 224 aa, Homo sapiens
  Payload ID: 20292
  Gene Name: zinc finger, C4H2 domain containing
  Uniprot ID: Q9NQZ6
  ENSP ID: ENSP00000363972
MADEQEIMCKLESIKEIRNKTLQMEKIKARLKAEFEALESEERHLKEYKQEMDLLLQEKMAHVEELRLIHADINVMENTIKQSENDLNKLLESTRRLHDEYKPLKEHVDALRMTLGLQRLPDLCEEEEKLSLDYFEKQKAEWQTEPQEPPIPESLAAAAAAAQQLQVARKQDTRQTATFRQQPPPMKACLSCHQQIHRNAPICPLCKAKSRSRNPKKPKRKQDE

SEQ ID NO: 101849 - protein, 176 aa, Homo sapiens
  Payload ID: 20292
  Gene Name: zinc finger, C4H2 domain containing
  Uniprot ID: Q9NQZ6
  ENSP ID: ENSP00000399126
MADEQEIMCKLESIKEIRNKTLQMEKIKARLKAEFEALESEERHLKEYKQEMDLLLQEKMAHVEELRLIHADINVMENTIKQSENDLNKLLESTRRLHDEYKPLKEHVDALRMTLGLQRLPDLCEEEEKLSLEPACHVTSKFTGMHLYALFARPRVGPGTPKSRNGSRMNKEREST

SEQ ID NO: 101850 - protein, 531 aa, Homo sapiens
  Payload ID: 20293
  Gene Name: zinc finger, CCCH-type with G patch domain
  Uniprot ID: Q8N5A5
  ENSP ID: ENSP00000332013
MDEESLESALQTYRAQLQQVELALGAGLDSSEQADLRQLQGDLKELIELTEASLVSVRKSSLLAALDEERPGRQEDAEYQAFREAITEAVEAPAAARGSGSETVPKAEAGPESAAGGQEEEEGEDEEELSGTKVSAPYYSSWGTLEYHNAMVVGTEEAEDGSAGVRVLYLYPTHKSLKPCPFFLEGKCRFKENCRFSHGQVVSLDELRPFQDPDLSSLQAGSACLAKHQDGLWHAARITDVDNGYYTVKFDSLLLREAVVEGDGILPPLRTEATESDSDSDGTGDSSYARVVGSDAVDSAQSSALCPSLAVVGSDAVDSGTCSSAFAGWEVHTRGIGSRLLTKMGYEFGKGLGRHAEGRVEPIHAVVLPRGKSLDQCVETLQKQTRVGKAGTNKPPRCRGRGARPGGRPAPRNVFDFLNEKLQGQAPGALEAGAAPAGRRSKDMYHASKSAKRALSLRLFQTEEKIERTQRDIRSIQEALARNAGRHSVASAQLQEKLAGAQRQLGQLRAQEAGLQQEQRKADTHKKMTEF

SEQ ID NO: 101851 - protein, 511 aa, Homo sapiens
  Payload ID: 20293
  Gene Name: zinc finger, CCCH-type with G patch domain
  Uniprot ID: Q8N5A5
  ENSP ID: ENSP00000348242
MDEESLESALQTYRAQLQQVELALGAGLDSSEQADLRQLQGDLKELIELTEASLVSVRKSSLLAALDEERPGRQEDAEYQAFREAITEAVEAPAAARGSGSETVPKAEAGPESAAGGQEEEEGEDEEELSGTKVSAPYYSSWGTLEYHNAMVVGTEEAEDGSAGVRVLYLYPTHKSLKPCPFFLEGKCRFKENCRFSHGQVVSLDELRPFQDPDLSSLQAGSACLAKHQDGLWHAARITDVDNGYYTVKFDSLLLREAVVEGDGILPPLRTEATESDSDSDGTGDSSYARVVGSDAVDSGTCSSAFAGWEVHTRGIGSRLLTKMGYEFGKGLGRHAEGRVEPIHAVVLPRGKSLDQCVETLQKQTRVGKAGTNKPPRCRGRGARPGGRPAPRNVFDFLNEKLQGQAPGALEAGAAPAGRRSKDMYHASKSAKRALSLRLFQTEEKIERTQRDIRSIQEALARNAGRHSVASAQLQEKLAGAQRQLGQLRAQEAGLQQEQRKADTHKKMTEF

SEQ ID NO: 101852 - protein, 502 aa, Homo sapiens
  Payload ID: 20293
  Gene Name: zinc finger, CCCH-type with G patch domain
  Uniprot ID: Q8N5A5
  ENSP ID: ENSP00000349634
MDEESLESALQTYRAQLQQVELALGAGLDSSEQADLRQLQGDLKELIELTEASLVSVRKSSLLAALDEERPGRQEDAEYQAFREAITEAVEAPAAARGSGSETVPKAEAGPESAAGGQEEEEGEDEEELSGTKVSAPYYSSWGTLEYHNAMVVGTEEAEDGSAGVRVLYLYPTHKSLKPCPFFLEGKCRFKENCRFSHGQVVSLDELRPFQDPDLSSLQAGSACLAKHQDGLWHAARITDVDNGYYTVKFDSLLLREAVVEGDGILPPLRTEATESDSDSDVVGSDAVDSGTCSSAFAGWEVHTRGIGSRLLTKMGYEFGKGLGRHAEGRVEPIHAVVLPRGKSLDQCVETLQKQTRVGKAGTNKPPRCRGRGARPGGRPAPRNVFDFLNEKLQGQAPGALEAGAAPAGRRSKDMYHASKSAKRALSLRLFQTEEKIERTQRDIRSIQEALARNAGRHSVASAQLQEKLAGAQRQLGQLRAQEAGLQQEQRKADTHKKMTEF

SEQ ID NO: 101853 - protein, 511 aa, Homo sapiens; identical to SEQ ID NO: 101851
  Payload ID: 20293
  Gene Name: zinc finger, CCCH-type with G patch domain
  Uniprot ID: Q8N5A5
  ENSP ID: ENSP00000358984

SEQ ID NO: 101854 - protein, 511 aa, Homo sapiens; identical to SEQ ID NO: 101851
  Payload ID: 20293
  Gene Name: zinc finger, CCCH-type with G patch domain
  Uniprot ID: Q8N5A5
  ENSP ID: ENSP00000391176

SEQ ID NO: 101855 - protein, 97 aa, Homo sapiens
  Payload ID: 20293
  Gene Name: zinc finger, CCCH-type with G patch domain
  ENSP ID: ENSP00000403966
MDEESLESALQTYRAQLQQVELALGAGLDSSEQADLRQLQGDLKELIELTEASLVSVRKSSLLAALDEERPGRQEDAEYQAFREAITEAVEAPAAAR

SEQ ID NO: 101856 - protein, 170 aa, Homo sapiens
  Payload ID: 20294
  Gene Name: zinc finger, CCHC domain containing 10
  Uniprot ID: Q8TBK6
  ENSP ID: ENSP00000324274
MATPMHRLIARRQAEANKQHVRCQKCLEFGHWTYECTGKRKYLHRPSRTAELKKALKEKENRLLLQQSIGETNVERKAKKKRSKSVTSSSSSSSDSSASDSSSESEETSTSSSSEDSDTDESSSSSSSSASSTTSSSSSDSDSDSSSSSSSSTSTDSSSDDEPPKKKKKK

SEQ ID NO: 101857 - protein, 186 aa, Homo sapiens
  Payload ID: 20294
  Gene Name: zinc finger, CCHC domain containing 10
  ENSP ID: ENSP00000347533
MATPMHRLIARRQAFDTELQPVKTFWILIQPSIVISEANKQHVRCQKCLEFGHWTYECTGKRKYLHRPSRTAELKKALKEKENRLLLQQSIGETNVERKAKKKSSSSSSSDSSASDSSSESEETSTSSSSEDSDTDESSSSSSSSASSTTSSSSSDSDSDSSSSSSSSTSTDSSSDDEPPKKKKKK

SEQ ID NO: 101858 - protein, 92 aa, Homo sapiens
  Payload ID: 20294
  Gene Name: zinc finger, CCHC domain containing 10
  ENSP ID: ENSP00000421071
MATPMHRLIARRQAEANKQHVRCQKCLEFGHWTYECTGKRKYLHRPSRTAELKKALKEKENRLLLQQRSFFPPRVYQHWRNQCRKKGQEKKV

SEQ ID NO: 101859 - protein, 114 aa, Homo sapiens
  Payload ID: 20294
  Gene Name: zinc finger, CCHC domain containing 10
  ENSP ID: ENSP00000422111
MATPMHRLIARRQAFDTELQPVKTFWILIQPSIVISEANKQHVRCQKCLEFGHWTYECTGKRKYLHRPSRTAELKKALKEKENRLLLQQRSFFPPRVYQHWRNQCRKKGQEKKV

SEQ ID NO: 101860 - protein, 192 aa, Homo sapiens
  Payload ID: 20294
  Gene Name: zinc finger, CCHC domain containing 10
  Uniprot ID: Q8TBK6
  ENSP ID: ENSP00000423276
MATPMHRLIARRQAFDTELQPVKTFWILIQPSIVISEANKQHVRCQKCLEFGHWTYECTGKRKYLHRPSRTAELKKALKEKENRLLLQQSIGETNVERKAKKKRSKSVTSSSSSSSDSSASDSSSESEETSTSSSSEDSDTDESSSSSSSSASSTTSSSSSDSDSDSSSSSSSSTSTDSSSDDEPPKKKKKK

SEQ ID NO: 101861 - protein, 72 aa, Homo sapiens
  Payload ID: 20294
  Gene Name: zinc finger, CCHC domain containing 10
  ENSP ID: ENSP00000427359
MATPMHRLIARRQAFDTELQPVKTFWILIQPSIVIRDSVAQAGLKLLSSGDPALASQSARIIGVSHCVQPHT

SEQ ID NO: 101862 - protein, 156 aa, Homo sapiens
  Payload ID: 20294
  Gene Name: zinc finger, CCHC domain containing 10
  ENSP ID: ENSP00000427430
MATPMHRLIARRQAEANKQHVRCQKCLEFGHWTYECTGKRKYLHRPSRTAELKKALKEKENRLLLQQRSKSVTSSSSSSSDSSASDSSSESEETSTSSSSEDSDTDESSSSSSSSASSTTSSSSSDSDSDSSSSSSSSTSTDSSSDDEPPKKKKKK

SEQ ID NO: 101863 - protein, 1645 aa, Homo sapiens
  Payload ID: 20295
  Gene Name: zinc finger, CCHC domain containing 11
  ENSP ID: ENSP00000257177
MEESKTLKSENHEPKKNVICEESKAVQVIGNQTLKARNDKSVKEIENSSPNRNSSKKNKQNDICIEKTEVKSCKVNAANLPGPKDLGLVLRDQSHCKAKKFPNSPVKAEKATISQAKSEKATSLQAKAEKSPKSPNSVKAEKASSYQMKSEKVPSSPAEAEKGPSLLLKDMRQKTELQQIGKKIPSSFTSVDKVNIEAVGGEKCALQNSPRSQKQQTCTDNTGDSDDSASGIEDVSDDLSKMKNDESNKENSSEMDYLENATVIDESALTPEQRLGLKQAEERLERDHIFRLEKRSPEYTNCRYLCKLCLIHIENIQGAHKHIKEKRHKKNILEKQEESELRSLPPPSPAHLAALSVAVIELAKEHGITDDDLRVRQEIVEEMSKVITTFLPECSLRLYGSSLTRFALKSSDVNIDIKFPPKMNHPDLLIKVLGILKKNVLYVDVESDFHAKVPVVVCRDRKSGLLCRVSAGNDMACLTTDLLTALGKIEPVFIPLVLAFRYWAKLCYIDSQTDGGIPSYCFALMVMFFLQQRKPPLLPCLLGSWIEGFDPKRMDDFQLKGIVEEKFVKWECNSSSATEKNSIAEENKAKADQPKDDTKKTETDNQSNAMKEKHGKSPLALETPNRVSLGQLWLELLKFYTLDFALEEYVICVRIQDILTRENKNWPKRRIAIEDPFSVKRNVARSLNSQLVYEYVVERFRAAYRYFACPQTKGGNKSTVDFKKREKGKISNKKPVKSNNMATNGCILLGETTEKINAEREQPVQCDEMDCTSQRCIIDNNNLLVNELDFADHGQDSSSLSTSKSSEIEPKLDKKQDDLAPSETCLKKELSQCNCIDLSKSPDPDKSTGTDCRSNLETESSHQSVCTDTSATSCNCKATEDASDLNDDDNLPTQELYYVFDKFILTSGKPPTIVCSICKKDGHSKNDCPEDFRKIDLKPLPPMTNRFREILDLVCKRCFDELSPPCSEQHNREQILIGLEKFIQKEYDEKARLCLFGSSKNGFGFRDSDLDICMTLEGHENAEKLNCKEIIENLAKILKRHPGLRNILPITTAKVPIVKFEHRRSGLEGDISLYNTLAQHNTRMLATYAAIDPRVQYLGYTMKVFAKRCDIGDASRGSLSSYAYILMVLYFLQQRKPPVIPVLQEIFDGKQIPQRMVDGWNAFFFDKTEELKKRLPSLGKNTESLGELWLGLLRFYTEEFDFKEYVISIRQKKLLTTFEKQWTSKCIAIEDPFDLNHNLGAGVSRKMTNFIMKAFINGRKLFGTPFYPLIGREAEYFFDSRVLTDGELAPNDRCCRVCGKIGHYMKDCPKRKSSLLFRLKKKDSEEEKEGNEEEKDSRDVLDPRDLHDTRDFRDPRDLRCFICGDAGHVRRECPEVKLARQRNSSVAAAQLVRNLVNAQQVAGSAQQQGDQSIRTRQSSECSESPSYSPQPQPFPQNSSQSAAITQPSSQPGSQPKLGPPQQGAQPPHQVQMPLYNFPQSPPAQYSPMHNMGLLPMHPLQIPAPSWPIHGPVIHSAPGSAPSNIGLNDPSIIFAQPAARPVAIPNTSHDGHWPRTVAPNSLVNSGAVGNSEPGFRGLTPPIPWEHAPRPHFPLVPASWPYGLHQNFMHQGNARFQPNKPFYTQDRCATRRCRERCPHPPRGNVSE

SEQ ID NO: 101864 - protein, 309 aa, Homo sapiens
  Payload ID: 20295
  Gene Name: zinc finger, CCHC domain containing 11
  ENSP ID: ENSP00000348063
MEESKTLKSENHEPKKNVICEESKAVQVIGNQTLKARNDKSVKEIENSSPNRNSSKKNKQNDICIEKTEVKSCKVNAANLPGPKDLGLVLRDQSHCKAKKFPNSPVKAEKATISQAKSEKATSLQAKAEKSPKSPNSVKAEKASSYQMKSEKVPSSPAEAEKGPSLLLKDMRQKTELQQIGKKIPSSFTSVDKVNIEAVGGEKCALQNSPRSQKQQTCTDNTGDSDDSASGIEDVSDDLSKMKNDESNKENSSEMDYLENATVIDESALTPEQRLGLKQAEERLERDHIFRLEKVYYVVLVIWGEMCVS

SEQ ID NO: 101865 - protein, 1644 aa, Homo sapiens
  Payload ID: 20295
  Gene Name: zinc finger, CCHC domain containing 11
  Uniprot ID: Q5TAX3
  ENSP ID: ENSP00000360599
MEESKTLKSENHEPKKNVICEESKAVQVIGNQTLKARNDKSVKEIENSSPNRNSSKKNKQNDICIEKTEVKSCKVNAANLPGPKDLGLVLRDQSHCKAKKFPNSPVKAEKATISQAKSEKATSLQAKAEKSPKSPNSVKAEKASSYQMKSEKVPSSPAEAEKGPSLLLKDMRQKTELQQIGKKIPSSFTSVDKVNIEAVGGEKCALQNSPRSQKQQTCTDNTGDSDDSASGIEDVSDDLSKMKNDESNKENSSEMDYLENATVIDESALTPEQRLGLKQAEERLERDHIFRLEKRSPEYTNCRYLCKLCLIHIENIQGAHKHIKEKRHKKNILEKQEESELRSLPPPSPAHLAALSVAVIELAKEHGITDDDLRVRQEIVEEMSKVITTFLPECSLRLYGSSLTRFALKSSDVNIDIKFPPKMNHPDLLIKVLGILKKNVLYVDVESDFHAKVPVVVCRDRKSGLLCRVSAGNDMACLTTDLLTALGKIEPVFIPLVLAFRYWAKLCYIDSQTDGGIPSYCFALMVMFFLQQRKPPLLPCLLGSWIEGFDPKRMDDFQLKGIVEEKFVKWECNSSSATEKNSIAEENKAKADQPKDDTKKTETDNQSNAMKEKHGKSPLALETPNRVSLGQLWLELLKFYTLDFALEEYVICVRIQDILTRENKNWPKRRIAIEDPFSVKRNVARSLNSQLVYEYVVERFRAAYRYFACPQTKGGNKSTVDFKKREKGKISNKKPVKSNNMATNGCILLGETTEKINAEREQPVQCDEMDCTSQRCIIDNNNLLVNELDFADHGQDSSSLSTSKSSEIEPKLDKKQDDLAPSETCLKKELSQCNCIDLSKSPDPDKSTGTDCRSNLETESSHQSVCTDTSATSCNCKATEDASDLNDDDNLPTQELYYVFDKFILTSGKPPTIVCSICKKDGHSKNDCPEDFRKIDLKPLPPMTNRFREILDLVCKRCFDELSPPCSEQHNREQILIGLEKFIQKEYDEKARLCLFGSSKNGFGFRDSDLDICMTLEGHENAEKLNCKEIIENLAKILKRHPGLRNILPITTAKVPIVKFEHRRSGLEGDISLYNTLAQHNTRMLATYAAIDPRVQYLGYTMKVFAKRCDIGDASRGSLSSYAYILMVLYFLQQRKPPVIPVLQEIFDGKQIPQRMVDGWNAFFFDKTEELKKRLPSLGKNTESLGELWLGLLRFYTEEFDFKEYVISIRQKKLLTTFEKQWTSKCIAIEDPFDLNHNLGAGVSRKMTNFIMKAFINGRKLFGTPFYPLIGREAEYFFDSRVLTDGELAPNDRCCRVCGKIGHYMKDCPKRKSLLFRLKKKDSEEEKEGNEEEKDSRDVLDPRDLHDTRDFRDPRDLRCFICGDAGHVRRECPEVKLARQRNSSVAAAQLVRNLVNAQQVAGSAQQQGDQSIRTRQSSECSESPSYSPQPQPFPQNSSQSAAITQPSSQPGSQPKLGPPQQGAQPPHQVQMPLYNFPQSPPAQYSPMHNMGLLPMHPLQIPAPSWPIHGPVIHSAPGSAPSNIGLNDPSIIFAQPAARPVAIPNTSHDGHWPRTVAPNSLVNSGAVGNSEPGFRGLTPPIPWEHAPRPHFPLVPASWPYGLHQNFMHQGNARFQPNKPFYTQDRCATRRCRERCPHPPRGNVSE

SEQ ID NO: 101866 - protein, 343 aa, Homo sapiens
  Payload ID: 20295
  Gene Name: zinc finger, CCHC domain containing 11
  ENSP ID: ENSP00000432328
MEESKTLKSENHEPKKNVICEESKAVQVIGNQTLKARNDKSVKEIENSSPNRNSSKKNKQNDICIEKTEVKSCKVNAANLPGPKDLGLVLRDQSHCKAKKFPNSPVKAEKATISQAKSEKATSLQAKAEKSPKSPNSVKAEKASSYQMKSEKVPSSPAEAEKGPSLLLKDMRQKTELQQIGKKIPSSFTSVDKVNIEAVGGEKCALQNSPRSQKQQTCTDNTGDSDDSASGIEDVSDDLSKMKNDESNKENSSEMDYLENATVIDESALTPEQRLGLKQAEERLERDHIFRLEKRSPEYTNCRYLCKLCLIHIENIQGAHKHIKEKRHKKNILNVHLGCMAHL

SEQ ID NO: 101867 - protein, 164 aa, Homo sapiens
  Payload ID: 20295
  Gene Name: zinc finger, CCHC domain containing 11
  ENSP ID: ENSP00000432475
  MOD_RES (1)..(1): Any amino acid
XQIPAPSWPIHGPVIHSAPGSAPSNIGLNDPSIIFAQPAARPVAIPNTSHDGHWPRTVAPNSLVNSGAVGNSEPGFRGLTPPIPWEHAPRPHFPLVPASWPYGLHQNFMHQGNARFQPNKPFYTQGKKAAIVEVECSRRKTAKIWRPEFKFPCYHLWLWEHHTY

SEQ ID NO: 101868 - protein, 1203 aa, Homo sapiens
  Payload ID: 20295
  Gene Name: zinc finger, CCHC domain containing 11
  ENSP ID: ENSP00000433486
MEESKTLKSENHEPKKNVICEESKAVQVIGNQTLKARNDKSVKEIENSSPNRNSSKKNKQNDICIEKTEVKSCKVNAANLPGPKDLGLVLRDQSHCKAKKFPNSPVKAEKATISQAKSEKATSLQAKAEKSPKSPNSVKAEKASSYQMKSEKVPSSPAEAEKGPSLLLKDMRQKTELQQIGKKIPSSFTSVDKVNIEAVGGEKCALQNSPRSQKQQTCTDNTGDSDDSASGIEDVSDDLSKMKNDESNKENSSEMDYLENATVIDESALTPEQRLGLKQAEERLERDHIFRLEKRSPEYTNCRYLCKLCLIHIENIQGAHKHIKEKRHKKNILEKQEESELRSLPPPSPAHLAALSVAVIELAKEHGITDDDLRVRQEIVEEMSKVITTFLPECSLRLYGSSLTRFALKSSDVNIDIKFPPKMNHPDLLIKVLGILKKNVLYVDVESDFHAKVPVVVCRDRKSGLLCRVSAGNDMACLTTDLLTALGKIEPVFIPLVLAFRYWAKLCYIDSQTDGGIPSYCFALMVMFFLQQRKPPLLPCLLGSWSPLALETPNRVSLGQLWLELLKFYTLDFALEEYVICVRIQDILTRENKNWPKRRIAIEDPFSVKRNVARSLNSQLVYEYVVERFRAAYRYFACPQTKGGNKSTVDFKKREKGKISNKKPVKSNNMATNGCILLGETTEKINAEREQPVQCDEMDCTSQRCIIDNNNLLVNELDFADHGQDSSSLSTSKSSEIEPKLDKKQDDLAPSETCLKKELSQCNCIDLSKSPDPDKSTGTDCRSNLETESSHQSVCTDTSATSCNCKATEDASDLNDDDNLPTQELYYVFDKFILTSGKPPTIVCSICKKDGHSKNDCPEDFRKIDLKPLPPMTNRFREILDLVCKRCFDELSPPCSEQHNREQILIGLEKFIQKEYDEKARLCLFGSSKNGFGFRDSDLDICMTLEGHENAEKLNCKEIIENLAKILKRHPGLRNILPITTAKVPIVKFEHRRSGLEGDISLYNTLAQHNTRMLATYAAIDPRVQYLGYTMKVFAKRCDIGDASRGSLSSYAYILMVLYFLQQRKPPVIPVLQEIFDGKQIPQRMVDGWNAFFFDKTEELKKRLPSLGKNTESLGELWLGLLRFYTEEFDFKEYVISIRQKKLLTTFEKQWTSKCIAIEDPFDLNHNLGAGVSRKMTNFIMKAFINGRKLFGTPFYPLIGREA

SEQ ID NO: 101869 - protein, 337 aa, Homo sapiens
  Payload ID: 20295
  Gene Name: zinc finger, CCHC domain containing 11
  ENSP ID: ENSP00000433711
  MOD_RES (1)..(1): Any amino acid
XIPQRMVDGWNAFFFDKTEELKKRLPSLGKNTESLGELWLGLLRFYTEEFDFKEYVISIRQKKLLTTFEKQWTSKCIAIEDPFDLNHNLGAGVSRKMTNFIMKAFINGRKLFGTPFYPLIGREAEYFFDSRVLTDGELAPNDRCCRVCGKIGHYMKDCPKRKRLKKKDSEEEKEGNEEEKDSRDVLDPRDLHDTRDFRDPRDLRCFICGDAGHVRRECPEVKLARQRNSSVAAAQLVRNLVNAQQVAGSAQQQGDQSIRTRQSSECSESPSYSPQPQPFPQNSSQSAAITQPSSQPGSQPKLGPPQQGAQPPHQVQMPLYNFPQSPPAQYSPMHNMG

SEQ ID NO: 101870 - protein, 87 aa, Homo sapiens
  Payload ID: 20295
  Gene Name: zinc finger, CCHC domain containing 11
  ENSP ID: ENSP00000434367
MEESKTLKSENHEPKKNVICEESKAVQVIGNQTLKARNDKSVKEIENSSPNRNSSKKNKQNDICIEKTEVKSCKVNAANLPGPKDLG

SEQ ID NO: 101871 - protein, 105 aa, Homo sapiens
  Payload ID: 20295
  Gene Name: zinc finger, CCHC domain containing 11
  ENSP ID: ENSP00000434674
  MOD_RES (1)..(1): Any amino acid
XDGHWPRTVAPNSLVNSGAVGNSEPGFRGLTPPIPWEHAPRPHFPLVPASWPYGLHQNFMHQGNARFQPNKPFYTQAGLPMHSNQPILLSQGYPYLNVSYIQQKK

SEQ ID NO: 101872 - protein, 906 aa, Homo sapiens
  Payload ID: 20295
  Gene Name: zinc finger, CCHC domain containing 11
  ENSP ID: ENSP00000435256
MKNDESNKENSSEMDYLENATVIDESALTPEQRLGLKQAEERLERDHIFRLEKRSPEYTNCRYLCKLCLIHIENIQGAHKHIKEKRHKKNILEKQEESELRSLPPPSPAHLAALSVAVIELAKEHGITDDDLRVRQEIVEEMSKVITTFLPECSLRLYGSSLTRFALKSSDVNIDIKFPPKMNHPDLLIKVLGILKKNVLYVDVESDFHAKVPVVVCRDRKSGLLCRVSAGNDMACLTTDLLTALGKIEPVFIPLVLAFRYWAKLCYIDSQTDGGIPSYCFALMVMFFLQQRKPPLLPCLLGSWIEGFDPKRMDDFQLKGIVEEKFVKWECNSSSATEKNSIAEENKAKADQPKDDTKKTETDNQSNAMKEKHGKSPLALETPNRVSLGQLWLELLKFYTLDFALEEYVICVRIQDILTRENKNWPKRRIAIEDPFSVKRNVARSLNSQLVYEYVVERFRAAYRYFACPQTKGGNKSTVDFKKREKGKISNKKPVKSNNMATNGCILLGETTEKINAEREQPVQCDEMDCTSQRCIIDNNNLLVNELDFADHGQDSSSLSTSKSSEIEPKLDKKQDDLAPSETCLKKELSQCNCIDLSKSPDPDKSTGTDCRSNLETESSHQSVCTDTSATSCNCKATEDASDLNDDDNLPTQELYYVFDKFILTSGKPPTIVCSICKKDGHSKNDCPEDFRKIDLKPLPPMTNRFREILDLVCKRCFDELSPPCSEQHNREQILIGLEKFIQKEYDEKARLCLFGSSKNGFGFRDSDLDICMTLEGHENAEKLNCKEIIENLAKILKRHPGLRNILPITTAKVPIVKFEHRRSGLEGDISLYNTLAQHNTRMLATYAAIDPRVQYLGYTMKVFAKIFDGKQIPQRMVDGWNAFFFDKTEELKKRLPSLGKNTESL

SEQ ID NO: 101873 - protein, 77 aa, Homo sapiens
  Payload ID: 20295
  Gene Name: zinc finger, CCHC domain containing 11
  ENSP ID: ENSP00000435568
MEESKTLKSENHEPKKNVICEESKAVQVIGNQTLKARNDKSVKEIENSSPNRNSSKKNKQNDICIEKTEVKSCKVNA

SEQ ID NO: 101874 - protein, 338 aa, Homo sapiens
  Payload ID: 20295
  Gene Name: zinc finger, CCHC domain containing 11
  ENSP ID: ENSP00000435700
GWNAFFFDKTEELKKRLPSLGKNTESLGELWLGLLRFYTEEFDFKEYVISIRQKKLLTTFEKQWTSKCIAIEDPFDLNHNLGAGVSRKMTNFIMKAFINGRKLFGTPFYPLIGREAEYFFDSRVLTDGELAPNDRCCRVCGKIGHYMKDCPKRKRLKKKDSEEEKEGNEEEKDSRDVLDPRDLHDTRDFRDPRDLRCFICGDAGHVRRECPEVKLARQRNSSVAAAQLVRNLVNAQQVAGSAQQQGDQSIRTRQSSECSESPSYSPQPQPFPQNSSQSAAITQPSSQPGSQPKLGPPQQGAQPPHQIPAPSWPIHGPVIHSAPGSAPSNIGLNDPSII

SEQ ID NO: 101875 - protein, 108 aa, Homo sapiens
  Payload ID: 20295
  Gene Name: zinc finger, CCHC domain containing 11
  ENSP ID: ENSP00000436810
ARPVAIPNTSHDGHWPRTVAPNSLVNSGAVGNSEPGFRGLTPPIPWEHAPRPHFPLVPASWPYGLHQNFMHQGNARFQPNKPFYTQDRCATRRCRERCPHPPRGNVSE

SEQ ID NO: 101876 - protein, 151 aa, Homo sapiens
  Payload ID: 20295
  Gene Name: zinc finger, CCHC domain containing 11
  ENSP ID: ENSP00000437091
  MOD_RES (1)..(1): Any amino acid
XQPQPFPQNSSQSAAITQPSSQPGSQPKLGPPQQGAQPPHQPAARPVAIPNTSHDGHWPRTVAPNSLVNSGAVGNSEPGFRGLTPPIPWEHAPRPHFPLVPASWPYGLHQNFMHQGNARFQPNKPFYTQDRCATRRCRERCPHPPRGNVSE

SEQ ID NO: 101877 - protein, 402 aa, Homo sapiens
  Payload ID: 20296
  Gene Name: zinc finger, CCHC domain containing 12
  Uniprot ID: Q6PEW1
  ENSP ID: ENSP00000308921
MASIIARVGNSRRLNAPLPPWAHSMLRSLGRSLGPIMASMADRNMKLFSGRVVPAQGEETFENWLTQVNGVLPDWNMSEEEKLKRLMKTLRGPAREVMRVLQATNPNLSVADFLRAMKLVFGESESSVTAHGKFFNTLQAQGEKASLYVIRLEVQLQNAIQAGIIAEKDANRTRLQQLLLGGELSRDLRLRLKDFLRMYANEQERLPNFLELIRMVREEEDWDDAFIKRKRPKRSESMVERAVSPVAFQGSPPIVIGSADCNVIEIDDTLDDSDEDVILVESQDPPLPSWGAPPLRDRARPQDEVLVIDSPHNSRAQFPSTSGGSGYKNNGPGEMRRARKRKHTIRCSYCGEEGHSKETCDNESDKAQVFENLIITLQELTHTEMERSRVAPGEYNDFSEPL

SEQ ID NO: 101878 - protein, 166 aa, Homo sapiens
  Payload ID: 20297
  Gene Name: zinc finger, CCHC domain containing 13
  Uniprot ID: Q8WW36
  ENSP ID: ENSP00000345633
MSSKDFFACGHSGHWARGCPRGGAGGRRGGGHGRGSQCGSTTLSYTCYCCGESGRNAKNCVLLGNICYNCGRSGHIAKDCKDPKRERRQHCYTCGRLGHLARDCDRQKEQKCYSCGKLGHIQKDCAQVKCYRCGEIGHVAINCSKARPGQLLPLRQIPTSSQGMSQ

SEQ ID NO: 101879 - protein, 949 aa, Homo sapiens
  Payload ID: 20298
  Gene Name: zinc finger, CCHC domain containing 14
  Uniprot ID: Q8WYQ9
  ENSP ID: ENSP00000268616
MASNHPAFSFHQKQVLRQELTQIQSSLNGGGGHGGKGAPGPGGALPTCPACHKITPRTEAPVSSVSNSLENALHTSAHSTEESLPKRPLGKHSKVSVEKIDLKGLSHTKNDRNVECSFEVLWSDSSITSVTKSSSEVTEFISKLCQLYPEENLEKLIPCLAGPDAFYVERNHVDLDSGLRYLASLPSHVLKNDHVRRFLSTSSPPQQLQSPSPGNPSLSKVGTVMGVSGRPVCGVAGIPSSQSGAQHHGQHPAGSAAPLPHCSHAGSAGSALAYRTQMDTSPAILMPSSLQTPQTQEQNGILDWLRKLRLHKYYPVFKQLSMEKFLSLTEEDLNKFESLTMGAKKKLKTQLELEKEKSERRCLNPSAPPLVTSSGVARVPPTSHVGPVQSGRGSHAAELRVEVEQPHHQLPREGSSSEYSSSSSSPMGVQAREESSDSAEENDRRVEIHLESSDKEKPVMLLNHFTSSSARPTAQVLPVQNEASSNPSGHHPLPPQMLSAASHITPIRMLNSVHKPERGSADMKLLSSSVHSLLSLEERNKGSGPRSSMKVDKSFGSAMMDVLPASAPHQPVQVLSGLSESSSMSPTVSFGPRTKVVHASTLDRVLKTAQQPALVVETSTAATGTPSTVLHAARPPIKLLLSSSVPADSAISGQTSCPNNVQISVPPAIINPRTALYTANTKVAFSAMSSMPVGPLQGGFCANSNTASPSSHPSTSFANMATLPSCPAPSSSPALSSVPESSFYSSSGGGGSTGNIPASNPNHHHHHHHQQPPAPPQPAPPPPGCIVCTSCGCSGSCGSSGLTVSYANYFQHPFSGPSVFTFPFLPFSPMCSSGYVSAQQYGGGSTFPVVHAPYSSSGTPDPVLSGQSTFAVPPMQNFMAGTAGVYQTQGLVGSSNGSSHKKSGNLSCYNCGATGHRAQDCKQPSMDFNRPGTFRLKYAPPAESLDSTD

SEQ ID NO: 101880 - protein, 949 aa, Homo sapiens; identical to SEQ ID NO: 101879
  Payload ID: 20298
  Gene Name: zinc finger, CCHC domain containing 14
  Uniprot ID: Q8WYQ9
  ENSP ID: ENSP00000455431

SEQ ID NO: 101881 - protein, 846 aa, Homo sapiens
  Payload ID: 20298
  Gene Name: zinc finger, CCHC domain containing 14
  ENSP ID: ENSP00000456499
  MOD_RES (1)..(1): Any amino acid
XFEVLWSDSSITSVTKSSSEVTEFISKLCQLYPEENLEKLIPCLAGPDAFYVERNHVDLDSGLRYLASLPSHVLKNDHVRRFLSTSSPPQQLQSPSPGNPSLSKVGTVMGVSGRPVCGVAGIPSSQSGAQHHGQHPAGSAAPLPHCSHAGSAGSALAYRTQMDTSPAILMPSSLQTPQTQEQNGILDWLRKLRLHKYYPVFKQLSMEKFLSLTEEDLNKFESLTMGAKKKLKTQLELEKEKSERRCLNPSAPPLVTSSGVARVPPTSHVGPVQSGRGSHAAELRVEVEQPHHQLPREGSSSEYSSSSSSPMGVQAREESSDSAEENDRRVEIHLESSDKEKPVMLLNHFTSSSARPTAQVLPVQNEASSNPSGHHPLPPQMLSAASHITPIRMLNSVHKPERGSADMKLLSSSVHSLLSLEERNKGSGPRSSMKVDKSFGSAMMDVLPASAPHQPVQVLSGLSESSSMSPTVSFGPRTKVVHASTLDRVLKTAQQPALVVETSTAATGTPSTVLHAARPPIKLLLSSSVPADSAISGQTSCPNNVQISVPPAIINPRTALYTANTKVAFSAMSSMPVGPLQGGFCANSNTASPSSHPSTSFANMATLPSCPAPSSSPALSSVPESSFYSSSGGGGSTGNIPASNPNHHHHHHHQQPPAPPQPAPPPPGCIVCTSCGCSGSCGSSGLTVSYANYFQHPFSGPSVFTFPFLPFSPMCSSGYVSAQQYGGGSTFPVVHAPYSSSGTPDPVLSGQSTFAVPPMQNFMAGTAGVYQTQGLVGSSNGSSHKKSGNLSCYNCGATGHRAQDCKQPSMDFNRPGKRAPWPRPPGSRRTSAHKCLVFMKSKLLSL

SEQ ID NO: 101882 - protein, 310 aa, Homo sapiens
  Payload ID: 20299
  Gene Name: zinc finger, CCHC domain containing 16
  Uniprot ID: Q6ZR62
  ENSP ID: ENSP00000340590
MEKCTKSSSTMQVEPSFLQAENLILRLQMQHPTTENTAKRGQVMPALATTVMPVPYSLEHLTQFHGDPANCSEFLTQVTTYLTALQISNPANDAQIKLFFDYLSQQLESCGIISGPDKSTLLKQYENLILEFQQSFGKPTKQEINPLMNAKFDKGDNSSQQDPATFHLLAQNLICNETNQSGQFEKALADPNQDEESVTDMMDNLPDLITQCIQLDKKHSDRPELLQSETQLPLLASLIQHQALFSPTDPPPKKGPIQLREGQLPLTPAKRARQQETQLCLYCSQSGHFTRDCLAKRSRAPATTNNTAHQ

SEQ ID NO: 101883 - protein, 241 aa, Homo sapiens
  Payload ID: 20300
  Gene Name: zinc finger, CCHC domain containing 17
  Uniprot ID: Q9NP64
  ENSP ID: ENSP00000343557
MNSGRPETMENLPALYTIFQGEVAMVTDYGAFIKIPGCRKQGLVHRTHMSSCRVDKPSEIVDVGDKVWVKLIGREMKNDRIKVSLSMKVVNQGTGKDLDPNNVIIEQEERRRRSFQDYTGQKITLEAVLNTTCKKCGCKGHFAKDCFMQPGGTKYSLIPDEEEEKEEAKSAEFEKPDPTRNPSRKRKKEKKKKKHRDRKSSDSDSSDSESDTGKRARHTSKDSKAAKKKKKKKKHKKKHKE

SEQ ID NO: 101884 - protein, 241 aa, Homo sapiens; identical to SEQ ID NO: 101883
  Payload ID: 20300
  Gene Name: zinc finger, CCHC domain containing 17
  Uniprot ID: Q9NP64
  ENSP ID: ENSP00000362819

SEQ ID NO: 101885 - protein, 212 aa, Homo sapiens
  Payload ID: 20300
  Gene Name: zinc finger, CCHC domain containing 17
  ENSP ID: ENSP00000391336
MGPLSKSQAVGSKVWSIELMSSCRVDKPSEIVDVGDKVWVKLIGREMKNDRIKVSLSMKVVNQGTGKDLDPNNVIIEQEERRRRSFQDYTGQKITLEAVLNTTCKKCGCKGHFAKDCFMQPGGTKYSLIPDEEEEKEEAKSAEFEKPDPTRNPSRKRKKEKKKKKHRDRKSSDSDSSDSESDTGKRARHTSKDSKAAKKKKKKKKHKKKHKE

SEQ ID NO: 101886 - protein, 233 aa, Homo sapiens
  Payload ID: 20300
  Gene Name: zinc finger, CCHC domain containing 17
  Uniprot ID: Q9NP64
  ENSP ID: ENSP00000444742
MKQLIEDTEKNKVYVAMVTDYGAFIKIPGCRKQGLVHRTHMSSCRVDKPSEIVDVGDKVWVKLIGREMKNDRIKVSLSMKVVNQGTGKDLDPNNVIIEQEERRRRSFQDYTGQKITLEAVLNTTCKKCGCKGHFAKDCFMQPGGTKYSLIPDEEEEKEEAKSAEFEKPDPTRNPSRKRKKEKKKKKHRDRKSSDSDSSDSESDTGKRARHTSKDSKAAKKKKKKKKHKKKHKE

SEQ ID NO: 101887 - protein, 263 aa, Homo sapiens
  Payload ID: 20300
  Gene Name: zinc finger, CCHC domain containing 17
  ENSP ID: ENSP00000480986
MRKNGVGGCLSLEATPRLCSLNLPFSAEGADSKGWEAGPESPAVVAMVTDYGAFIKIPGCRKQGLVHRTHMSSCRVDKPSEIVDVGDKVWVKLIGREMKNDRIKVSLSMKVVNQGTGKDLDPNNVIIEQEERRRRSFQDYTGQKITLEAVLNTTCKKCGCKGHFAKDCFMQPGGTKYSLIPDEEEEKEEAKSAEFEKPDPTRNPSRKRKKEKKKKKHRDRKSSDSDSSDSESDTGKRARHTSKDSKAAKKKKKKKKHKKKHKE

SEQ ID NO: 101888 - protein, 146 aa, Homo sapiens
  Payload ID: 20300
  Gene Name: zinc finger, CCHC domain containing 17
  ENSP ID: ENSP00000481299
MNSGRPETMENLPALYTIFQGEVAMVTDYGAFIKIPGCRKQGLVHRTHMSSCRVDKPSEIVDVGDKVWVKLIGREMKNDRIKVSLSMKVVNQGTGKDLDPNNVIIEQEERRRRSFQDYTGQKITLEAVLNTTCKKCGCKGEEEKET

SEQ ID NO: 101889 - protein, 160 aa, Homo sapiens
  Payload ID: 20300
  Gene Name: zinc finger, CCHC domain containing 17
  ENSP ID: ENSP00000481743
MKQLIEDTEKNKVYVAMVTDYGAFIKIPGCRKQGLVHRTHMSSCRVDKPSEIVDVGDKVWVKLIGREMKNDRIKVSLSMKVVNQGTGKDLDPNNVIIERRRKRNIEIGSHLTLTAQTLRVIQARGQGTHQKTARQQRRRKRRRSTRRSTRSESIKSVGGG

SEQ ID NO: 101890 - protein, 179 aa, Homo sapiens
  Payload ID: 20300
  Gene Name: zinc finger, CCHC domain containing 17
  ENSP ID: ENSP00000482122
MGPLSKSQAVGSKMKNDRIKVSLSMKVVNQGTGKDLDPNNVIIEQEERRRRSFQDYTGQKITLEAVLNTTCKKCGCKGHFAKDCFMQPGGTKYSLIPDEEEEKEEAKSAEFEKPDPTRNPSRKRKKEKKKKKHRDRKSSDSDSSDSESDTGKRARHTSKDSKAAKKKKKKKKHKKKHKE

SEQ ID NO: 101891 - protein, 243 aa, Homo sapiens
  Payload ID: 20300
  Gene Name: zinc finger, CCHC domain containing 17
  ENSP ID: ENSP00000486079
MVTDYGAFIKIPGCRKQGLVHRTHMSSCRVDKPSEIVDVGDKVWVKLIGREMKNDRIKVSLSMKVVNQGTGKDLDPNNVIIEQEERRRRSFQDYTGQKITLEAVLNTTCKKCGCKGRVKPLPFPRFSPCGWTLFWKKEAAQCHFAKDCFMQPGGTKYSLIPDEEEEKEEAKSAEFEKPDPTRNPSRKRKKEKKKKKHRDRKSSDSDSSDSESDTGKRARHTSKDSKAAKKKKKKKKHKKKHKE

SEQ ID NO: 101892 - protein, 403 aa, Homo sapiens
  Payload ID: 20301
  Gene Name: zinc finger, CCHC domain containing 18
  Uniprot ID: P0CG32
  ENSP ID: ENSP00000473824
MASITACVGNSRQQNAPLPPWAHSMLRSLGRSLCPLVVKMAERNMKLFSGRVVPAQGKETFENWLIQVNEVLPDWSMSEEEKLKRLMKTLRGPAREVMRLLQAANPNLSVADFLRAMKLVFGESESSVTAHGKFFNTLQAQGEKASLYVIRLEVQLQNAIQAGILAEKDANQTRLQQLLLGAELNRDLRFRLKHLLRMYANKQERLPNFLELIKMIREEEDWDDAFIKRKRPKRSEPIMERAASPVAFQGAQPIAISSADCNCNVIEIDDTLDDSDEDVILVVSLYPSLTPTGAPPFRGRARPLDQVLVIDSPNNSGAQSLSTSGGSGYKNDGPGNIRRARKRKYTTRCSYCGEEGHSKETCDNESNKAQVFENLIITLQELTHTEERSKEVPGEHSDASEPQ

SEQ ID NO: 101893 - protein, 403 aa, Homo sapiens; identical to SEQ ID NO: 101892
  Payload ID: 20301
  Gene Name: zinc finger, CCHC domain containing 18
  Uniprot ID: P0CG32
  ENSP ID: ENSP00000482195

SEQ ID NO: 101894 - protein, 1178 aa, Homo sapiens
  Payload ID: 20302
  Gene Name: zinc finger, CCHC domain containing 2
  Uniprot ID: Q9C0B9
  ENSP ID: ENSP00000269499
MLRMKLPLKPTHPAEPPPEAEEPEADARPGAKAPSRRRRDCRPPPPPPPPAGPSRGPLPPPPPPRGLGPPVAGGAAAGAGMPGGGGGPSAALREQERVYEWFGLVLGSAQRLEFMCGLLDLCNPLELRFLGSCLEDLARKDYHYLRDSEAKANGLSDPGPLADFREPAVRSRLIVYLALLGSENREAAGRLHRLLPQVDSVLKSLRAARGEGSRGGAEDERGEDGDGEQDAEKDGSGPEGGIVEPRVGGGLGSRAQEELLLLFTMASLHPAFSFHQRVTLREHLERLRAALRGGPEDAEVEVEPCKFAGPRAQNNSAHGDYMQNNESSLIEQAPIPQDGLTVAPHRAQREAVHIEKIMLKGVQRKRADKYWEYTFKVNWSDLSVTTVTKTHQELQEFLLKLPKELSSETFDKTILRALNQGSLKREERRHPDLEPILRQLFSSSSQAFLQSQKVHSFFQSISSDSLHSINNLQSSLKTSKILEHLKEDSSEASSQEEDVLQHAIIHKKHTGKSPIVNNIGTSCSPLDGLTMQYSEQNGIVDWRKQSCTTIQHPEHCVTSADQHSAEKRSLSSINKKKGKPQTEKEKIKKTDNRLNSRINGIRLSTPQHAHGGTVKDVNLDIGSGHDTCGETSSESYSSPSSPRHDGRESFESEEEKDRDTDSNSEDSGNPSTTRFTGYGSVNQTVTVKPPVQIASLGNENGNLLEDPLNSPKYQHISFMPTLHCVMHNGAQKSEVVVPAPKPADGKTIGMLVPSPVAISAIRESANSTPVGILGPTACTGESEKHLELLASPLPIPSTFLPHSSTPALHLTVQRLKLPPPQGSSESCTVNIPQQPPGSLSIASPNTAFIPIHNPGSFPGSPVATTDPITKSASQVVGLNQMVPQIEGNTGTVPQPTNVKVVLPAAGLSAAQPPASYPLPGSPLAAGVLPSQNSSVLSTAATSPQPASAGISQAQATVPPAVPTHTPGPAPSPSPALTHSTAQSDSTSYISAVGNTNANGTVVPPQQMGSGPCGSCGRRCSCGTNGNLQLNSYYYPNPMPGPMYRVPSFFTLPSICNGSYLNQAHQSNGNQLPFFLPQTPYANGLVHDPVMGSQANYGMQQMAGFGRFYPVYPAPNVVANTSGSGPKKNGNVSCYNCGVSGHYAQDCKQSSMEANQQGTYRLRYAPPLPPSNDTLDSAD

SEQ ID NO: 101895 - protein, 857 aa, Homo sapiens
  Payload ID: 20302
  Gene Name: zinc finger, CCHC domain containing 2
  Uniprot ID: Q9C0B9
  ENSP ID: ENSP00000464791
MQNNESSLIEQAPIPQDGLTVAPHRAQREAVHIEKIMLKGVQRKRADKYWEYTFKVNWSDLSVTTVTKTHQELQEFLLKLPKELSSETFDKTILRALNQGSLKREERRHPDLEPILRQLFSSSSQAFLQSQKVHSFFQSISSDSLHSINNLQSSLKTSKILEHLKEDSSEASSQEEDVLQHAIIHKKHTGKSPIVNNIGTSCSPLDGLTMQYSEQNGIVDWRKQSCTTIQHPEHCVTSADQHSAEKRSLSSINKKKGKPQTEKEKIKKTDNRLNSRINGIRLSTPQHAHGGTVKDVNLDIGSGHDTCGETSSESYSSPSSPRHDGRESFESEEEKDRDTDSNSEDSGNPSTTRFTGYGSVNQTVTVKPPVQIASLGNENGNLLEDPLNSPKYQHISFMPTLHCVMHNGAQKSEVVVPAPKPADGKTIGMLVPSPVAISAIRESANSTPVGILGPTACTGESEKHLELLASPLPIPSTFLPHSSTPALHLTVQRLKLPPPQGSSESCTVNIPQQPPGSLSIASPNTAFIPIHNPGSFPGSPVATTDPITKSASQVVGLNQMVPQIEGNTGTVPQPTNVKVVLPAAGLSAAQPPASYPLPGSPLAAGVLPSQNSSVLSTAATSPQPASAGISQAQATVPPAVPTHTPGPAPSPSPALTHSTAQSDSTSYISAVGNTNANGTVVPPQQMGSGPCGSCGRRCSCGTNGNLQLNSYYYPNPMPGPMYRVPSFFTLPSICNGSYLNQAHQSNGNQLPFFLPQTPYANGLVHDPVMGSQANYGMQQMAGFGRFYPVYPAPNVVANTSGSGPKKNGNVSCYNCGVSGHYAQDCKQSSMEANQQGTYRLRYAPPLPPSNDTLDSAD

SEQ ID NO: 101896 - protein, 378 aa, Homo sapiens
  Payload ID: 20302
  Gene Name: zinc finger, CCHC domain containing 2
  ENSP ID: ENSP00000465548
  MOD_RES (1)..(1): Any amino acid
XGLGPPVAGGAAAGAGMPGGGGGPSAALREQERVYEWFGLVLGSAQRLEFMCGLLDLCNPLELRFLGSCLEDLARKDYHYLRDSEAKANGLSDPGPLADFREPAVRSRLIVYLALLGSENREAAGRLHRLLPQVDSVLKSLRAARGEGSRGGAEDERGEDGDGEQDAEKDGSGPEGGIVEPRVGGGLGSRAQEELLLLFTMASLHPAFSFHQRVTLREHLERLRAALRGGPEDAEVEVEPCKFAGPRAQVRRTEPPWTRGAIAAPAASPASLSDAPCPSPSPAQVARNPHPAAPSARGLSFVSLGRSVPLPHPTPHPGRHSHPPSQNALEVPSVPRCCHGRRGAPRPGPLSEEKCRDVFGSEHLSARCGSRRALEEPV

SEQ ID NO: 101897 - protein, 106 aa, Homo sapiens
  Payload ID: 20302
  Gene Name: zinc finger, CCHC domain containing 2
  ENSP ID: ENSP00000468368
FFLPQTPYANGLVHDPVMGSQANYGMQQMAGFGRFYPVYPAPNVVANTSGSGPKKNGNVSCYNCGVSGHYAQDCKQSSMEANQQGTYRLRYAPPLPPSNDTLDSAD

SEQ ID NO: 101898 - protein, 1098 aa, Homo sapiens
  Payload ID: 20302
  Gene Name: zinc finger, CCHC domain containing 2
  ENSP ID: ENSP00000468789
  MOD_RES (1)..(1): Any amino acid
XPGGGGGPSAALREQERVYEWFGLVLGSAQRLEFMCGLLDLCNPLELRFLGSCLEDLARKDYHYLRDSEAKANGLSDPGPLADFREPAVRSRLIVYLALLGSENREAAGRLHRLLPQVDSVLKSLRAARGEGSRGGAEDERGEDGDGEQDAEKDGSGPEGGIVEPRVGGGLGSRAQEELLLLFTMASLHPAFSFHQRVTLREHLERLRAALRGGPEDAEVEVEPCKFAGPRAQNNSAHGDYMQNNESSLIEQAPIPQDGLTVAPHRAQREAVHIEKIMLKGVQRKRADKYWEYTFKVNWSDLSVTTVTKTHQELQEFLLKLPKELSSETFDKTILRALNQGSLKREERRHPDLEPILRQLFSSSSQAFLQSQKVHSFFQSISSDSLHSINNLQSSLKTSKILEHLKEDSSEASSQEEDVLQHAIIHKKHTGKSPIVNNIGTSCSPLDGLTMQYSEQNGIVDWRKQSCTTIQHPEHCVTSADQHSAEKRSLSSINKKKGKPQTEKEKIKKTDNRLNSRINGIRLSTPQHAHGGTVKDVNLDIGSGHDTCGETSSESYSSPSSPRHDGRESFESEEEKDRDTDSNSEDSGNPSTTRFTGYGSVNQTVTVKPPVQIASLGNENGNLLEDPLNSPKYQHISFMPTLHCVMHNGAQKSEVVVPAPKPADGKTIGMLVPSPVAISAIRESANSTPVGILGPTACTGESEKHLELLASPLPIPSTFLPHSSTPALHLTVQRLKLPPPQGSSESCTVNIPQQPPGSLSIASPNTAFIPIHNPGSFPGSPVATTDPITKSASQVVGLNQMVPQIEGNTGTVPQPTNVKVVLPAAGLSAAQPPASYPLPGSPLAAGVLPSQNSSVLSTAATSPQPASAGISQAQATVPPAVPTHTPGPAPSPSPALTHSTAQSDSTSYISAVGNTNANGTVVPPQQMGSGPCGSCGRRCSCGTNGNLQLNSYYYPNPMPGPMYRVPSFFTLPSICNGSYLNQAHQSNGNQLPFFLPQTPYANGLVHDPVMGSQANYGMQQMAGFGRFYPVYPAPNVVANTSGSGPKKNGNVSCYNCGVSGHYAQDCKQSSMEANQQGTYRLRYAPPLPPSNDTLDSAD

SEQ ID NO: 101899 - protein, 195 aa, Homo sapiens
  Payload ID: 20302
  Gene Name: zinc finger, CCHC domain containing 2
  ENSP ID: ENSP00000480901
MQNNESSLIEQAPIPQDGLTVAPHRAQREAVHIEKIMLKGVQRKRADKYWEYTFKVNWSDLSVTTVTKTHQELQEFLLKLPKELSSETFDKTILRALNQGSLKREERRHPDLEPILRQLFSSSSQAFLQSQKVHSFFQSISSDSLHSINNLQSSLKTSKILEHLKEDSSEASSQEEDVLQHAIIHKKHTGKSPIV

SEQ ID NO: 101900 - protein, 228 aa, Homo sapiens
  Payload ID: 20303
  Gene Name: zinc finger, CCHC domain containing 24
  ENSP ID: ENSP00000361408
MQEVCSGEDTHGGHFPSRPGHTGAEQQCVQGRLTLWLPQQHRRWPQLPHRALLRPDPHLRGSQAQQAAPTQLPVPPVLQQRTLHQGLPPGTPQRRGPDSIPGQKALLRRVQVSQVQEKMDERELLGQHGAGVHQVPHQRVSTQAETPGEARRPGRVRPEQGAPAAPLREVQGPGLLLPSRAVTGCPPAPRATPRQPEETLLPCATPRGCVSPCAWGALAGLRGWAGGS

SEQ ID NO: 101901 - protein, 241 aa, Homo sapiens
  Payload ID: 20303
  Gene Name: zinc finger, CCHC domain containing 24
  Uniprot ID: Q8N2G6
  ENSP ID: ENSP00000361411
MSLLSAIDTSAASVYQPAQLLNWVYLSLQDTHQASAFDAFRPEPTAGAAPPELAFGKGRPEQLGSPLHSSYLNSFFQLQRGEALSNSVYKGASPYGSLNNIADGLSSLTEHFSDLTLTSEARKPSKRPPPNYLCHLCFNKGHYIKDCPQARPKGEGLTPYQGKKRCFGEYKCPKCKRKWMSGNSWANMGQECIKCHINVYPHKQRPLEKPDGLDVSDQSKEHPQHLCEKCKVLGYYCRRVQ

SEQ ID NO: 101902 - protein, 403 aa, Homo sapiens
  Payload ID: 20304
  Gene Name: zinc finger, CCHC domain containing 3
  Uniprot ID: Q9NUD5
  ENSP ID: ENSP00000484056
MATGGGAEEERKRGRPQLLPPARPAARGEEADGGREKMGWAQVVKNLAEKKGEFREPRPPRREEESGGGGGSAGLGGPAGLAAPDLGDFPPAGRGDPKGRRRDPAGEAVDPRKKKGAAEAGRRKKAEAAAAAMATPARPGEAEDAAERPLQDEPAAAAGPGKGRFLVRICFQGDEGACPTRDFVVGALILRSIGMDPSDIYAVIQIPGSREFDVSFRSAEKLALFLRVYEEKREQEDCWENFVVLGRSKSSLKTLFILFRNETVDVEDIVTWLKRHCDVLAVPVKVTDRFGIWTGEYKCEIELRQGEGGVRHLPGAFFLGAERGYSWYKGQPKTCFKCGSRTHMSGSCTQDRCFRCGEEGHLSPYCRKGIVCNLCGKRGHAFAQCPKAVHNSVAAQLTGVAGH

SEQ ID NO: 101903 - protein, 513 aa, Homo sapiens
  Payload ID: 20305
  Gene Name: zinc finger, CCHC domain containing 4
  Uniprot ID: Q9H5U6
  ENSP ID: ENSP00000303468
MAASRNGFEAVEAEGSAGCRGSSGMEVVLPLDPAVPAPLCPHGPTLLFVKVTQGKEETRRFYACSACRDRKDCNFFQWEDEKLSGARLAAREAHNRRCQPPLSRTQCVERYLKFIELPLTQRKFCQTCQQLLLPDDWGQHSEHQVLGNVSITQLRRPSQLLYPLENKKTNAQYLFADRSCQFLVDLLSALGFRRVLCVGTPRLHELIKLTASGDKKSNIKSLLLDIDFRYSQFYMEDSFCHYNMFNHHFFDGKTALEVCRAFLQEDKGEGIIMVTDPPFGGLVEPLAITFKKLIAMWKEGQSQDDSHKELPIFWIFPYFFESRICQFFPSFQMLDYQVDYDNHALYKHGKTGRKQSPVRIFTNIPPNKIILPTEEGYRFCSPCQRYVSLENQHCELCNSCTSKDGRKWNHCFLCKKCVKPSWIHCSICNHCAVPDHSCEGPKHGCFICGELDHKRSTCPNIATSKRANKAVRKQKQRKSNKMKMETTKGQSMNHTSATRRKKRRERAHQYLGS

SEQ ID NO: 101904 - protein, 229 aa, Homo sapiens
  Payload ID: 20305
  Gene Name: zinc finger, CCHC domain containing 4
  Uniprot ID: Q9H5U6
  ENSP ID: ENSP00000422115
MAASRNGFEAVEAEGSAGCRGSSGMEVVLPLDPAVPAPLCPHGPTLLFVKVTQGKEETRRFYACSACRDRKDCNFFQWEDEKLSGARLAAREAHNRRCQPPLSRTQCVERYLKFIELPLTQRKFCQTCQQLLLPDDWGQHSEHQVLGNVSITQLRRPSQLLYPLENKKTNAQYLFADRSCQFLVDLLSALGFRRVLCVGTPRLHELIKLTASGDKKSNIKSLLLDIDFR

SEQ ID NO: 101905 - protein, 302 aa, Homo sapiens
  Payload ID: 20305
  Gene Name: zinc finger, CCHC domain containing 4
  ENSP ID: ENSP00000422269
  MOD_RES (1)..(1): Any amino acid
XWGQHSEHQVLGNVSITQLRRPSQLLYPLENKKTNAQYLFADRSCQFLVDLLSALGFRRVLCVGTPRLHELIKLTASGDKKSNIKSLLLDIDFRYSQFYMEDSFCHYNMFNHHFFDGKTALEVCRAFLQEDKGEGIIMVTDPPFGGLVEPLAITFKKLIAMWKEGQSQDDSHKELPIFWIFPYFFESRICQFFPSFQMLDYQVDYDNHALYKHGKTGRKQSPVRIFTNIPPNKIILPTEEGYRFCSPCQRYVSLENQHCELCNSCTSKDGRKWNHCFLCKKCVKPSWIHCSICNHCAVPDHS

SEQ ID NO: 101906 - protein, 127 aa, Homo sapiens [sequence omitted]

SEQ ID NO: 101907 - protein, 475 aa, Homo sapiens
  Payload ID: 20306
  Gene Name: zinc finger, CCHC domain containing 5
  Uniprot ID: Q8N8U3
  ENSP ID: ENSP00000316794
MVEDLAASYIVLKLENEIRQAQVQWLMEENAALQAQIPELQKSQAAKEYDLLRKSSEAKEPQKLPEHMNPPAAWEAQKTPEFKEPQKPPEPQDLLPWEPPAAWELQEAPAAPESLAPPATRESQKPPMAHEIPTVLEGQGPANTQDATIAQEPKNSEPQDPPNIEKPQEAPEYQETAAQLEFLELPPPQEPLEPSNAQEFLELSAAQESLEGLIVVETSAASEFPQAPIGLEATDFPLQYTLTFSGDSQKLPEFLVQLYSYMRVRGHLYPTEAALVSFVGNCFSGRAGWWFQLLLDIQSPLLEQCESFIPVLQDTFDNPENMKDANQCIHQLCQGEGHVATHFHLIAQELNWDESTLWIQFQEGLASSIQDELSHTSPATNLSDLITQCISLEEKPDPNPLGKSSSAEGDGPESPPAENQPMQAAINCPHISEAEWVRWHKGRLCLYCGYPGHFARDCPVKPHQALQAGNIQACQ

SEQ ID NO: 101908 - protein, 784 aa, Homo sapiens
  Payload ID: 20307
  Gene Name: zinc finger, CCHC domain containing 6
  ENSP ID: ENSP00000277141
MGNEHISVHPENSDCIQADVNSDDYKGDKVYHPETGRKNEKEKVGRKGKHLLTVDQKRGEHVVCGSTRNNESESTLDLEGFQNPTAKECEGLATLDNKADLDGESTEGTEELEDSLNHFTHSVQGQTSEMIPSDEEEEDDEEEEEEEEPRLTINQREDEDGMANEDELDNTYTGSGDEDALSEEDDELGEAAKYEDVKECGKHVERALLVELNKISLKEENVCEEKNSPVDQSDFFYEFSKLIFTKGKSPTVVCSLCKREGHLKKDCPEDFKRIQLEPLPPLTPKFLNILDQVCIQCYKDFSPTIIEDQAREHIRQNLESFIRQDFPGTKLSLFGSSKNGFGFKQSDLDVCMTINGLETAEGLDCVRTIEELARVLRKHSGLRNILPITTAKVPIVKFFHLRSGLEVDISLYNTLALHNTRLLSAYSAIDPRVKYLCYTMKVFTKMCDIGDASRGSLSSYAYTLMVLYFLQQRNPPVIPVLQEIYKGEKKPEIFVDGWNIYFFDQIDELPTYWSECGKNTESVGQLWLGLLRFYTEEFDFKEHVISIRRKSLLTTFKKQWTSKYIVIEDPFDLNHNLGAGLSRKMTNFIMKAFINGRRVFGIPVKGFPKDYPSKMEYFFDPDVLTEGELAPNDRCCRICGKIGHFMKDCPMRRKVRRRRDQEDALNQRYPENKEKRSKEDKEIHNKYTEREVSTKEDKPIQCTPQKAKPMRAAADLGREKILRPPVEKWKRQDDKDLREKRCFICGREGHIKKECPQFKGSSGSLSSKYMTQGKASAKRTQQES

SEQ ID NO: 101909 - protein, 168 aa, Homo sapiens
  Payload ID: 20307
  Gene Name: zinc finger, CCHC domain containing 6
  ENSP ID: ENSP00000365114
MEAGSPENKKQRSRPRKPRKTRNEENEQDGDLEGPVIDESVLSTKELLGLQQAEERLKRDCIDRLKRRPRNYPTAKYTCRLCDVLIESIAFAHKHIKEKRHKKNIKEKQEEELLTTLPPPTPSQINAVGIAIDKVVQEFGLHNENLEQRLEIKRIMENVFQHKLPGIF

SEQ ID NO: 101910 - protein, 124 aa, Homo sapiens
  Payload ID: 20307
  Gene Name: zinc finger, CCHC domain containing 6
  ENSP ID: ENSP00000365115
MSQPDVLLLVQECLKNSDSFIDVDADFHARVPVVVCREKQSGLLCKVSAGNENACLTTKHLTALGKLEPKLVPLVIAFRYWAKLCSIDRPEEGGLPPYVFALMAIFFLQQRKEPLLPVYLGSWV

SEQ ID NO: 101911 - protein, 395 aa, Homo sapiens
  Payload ID: 20307
  Gene Name: zinc finger, CCHC domain containing 6
  ENSP ID: ENSP00000365124
MTINGLETAEGLDCVRTIEELARVLRKHSGLRNILPITTAKVPIVKFFHLRSGLEVDISLYNTLALHNTRLLSAYSAIDPRVKYLCYTMKVFTKIYKGEKKPEIFVDGWNIYFFDQIDELPTYWSECGKNTESVGQLWLGLLRFYTEEFDFKEHVISIRRKSLLTTFKKQWTSKYIVIEDPFDLNHNLGAGLSRKMTNFIMKAFINGRRVFGIPVKGFPKDYPSKMEYFFDPDVLTEGELAPNDRCCRICGKIGHFMKDCPMRRKVRRRRDQEDALNQRYPENKEKRSKEDKEIHNKYTEREVSTKEDKPIQCTPQKAKPMRAAADLGREKILRPPVEKWKRQDDKDLREKRCFICGREGHIKKECPQFKGSSGSLSSKYMTQGKASAKRTQQES

SEQ ID NO: 101912 - protein, 1259 aa, Homo sapiens
  Payload ID: 20307
  Gene Name: zinc finger, CCHC domain containing 6
  Uniprot ID: Q5VYS8
  ENSP ID: ENSP00000365127
MGDTAKPYFVKRTKDRGTMDDDDFRRGHPQQDYLIIDDHAKGHGSKMEKGLQKKKITPGNYGNTPRKGPCAVSSNPYAFKNPIYSQPAWMNDSHKDQSKRWLSDEHTGNSDNWREFKPGPRIPVINRQRKDSFQENEDGYRWQDTRGCRTVRRLFHKDLTSLETTSEMEAGSPENKKQRSRPRKPRKTRNEENEQDGDLEGPVIDESVLSTKELLGLQQAEERLKRDCIDRLKRRPRNYPTAKYTCRLCDVLIESIAFAHKHIKEKRHKKNIKEKQEEELLTTLPPPTPSQINAVGIAIDKVVQEFGLHNENLEQRLEIKRIMENVFQHKLPDCSLRLYGSSCSRLGFKNSDVNIDIQFPAIIEGFSLSKLGNFNLQDIEKDVVIWEHTDSAAGDTGITKEEAPRETPIKRGQVSLILDVKHQPSVPVGQLWVELLRFYALEFNLADLVISIRVKELVSRELKDWPKKRIAIEDPYSVKRNVARTLNSQPVFEYILHCLRTTYKYFALPHKITKSSLLKPLNAITCISEHSKEVINHHPDVQTKDDKLKNSVLAQGPGATSSAANTCKVQPLTLKETAESFGSPPKEEMGNEHISVHPENSDCIQADVNSDDYKGDKVYHPETGRKNEKEKVGRKGKHLLTVDQKRGEHVVCGSTRNNESESTLDLEGFQNPTAKECEGLATLDNKADLDGESTEGTEELEDSLNHFTHSVQGQTSEMIPSDEEEEDDEEEEEEEEPRLTINQREDEDGMANEDELDNTYTGSGDEDALSEEDDELGEAAKYEDVKECGKHVERALLVELNKISLKEENVCEEKNSPVDQSDFFYEFSKLIFTKGKGLDCVRTIEELARVLRKHSGLRNILPITTAKVPIVKFFHLRSGLEVDISLYNTLALHNTRLLSAYSAIDPRVKYLCYTMKVFTKMCDIGDASRGSLSSYAYTLMVLYFLQQRNPPVIPVLQEIYKGEKKPEIFVDGWNIYFFDQIDELPTYWSECGKNTESVGQLWLGLLRFYTEEFDFKEHVISIRRKSLLTTFKKQWTSKYIVIEDPFDLNHNLGAGLSRKMTNFIMKAFINGRRVFGIPVKGFPKDYPSKMEYFFDPDVLTEGELAPNDRCCRICGKIGHFMKDCPMRRKVRRRRDQEDALNQRYPENKEKRSKEDKEIHNKYTEREVSTKEDKPIQCTPQKAKPMRAAADLGREKILRPPVEKWKRQDDKDLREKRCFICGREGHIKKECPQFKGSSGSLSSKYMTQGKASAKRTQQES

SEQ ID NO: 101913 - protein, 1495 aa, Homo sapiens
  Payload ID: 20307
  Gene Name: zinc finger, CCHC domain containing 6
  Uniprot ID: Q5VYS8
  ENSP ID: ENSP00000365130
MGDTAKPYFVKRTKDRGTMDDDDFRRGHPQQDYLIIDDHAKGHGSKMEKGLQKKKITPGNYGNTPRKGPCAVSSNPYAFKNPIYSQPAWMNDSHKDQSKRWLSDEHTGNSDNWREFKPGPRIPVINRQRKDSFQENEDGYRWQDTRGCRTVRRLFHKDLTSLETTSEMEAGSPENKKQRSRPRKPRKTRNEENEQDGDLEGPVIDESVLSTKELLGLQQAEERLKRDCIDRLKRRPRNYPTAKYTCRLCDVLIESIAFAHKHIKEKRHKKNIKEKQEEELLTTLPPPTPSQINAVGIAIDKVVQEFGLHNENLEQRLEIKRIMENVFQHKLPDCSLRLYGSSCSRLGFKNSDVNIDIQFPAIMSQPDVLLLVQECLKNSDSFIDVDADFHARVPVVVCREKQSGLLCKVSAGNENACLTTKHLTALGKLEPKLVPLVIAFRYWAKLCSIDRPEEGGLPPYVFALMAIFFLQQRKEPLLPVYLGSWIEGFSLSKLGNFNLQDIEKDVVIWEHTDSAAGDTGITKEEAPRETPIKRGQVSLILDVKHQPSVPVGQLWVELLRFYALEFNLADLVISIRVKELVSRELKDWPKKRIAIEDPYSVKRNVARTLNSQPVFEYILHCLRTTYKYFALPHKITKSSLLKPLNAITCISEHSKEVINHHPDVQTKDDKLKNSVLAQGPGATSSAANTCKVQPLTLKETAESFGSPPKEEMGNEHISVHPENSDCIQADVNSDDYKGDKVYHPETGRKNEKEKVGRKGKHLLTVDQKRGEHVVCGSTRNNESESTLDLEGFQNPTAKECEGLATLDNKADLDGESTEGTEELEDSLNHFTHSVQGQTSEMIPSDEEEEDDEEEEEEEEPRLTINQREDEDGMANEDELDNTYTGSGDEDALSEEDDELGEAAKYEDVKECGKHVERALLVELNKISLKEENVCEEKNSPVDQSDFFYEFSKLIFTKGKSPTVVCSLCKREGHLKKDCPEDFKRIQLEPLPPLTPKFLNILDQVCIQCYKDFSPTIIEDQAREHIRQNLESFIRQDFPGTKLSLFGSSKNGFGFKQSDLDVCMTINGLETAEGLDCVRTIEELARVLRKHSGLRNILPITTAKVPIVKFFHLRSGLEVDISLYNTLALHNTRLLSAYSAIDPRVKYLCYTMKVFTKMCDIGDASRGSLSSYAYTLMVLYFLQQRNPPVIPVLQEIYKGEKKPEIFVDGWNIYFFDQIDELPTYWSECGKNTESVGQLWLGLLRFYTEEFDFKEHVISIRRKSLLTTFKKQWTSKYIVIEDPFDLNHNLGAGLSRKMTNFIMKAFINGRRVFGIPVKGFPKDYPSKMEYFFDPDVLTEGELAPNDRCCRICGKIGHFMKDCPMRRKVRRRRDQEDALNQRYPENKEKRSKEDKEIHNKYTEREVSTKEDKPIQCTPQKAKPMRAAADLGREKILRPPVEKWKRQDDKDLREKRCFICGREGHIKKECPQFKGSSGSLSSKYMTQGKASAKRTQQES

SEQ ID NO: 101914 - protein, 205 aa, Homo sapiens
  Payload ID: 20308
  Gene Name: zinc finger, CCHC domain containing 7
  ENSP ID: ENSP00000316365
MFGGYETIEAYEDDLYRDESSSELSVDSEVEFQLYSQIHYAQDLDDVIREEEHEEKNSGNSESSSSKPNQKKLIVLSDSEVIQLSDGSEVITLSDEDSIYRCKGKNVRVQAQENAHGLSSSLQSNELVDKKCKSDIEKPKSEERSGVIREVMIIEVSSSEEEESTISEGDNVESWMLLGCEVDDKDDDILLNLVGCENSVTEGQE

SEQ ID NO: 101915 - protein, 543 aa, Homo sapiens
  Payload ID: 20308
  Gene Name: zinc finger, CCHC domain containing 7
  Uniprot ID: Q8N3Z6
  ENSP ID: ENSP00000337839
MMFGGYETIEAYEDDLYRDESSSELSVDSEVEFQLYSQIHYAQDLDDVIREEEHEEKNSGNSESSSSKPNQKKLIVLSDSEVIQLSDGSEVITLSDEDSIYRCKGKNVRVQAQENAHGLSSSLQSNELVDKKCKSDIEKPKSEERSGVIREVMIIEVSSSEEEESTISEGDNVESWMLLGCEVDDKDDDILLNLVGCENSVTEGEDGINWSISDKDIEAQIANNRTPGRWTQRYYSANKNIICRNCDKRGHLSKNCPLPRKVRRCFLCSRRGHLLYSCPAPLCEYCPVPKMLDHSCLFRHSWDKQCDRCHMLGHYTDACTEIWRQYHLTTKPGPPKKPKTPSRPSALAYCYHCAQKGHYGHECPEREVYDPSPVSPFICYYDDKYEIQEREKRLKQKIKVLKKNGVIPEPSKLPYIKAANENPHHDIRKGRASWKSNRWPQENKETQKEMKNKNRNWEKHRKADRHREVDEDFPRGPKTYSSPGSFKTQKPSKPFHRSSHYHTSREDKSPKEGKRGKQKKKERCWEDDDNDNLFLIKQRKKKS

SEQ ID NO: 101916 - protein, 543 aa, Homo sapiens; identical to SEQ ID NO: 101915
  Payload ID: 20308
  Gene Name: zinc finger, CCHC domain containing 7
  Uniprot ID: Q8N3Z6
  ENSP ID: ENSP00000443113

SEQ ID NO: 101917 - protein, 185 aa, Homo sapiens
  Payload ID: 20309
  Gene Name: zinc finger, CCHC domain containing 8
  ENSP ID: ENSP00000437578
MKDCPMPRNAARISEKRKEYMDACGEANNQNFQQRYHAEEVEERFGRFKPGVISEELQDALGVTDKSLPPFIYRMRQLGYPPGWLKEAELENSGLALYDGKDGTDGETEVGEIQQNKSVTYDLSKLVNYPGFNISTPRGIPDEWRIFGSIPMQACQQKDVFANYLTSNFQAPGVKSGNKRSSSHS

SEQ ID NO: 101918 - protein, 469 aa, Homo sapiens
  Payload ID: 20309
  Gene Name: zinc finger, CCHC domain containing 8
  Uniprot ID: Q6NZY4
  ENSP ID: ENSP00000438993
MKDCPMPRNAARISEKRKEYMDACGEANNQNFQQRYHAEEVEERFGRFKPGVISEELQDALGVTDKSLPPFIYRMRQLGYPPGWLKEAELENSGLALYDGKDGTDGETEVGEIQQNKSVTYDLSKLVNYPGFNISTPRGIPDEWRIFGSIPMQACQQKDVFANYLTSNFQAPGVKSGNKRSSSHSSPGSPKKQKNESNSAGSPADMELDSDMEVPHGSQSSESFQFQPPLPPDTPPLPRGTPPPVFTPPLPKGTPPLTPSDSPQTRTASGAVDEDALTLEELEEQQRRIWAALEQAESVNSDSDVPVDTPLTGNSVASSPCPNELDLPVPEGKTSEKQTLDEPEVPEIFTKKSEAGHASSPDSEVTSLCQKEKAELAPVNTEGALLDNGSVVPNCDISNGGSQKLFPADTSPSTATKIHSPIPDMSKFATGITPFEFENMAESTGMYLRIRSLLKNSPRNQQKNKKASE

SEQ ID NO: 101919 - protein, 38 aa, Homo sapiens
  Payload ID: 20309
  Gene Name: zinc finger, CCHC domain containing 8
  ENSP ID: ENSP00000440234
MKDCPMPRNAARISEKRKEYMDACGEANNQNFQQRYHA

SEQ ID NO: 101920 - protein, 211 aa, Homo sapiens
  Payload ID: 20309
  Gene Name: zinc finger, CCHC domain containing 8
  ENSP ID: ENSP00000441112
MKDCPMPRNAARISEKRKEYMDACGEANNQNFQQRYHAEEVEERFGRFKPGVISEELQDALGVTDKSLPPFIYRMRQLGYPPGWLKEAELENSGLALYDGKDGTDGETEVGEIQQNKSVTYDLSKLVNYPGFNISTPRGIPDEWRIFGSIPMQACQQKDVFANYLTSNFQAPGVKSGNKRSSSHSSPGSPKKQKNESNSAGSPADMELDSG

SEQ ID NO: 101921 - protein, 469 aa, Homo sapiens; identical to SEQ ID NO: 101918
  Payload ID: 20309
  Gene Name: zinc finger, CCHC domain containing 8
  Uniprot ID: Q6NZY4
  ENSP ID: ENSP00000441423

SEQ ID NO: 101922 - protein, 707 aa, Homo sapiens
  Payload ID: 20309
  Gene Name: zinc finger, CCHC domain containing 8
  Uniprot ID: Q6NZY4
  ENSP ID: ENSP00000488055
MAAEVYFGDLELFEPFDHPEESIPKPVHTRFKDDDGDEEDENGVGDAELRERLRQCEETIEQLRAENQELKRKLNILTRPSGILVNDTKLDGPILQILFMNNAISKQYHQEIEEFVSNLVKRFEEQQKNDVEKTSFNLLPQPSSIVLEEDHKVEESCAIKNNKEAFSVVGSVLYFTNFCLDKLGQPLLNENPQLSEGWEIPKYHQVFSHIVSLEGQEIQVKAKRPKPHCFNCGSEEHQMKDCPMPRNAARISEKRKEYMDACGEANNQNFQQRYHAEEVEERFGRFKPGVISEELQDALGVTDKSLPPFIYRMRQLGYPPGWLKEAELENSGLALYDGKDGTDGETEVGEIQQNKSVTYDLSKLVNYPGFNISTPRGIPDEWRIFGSIPMQACQQKDVFANYLTSNFQAPGVKSGNKRSSSHSSPGSPKKQKNESNSAGSPADMELDSDMEVPHGSQSSESFQFQPPLPPDTPPLPRGTPPPVFTPPLPKGTPPLTPSDSPQTRTASGAVDEDALTLEELEEQQRRIWAALEQAESVNSDSDVPVDTPLTGNSVASSPCPNELDLPVPEGKTSEKQTLDEPEVPEIFTKKSEAGHASSPDSEVTSLCQKEKAELAPVNTEGALLDNGSVVPNCDISNGGSQKLFPADTSPSTATKIHSPIPDMSKFATGITPFEFENMAESTGMYLRIRSLLKNSPRNQQKNKKASE

SEQ ID NO: 101923 - protein, 271 aa, Homo sapiens
  Payload ID: 20310
  Gene Name: zinc finger, CCHC domain containing 9
  Uniprot ID: Q8N567
  ENSP ID: ENSP00000254037
MTRWARVSTTYNKRPLPATSWEDMKKGSFEGTSQNLPKRKQLEANRLSLKNDAPQAKHKKNKKKKEYLNEDVNGFMEYLRQNSQMVHNGQIIATDSEEVREEIAVALKKDSRREGRRLKRQAAKKNAMVCFHCRKPGHGIADCPAALENQDMGTGICYRCGSTEHEITKCKAKVDPALGEFPFAKCFVCGEMGHLSRSCPDNPKGLYADGGGCKLCGSVEHLKKDCPESQNSERMVTVGRWAKGMSADYEEILDVPKPQKPKTKIPKVVNF

SEQ ID NO: 101924 - protein, 271 aa, Homo sapiens; identical to SEQ ID NO: 101923
  Payload ID: 20310
  Gene Name: zinc finger, CCHC domain containing 9
  Uniprot ID: Q8N567
  ENSP ID: ENSP00000369546

SEQ ID NO: 101925 - protein, 271 aa, Homo sapiens; identical to SEQ ID NO: 101923
  Payload ID: 20310
  Gene Name: zinc finger, CCHC domain containing 9
  Uniprot ID: Q8N567
  ENSP ID: ENSP00000385047

SEQ ID NO: 101926 - protein, 271 aa, Homo sapiens; identical to SEQ ID NO: 101923
  Payload ID: 20310
  Gene Name: zinc finger, CCHC domain containing 9
  Uniprot ID: Q8N567
  ENSP ID: ENSP00000412637

SEQ ID NO: 101927 - protein, 524 aa, Homo sapiens
  Payload ID: 20311
  Gene Name: zinc finger, CW type with PWWP domain 1
  Uniprot ID: Q9H0M4
  ENSP ID: ENSP00000354210
MMTTLQNKEECGKGPKRIFAPPAQKSYSLLPCSPNSPKEETPGISSPETEARISLPKASLKKKEEKATMKNVPSREQEKKRKAQINKQAEKKEKEKSSLTNAEFEEIVQIVLQKSLQECLGMGSGLDFAETSCAQPVVSTQSDKEPGITASATDTDNANGEEVPHTQEISVSWEGEAAPEIRTSKLGQPDPAPSKKKSNRLTLSKRKKEAQDEKVEKTQGGHEHRQEDRLKKTVQDHSQIRDQQKGEISGFGQCLVWVQCSFPNCGKWRRLCGNIDPSVLPDNWSCDQNTDVQYNRCDIPEETWTGLESDVAYASYIPGSIIWAKQYGYPWWPGMIESDPDLGEYFLFTSHLDSLPSKYHVTFFGETVSRAWIPVNMLKNFQELSLELSVMKKRRNDCSQKLGVALMMAQEAEQISIQERVNLFGFWSRFNGSNSNGERKDLQLSGLNSPGSCLEKKEKEEELEKEEGEKTALRKNLKLPRARPWQPAFQREKKLEQCQRTWAYQRVRGPAPHLRKKSPDTGNP

SEQ ID NO: 101928 - protein, 648 aa, Homo sapiens
  Payload ID: 20311
  Gene Name: zinc finger, CW type with PWWP domain 1
  Uniprot ID: Q9H0M4
  ENSP ID: ENSP00000381109
MMTTLQNKEECGKGPKRIFAPPAQKSYSLLPCSPNSPKEETPGISSPETEARISLPKASLKKKEEKATMKNVPSREQEKKRKAQINKQAEKKEKEKSSLTNAEFEEIVQIVLQKSLQECLGMGSGLDFAETSCAQPVVSTQSDKEPGITASATDTDNANGEEVPHTQEISVSWEGEAAPEIRTSKLGQPDPAPSKKKSNRLTLSKRKKEAHEKVEKTQGGHEHRQEDRLKKTVQDHSQIRDQQKGEISGFGQCLVWVQCSFPNCGKWRRLCGNIDPSVLPDNWSCDQNTDVQYNRCDIPEETWTGLESDVAYASYIPGSIIWAKQYGYPWWPGMIESDPDLGEYFLFTSHLDSLPSKYHVTFFGETVSRAWIPVNMLKNFQELSLELSVMKKRRNDCSQKLGVALMMAQEAEQISIQERVNLFGFWSRFNGSNSNGERKDLQLSGLNSPGSCLEKKEKEEELEKEEGEKTDPILPIRKRVKIQTQKTKPRGLGGDAGTADGRGRTLQRKIMKRSLGRKSTAPPAPRMGRKEGQGNSDSDQPGPKKKFKAPQSKALAASFSEGKEVRTVPKNLGLSACKGACPSSAKEEPRHREPLTQEAGSVPLEDEASSDLDLEQLMEDVGRELGQSGELQHSNSDGEDFPVALFGK

SEQ ID NO: 101929 - protein, 246 aa, Homo sapiens
  Payload ID: 20311
  Gene Name: zinc finger, CW type with PWWP domain 1
  ENSP ID: ENSP00000418351
GQCLVWVQCSFPNCGKWRRLCGNIDPSVLPDNWSCDQNTDVQYNRCDIPEETWTGLESDVAYASYIPGSIIWAKQYGYPWWPGMIESDPDLGEYFLFTSHLDSLPSKYHVTFFGETVSRAWIPVNMLKNFQELSLELSVMERVNLFGFWSRFNGSNSNGERKDLQLSGLNSPGSCLEKKEKEEELEKEEGEKTALRKNLKLPRARPWQPAFQREKKLEQCQRTWAYQRVRGPAPHLRKKSPDTGNP

SEQ ID NO: 101930 - protein, 477 aa, Homo sapiens
  Payload ID: 20311
  Gene Name: zinc finger, CW type with PWWP domain 1
  Uniprot ID: Q9H0M4
  ENSP ID: ENSP00000419187
MGSGLDFAETSCAQPVVSTQSDKEPGITASATDTDNANGEEVPHTQEISVSWEGEAAPEIRTSKLGQPDPAPSKKKSNRLTLSKRKKEAQDEKVEKTQGGHEHRQEDRLKKTVQDHSQIRDQQKGEISGFGQCLVWVQCSFPNCGKWRRLCGNIDPSVLPDNWSCDQNTDVQYNRCDIPEETWTGLESDVAYASYIPGSIIWAKQYGYPWWPGMIESDPDLGEYFLFTSHLDSLPSKYHVTFFGETVSRAWIPVNMLKNFQELSLELSVMKKRRNDCSQKLGVALMMAQEAEQISIQERVNLFGFWSRFNGSNSNGERKDLQLSGLNSPGSCLEKKEKEEELEKEEGEKTDPILPIRKRVKIQTQKTKPRGPKKKFKAPQSKALAASFSEGKEVRTVPKNLGLSACKGACPSSAKEEPRHREPLTQEAGSVPLEDEASSDLDLEQLMEDVGRELGQSGELQHSNSDGEDFPVALFGK

SEQ ID NO: 101931 - protein, 38 aa, Homo sapiens
  Payload ID: 20311
  Gene Name: zinc finger, CW type with PWWP domain 1
  ENSP ID: ENSP00000419447
MFQAGNRRKKERHKSTSKQRRKKRKNQVLPMQNLRRLS

SEQ ID NO: 101932 - protein, 356 aa, Homo sapiens
  Payload ID: 20312
  Gene Name: zinc finger, CW type with PWWP domain 2
  Uniprot ID: Q504Y3
  ENSP ID: ENSP00000373278
MDKEKLDVKIEYCNYAMDSSVENMYVNKVWVQCENENCLKWRLLSSEDSAKVDHDEPWYCFMNTDSRYNNCSISEEDFPEESQLHQCGFKIVYSQLPLGSLVLVKLQNWPSWPGILCPDRFKGKYVTYDPDGNVEEYHIEFLGDPHSRSWIKATFVGHYSITLKPEKCKNKKKWYKSALQEACLLYGYSHEQRLEMCCLSKLQDKSETHDKVAALVKKRKQTSKNNIEKKKPKFRKRKRKAILKCSFENVYSDDALSKENRVVCETEVLLKELEQMLQQALQPTATPDESEEGHGEEINMGEKLSKCSPEAPAGSLFENHYEEDYLVIDGIKLKAGECIEDITNKFKEIDALMSEF

SEQ ID NO: 101933 - protein, 165 aa, Homo sapiens
  Payload ID: 20312
  Gene Name: zinc finger, CW type with PWWP domain 2
  ENSP ID: ENSP00000393521
  MOD_RES (1)..(1): Any amino acid
XDSSVENMYVNKVWVQCENENCLKWRLLSSEDSAKVDHDEPWYCFMNTDSRYNNCSISEEDFPEESQLHQCGFKIVYSQLPLGSLVLVKLQNWPSWPGILCPDRFKGKYVTYDPDGNVEEYHIEFLGDPHSRSWIKATFVGHYSITLKIMRSMTYIHMLLQTYKK

SEQ ID NO: 101934 - protein, 191 aa, Homo sapiens
  Payload ID: 20312
  Gene Name: zinc finger, CW type with PWWP domain 2
  ENSP ID: ENSP00000395421
  MOD_RES (1)..(1): Any amino acid
XAFSAIKMRVNAKNLPQMSRKTLGIINAEVKRINTGERRGEEKQTSKNNIEKKKPKFRKRKRKAILKCSFENVYSDDALSKENRVVCETEVLLKELEQMLQQALQPTATPDESEEGHGEEINMGEKTIFFFGDRVSLCHQGWSEVMQSLLTAISASQVQVILLPQPPEYLGLQNNNQRRFMVEDEEKLCLS

SEQ ID NO: 101935 - protein, 241 aa, Homo sapiens
  Payload ID: 20312
  Gene Name: zinc finger, CW type with PWWP domain 2
  ENSP ID: ENSP00000395687
  MOD_RES (1)..(1): Any amino acid
XWIKATFVGHYSITLKTGVQWHNLASLQHLPPRFKQFSYLSLPSSWELQPEKCKNKKKWYKSALQEACLLYGYSHEQRLEMCCLSKLQDKSETHDKVAALVKKRKQTSKNNIEKKKPKFRKRKRKAILKCSFENVYSDDALSKENRVVCETEVLLKELEQMLQQALQPTATPDESEEGHGEEINMGEKLSKCSPEAPAGSLFENHYEEDYLVIDGIKLKAGECIEDITNKFKEIDALMSEF

SEQ ID NO: 101936 - protein, 126 aa, Homo sapiens
  Payload ID: 20312
  Gene Name: zinc finger, CW type with PWWP domain 2
  ENSP ID: ENSP00000395930
MDKEKLDVKIEYCNYAMDSSVENMYVNKVWVQCENENCLKWRLLSSEDSAKVDHDEPWYCFMNTDSRYNNCSISEEDFPEESQLHQCGFKIVYSQLPLGSLVLVKLQNWPSWPGILCPDRFKGKYV

SEQ ID NO: 101937 - protein, 2354 aa, Homo sapiens
  Payload ID: 20313
  Gene Name: zinc finger, DBF-type containing 2
  Uniprot ID: Q9HCK1
  ENSP ID: ENSP00000363545
MQKRQGYCSYCRVQYNNLEQHLFSAQHRSLTRQSRRQICTSSLMERFLQDVLQHHPYHCQESSSTQDETHVNTGSSSEVVHLDDAFSEEEEEDEDKVEDEDATEERPSEVSEPIEELHSRPHKSQEGTQEVSVRPSVIQKLEKGQQQPLEFVHKIGASVRKCNLVDIGQATNNRSNLVRPPVICNAPASCLPESSNDRPVTANTTSLPPAAHLDSVSKCDPNKVEKYLEQPDGASRNPVPSSHVETTSFSYQKHKESNRKSLRMNSDKLVLWKDVKSQGKTLSAGLKFHERMGTKGSLRVKSPSKLAVNPNKTDMPSNKGIFEDTIAKNHEEFFSNMDCTQEEKHLVFNKTAFWEQKCSVSSEMKFDCISLQSASDQPQETAQDLSLWKEEQIDQEDNYESRGSEMSFDCSSSFHSLTDQSKVSAKEVNLSKEVRTDVQYKNNKSYVSKISSDCDDILHLVTNQSQMIVKEISLQNARHISLVDQSYESSSSETNFDCDASPQSTSDYPQQSVTEVNLPKEVHIGLVDKNYGSSSSEVSADSVFPLQSVVDRPPVAVTETKLRKKAHTSLVDNYGSSCSETSFDCDVSLESVVDHPQLTVKGRNLKGRQVHLKHKKRKPSSAKAHLDCDVSLGTVADESQRAVEKINLLKEKNADLMDMNCESHGPEMGFQADAQLADQSQVAEIERQKVDVDLENKSVQSSRSSLSSDSPASLYHSAHDEPQEALDEVNLKELNIDMEVRSYDCSSSELTFDSDPPLLSVTEQSHLDAEGKERHIDLEDESCESDSSEITFDSDIPLYSVIDQPEVAVYEEETVDLESKSNESCVSEITFDSDIPLHSGNDHPEVAVKEVIQKEEYIHLERKNDEPSGSEISSDSHAPLHSVTNSPEVAVKKLNPQKEEQVHLENKENEPIDSEVSLDYNIIFHSVTGRSEDPIKEISLHTKEHMYLENKSVFETSLDSDVPLQAATHKPEVIVKETWLQREKHAEFQGRSTEFSGSKTSLDSGVPHYSVTEPQVAVNKINRKKQYVLENKNDKCSGSEIILDSNVPPQSMTDQPQLAFLKEKHVNLKDKNSKSGDSKITFDSEQLQEAVKKIDQWKEEVIGLKNKINEPSTYKLIHHPDVSVQSVADQPKVAIKHVNLGNENHMYLEVKNSQYSCSEMNLDSGFLGQSIVNRPQITILEQEHIELEGKHNQCCGSEVSFDSDDPLQSVADRLRETVKEISLWKDEEVDTEDRRNEAKGFEIMYDSDVLQPVAGQPEEVVKEVSLWKEHVDLENKIVKPTDSRINFDSHEPLQSVTNKIPGANKEINLLREEHVCLDDKGYVPSDSEIIYVSNIPLQSVIKQPHILEEEHASLEDKSSNSYSPEESSDSNDSFQAAADELQKPVKEINLWKEDHIYLEDKSYKLGDFDVSYASHIPVQFVTDQSSVPVKEINLQKKDHNDLENKNCEVCGSEIKCHSCVHLQSEVDQPQVSYKEADLQKEEHVVMEEKTDQPSDSEMMYDSDVPFQIVVNQFPGSVKETHLPKVVLVDLVPGDSDYEVISDDIPLQLVTDPPQLTVKDISCINTECIDIEDKSCDFFGSEVRCNCKASTPSMTNQCKETFKIINRKKDYIILGEPSCQSCGSEMNFNVDASDQSMTYESQGPDEKMVKYIDSEDKSCGYNGSKGKFNLEDTSHRTTHRLQKAHKEASLRKDPRNAGLKGKSCQSSASAVDFGASSKSALHRRADKKKRSKLKHRDLEVSCEPDGFEMNFQCAPPLPSDTDQPQETVKKRHPCKKVSSDLKEKNHDSQSSSVLKVDSVRNLKKAKDVIEDNPDEPVLEALPHVPPSFVGKTWSQIMREDDIKINALVKEFREGRFHCYFDDDCETKKVSSKGKKKVTWADLQGKEDTAPTQAVSESDDIVCGISDIDDLSVALDKPCHRHPPAERPPKQKGRVASQCQTAKISHSTQTSCKNYPVMKRKIIRQEEDPPKSKCSRLQDDRKTKKKVKIGTVEFPASCTKVLKPMQPKALVCVLSSLNIKLKEGEGLPFPKMRHHSWDNDIRFICKYKRNIFDYYEPLIKQIVISPPLSVIVPEFERRNWVKIHFNRSNQNSSAGDNDADGQGSASAPLMAVPARYGFNSHQGTSDSSLFLEESKVLHARELPKKRNFQLTFLNHDVVKISPKSVRNKLLESQSKKKIHGKRVTTSSNKLGFPKKVYKPIILQQKPRKASEKQSIWIRTKPSDIIRKYISKYSVFLRHRYQSRSAFLGRYLKKKKSVVSRLKKAKRTAKVLLNSSVPPAGAEELSSAMANPPPKRPVRASCRVARRRKKTDESYHGRQKGPSTPVRAYDLRSSSCLQQRERMMTRLANKLRGNEVK

SEQ ID NO: 101938 - protein, 2352 aa, Homo sapiens
  Payload ID: 20313
  Gene Name: zinc finger, DBF-type containing 2
  ENSP ID: ENSP00000478626
MIPDGSSEIQEVMKNSGKHLFSAQHRSLTRQSRRQICTSSLMERFLQDVLQHHPYHCQESSSTQDETHVNTGSSSEVVHLDDAFSEEEEEDEDKVEDEDATEERPSEVSEPIEELHSRPHKSQEGTQEVSVRPSVIQKLEKGQQQPLEFVHKIGASVRKCNLVDIGQATNNRSNLVRPPVICNAPASCLPESSNDRPVTANTTSLPPAAHLDSVSKCDPNKVEKYLEQPDGASRNPVPSSHVETTSFSYQKHKESNRKSLRMNSDKLVLWKDVKSQGKTLSAGLKFHERMGTKGSLRVKSPSKLAVNPNKTDMPSNKGIFEDTIAKNHEEFFSNMDCTQEEKHLVFNKTAFWEQKCSVSSEMKFDCISLQSASDQPQETAQDLSLWKEEQIDQEDNYESRGSEMSFDCSSSFHSLTDQSKVSAKEVNLSKEVRTDVQYKNNKSYVSKISSDCDDILHLVTNQSQMIVKEISLQNARHISLVDQSYESSSSETNFDCDASPQSTSDYPQQSVTEVNLPKEVHIGLVDKNYGSSSSEVSADSVFPLQSVVDRPPVAVTETKLRKKAHTSLVDNYGSSCSETSFDCDVSLESVVDHPQLTVKGRNLKGRQVHLKHKKRKPSSAKAHLDCDVSLGTVADESQRAVEKINLLKEKNADLMDMNCESHGPEMGFQADAQLADQSQVAEIERQKVDVDLENKSVQSSRSSLSSDSPASLYHSAHDEPQEALDEVNLKELNIDMEVRSYDCSSSELTFDSDPPLLSVTEQSHLDAEGKERHIDLEDESCESDSSEITFDSDIPLYSVIDQPEVAVYEEETVDLESKSNESCVSEITFDSDIPLHSGNDHPEVAVKEVIQKEEYIHLERKNDEPSGSEISSDSHAPLHSVTNSPEVAVKKLNPQKEEQVHLENKENEPIDSEVSLDYNIIFHSVTGRSEDPIKEISLHTKEHMYLENKSVFETSLDSDVPLQAATHKPEVIVKETWLQREKHAEFQGRSTEFSGSKTSLDSGVPHYSVTEPQVAVNKINRKKQYVLENKNDKCSGSEIILDSNVPPQSMTDQPQLAFLKEKHVNLKDKNSKSGDSKITFDSEQLQEAVKKIDQWKEEVIGLKNKINEPSTYKLIHHPDVSVQSVADQPKVAIKHVNLGNENHMYLEVKNSQYSCSEMNLDSGFLGQSIVNRPQITILEQEHIELEGKHNQCCGSEVSFDSDDPLQSVADRLRETVKEISLWKDEEVDTEDRRNEAKGFEIMYDSDVLQPVAGQPEEVVKEVSLWKEHVDLENKIVKPTDSRINFDSHEPLQSVTNKIPGANKEINLLREEHVCLDDKGYVPSDSEIIYVSNIPLQSVIKQPHILEEEHASLEDKSSNSYSPEESSDSNDSFQAAADELQKPVKEINLWKEDHIYLEDKSYKLGDFDVSYASHIPVQFVTDQSSVPVKEINLQKKDHNDLENKNCEVCGSEIKCHSCVHLQSEVDQPQVSYKEADLQKEEHVVMEEKTDQPSDSEMMYDSDVPFQIVVNQFPGSVKETHLPKVVLVDLVPGDSDYEVISDDIPLQLVTDPPQLTVKDISCINTECIDIEDKSCDFFGSEVRCNCKASTPSMTNQCKETFKIINRKKDYIILGEPSCQSCGSEMNFNVDASDQSMTYESQGPDEKMVKYIDSEDKSCGYNGSKGKFNLEDTSHRTTHRLQKAHKEASLRKDPRNAGLKGKSCQSSASAVDFGASSKSALHRRADKKKRSKLKHRDLEVSCEPDGFEMNFQCAPPLPSDTDQPQETVKKRHPCKKVSSDLKEKNHDSQSSSVLKVDSVRNLKKAKDVIEDNPDEPVLEALPHVPPSFVGKTWSQIMREDDIKINALVKEFREGRFHCYFDDDCETKKVSSKGKKKVTWADLQGKEDTAPTQAVSESDDIVCGISDIDDLSVALDKPCHRHPPAERPPKQKGRVASQCQTAKISHSTQTSCKNYPVMKRKIIRQEEDPPKSKCSRLQDDRKTKKKVKIGTVEFPASCTKVLKPMQPKALVCVLSSLNIKLKEGEGLPFPKMRHHSWDNDIRFICKYKRNIFDYYEPLIKQIVISPPLSVIVPEFERRNWVKIHFNRSNQNSSAGDNDADGQGSASAPLMAVPARYGFNSHQGTSDSSLFLEESKVLHARELPKKRNFQLTFLNHDVVKISPKSVRNKLLESQSKKKIHGKRVTTSSNKLGFPKKVYKPIILQQKPRKASEKQSIWIRTKPSDIIRKYISKYSVFLRHRYQSRSAFLGRYLKKKKSVVSRLKKAKRTAKVLLNSSVPPAGAEELSSAMANPPPKRPVRASCRVARRRKKTDESYHGRQKGPSTPVRAYDLRSSSCLQQRERMMTRLANKLRGNEVK

SEQ ID NO: 101939 - protein, 485 aa, Homo sapiens
  Payload ID: 20314
  Gene Name: zinc finger, DHHC-type containing 1
  Uniprot ID: Q8WTX9
  ENSP ID: ENSP00000340299
MYKMNICNKPSNKTAPEKSVWTAPAQPSGPSPELQGQRSRRNGWSWPPHPLQIVAWLLYLFFAVIGFGILVPLLPHHWVPAGYACMGAIFAGHLVVHLTAVSIDPADANVRDKSYAGPLPIFNRSQHAHVIEDLHCNLCNVDVSARSKHCSACNKCVCGFDHHCKWLNNCVGERNYRLFLHSVASALLGVLLLVLVATYVFVEFFVNPMRLRTNRHFEVLKNHTDVWFVFLPAAPVETQAPAILALAALLILLGLLSTALLGHLLCFHIYLMWHKLTTYEYIVQHRPPQEAKGVHRELESCPPKMRPIQEMEFYMRTFRHMRPEPPGQAGPAAVNAKHSRPASPDPTPGRRDCAGPPVQVEWDRKKPLPWRSPLLLLAMWGPQAPPCLCRKRGRGACIKCERLRPRIRRRGLGPPAAAPARRRIPRTPALCTPLALPAPTTRRRQSPWTRFQWRRRAWAAPLWPPRGAGADSPRWRGRRVRPPFS

SEQ ID NO: 101940 - protein, 351 aa, Homo sapiens
  Payload ID: 20314
  Gene Name: zinc finger, DHHC-type containing 1
  ENSP ID: ENSP00000459264
EDLHCNLCNVDVSARSKHCSACNKCVCGFDHHCKWLNNCVGERNYRLFLHSVASALLGVLLLVLVATYVFVEFFVNPMRLRTNRHFEVLKNHTDVWFVFLPAAPVETQAPAILALAALLILLGLLSTALLGHLLCFHIYLMWHKLTTYEYIVQHRPPQEAKGVHRELESCPPKMRPIQEMEFYMRTFRHMRPEPPGQAGPAAVNANPSQFLATRGQAEPPPPSSPDTLALPPRIRPQKKRKRRVYKVRTSETSDPASGPRAPSRRSSSSTDSADASPVHAAGPAGAYHSASAESVDEIPVAQTRLGSAALAAPRGRGRQPTLARQARAPAVFVSPSSGEPRAPGGREAGLA

SEQ ID NO: 101941 - protein, 412 aa, Homo sapiens
  Payload ID: 20315
  Gene Name: zinc finger, DHHC-type containing 11
  Uniprot ID: Q9H8X9
  ENSP ID: ENSP00000283441
MDTRSGSQCSVTPEAILNNEKLVLPPRISRVNGWSLPLHYFQVVTWAVFVGLSSATFGIFIPFLPHAWKYIAYVVTGGIFSFHLVVHLIASCIDPADSNVRLMKNYSQPMPLFDRSKHAHVIQNQFCHLCKVTVNKKTKHCISCNKCVSGFDHHCKWINNCVGSRNYWFFFSTVASATAGMLCLIAILLYVLVQYLVNPGVLRTDPRYEDVKNMNTWLLFLPLFPVQVQTLIVVIIGMLVLLLDFLGLVHLGQLLIFHIYLKAKKMTTFEYLINNRKEESSKHQAVRKDPYVQMDKGVLQQGAGALGSSAQGVKAKSSLLIHKHLCHFCTSVNQDGDSTAREGDEDPCPSALGAKARNSRLICRRLCQFSTRVHPDGGSMAQEADDAPSISTLGLQQETTEPMKTDSAESED

SEQ ID NO: 101942 - protein, 213 aa, Homo sapiens
  Payload ID: 20315
  Gene Name: zinc finger, DHHC-type containing 11
  ENSP ID: ENSP00000397719
MLQARNQSPSSQRPLDVLRRNQDPQSPASISVIIFITPKEEPALQEGLHLQEDGLPATAEDAATCLTVLSSQPASCRASCCLRADGPGMLAHPVSTVWEMGAQYEMGAQYWEMGAHSTGKWEHSTEKWEHSTEKWEYTTEKWEHSTGKWAYSTEKWEHSTGKWETVLGNGSPQYWERGVTVLGNGSTGKWEHSTGKWEHSTGKPQTWILSFSA

SEQ ID NO: 101943 - protein, 221 aa, Homo sapiens
  Payload ID: 20315
  Gene Name: zinc finger, DHHC-type containing 11
  ENSP ID: ENSP00000423817
HCISCNKCVSGFDHHCKWINNCVGSRNYWFFFSTVASATAGMLCLIAILLYVLVQYLVNPGVLRTDPRYEDVKNMNTWLLFLPLFPVQVQTLIVVIIGMLVLLLDFLGLVHLGQLLIFHIYLKAKKMTTFEYLINNRKEESSKHQAVRKDPYVQMDKGVLQQGAGALGSSAQGVKAKSSLLIHKHLCHFCTSVNQDGDSTARGHLTTLPQDFREQAPVTWK

SEQ ID NO: 101944 - protein, 51 aa, Homo sapiens
  Payload ID: 20315
  Gene Name: zinc finger, DHHC-type containing 11
  ENSP ID: ENSP00000426873
MKVQTLIVVIIGMLVLLLDFLGLVHLGQLLIFHIYLKAKKMTTFEYLINNR

SEQ ID NO: 101945 - protein, 142 aa, Homo sapiens
  Payload ID: 20315
  Gene Name: zinc finger, DHHC-type containing 11
  Uniprot ID: Q9H8X9
  ENSP ID: ENSP00000427067
MNTWLLFLPLFPVQVQTLIVVIIGMLVLLLDFLGLVHLGQLLIFHIYLSMSPTLSPRSPQGWVVRAAHLTPLLEYVPNPEPPTPGARVFVPRVRMCSGSASPRSEIMDKKGKSQEEIKSMRTQQAQQEAELTPRPAGVVPGA

SEQ ID NO: 101946 - protein, 382 aa, Homo sapiens
  Payload ID: 20316
  Gene Name: zinc finger, DHHC-type containing 11B
  ENSP ID: ENSP00000442373
MAQVLPFCVLQMDTRSGSQCSVTPEAIRNNEELVLPPRISRVNGWSLPLHYFRVVTWAVFVGLSLATFRIFIPLLPHSWKYIAYVVTGGIFSFHLVVHLIASCIDPADSNVRLMKNYSQPMPLFDRSKHAHVIQNQFCHLCKVTVNKKTKHCISCNKCVSGFDHHCKWINNCVGSRNYWFFFSTVASATAGMLCLIAILLYVLVQYLVNPRVLRTDPRYEDVKNMNTWLLFLPLFPVQVQTLIVVIIRMLVLLLDLLGLVQLGQLLIFHIYLKAKKMTTFEYLINTRKEESSKHQAVRKDPYVQMDKGFLQQGAGALGSSAQGVKAKSSLLIYKCPCHFCTSVNQDGDSKAQEADDAPSTSTLGLQQETTEPMKTDSAESED

SEQ ID NO: 101947 - protein, 371 aa, Homo sapiens
  Payload ID: 20316
  Gene Name: zinc finger, DHHC-type containing 11B
  Uniprot ID: P0C7U3
  ENSP ID: ENSP00000445280
MDTRSGSQCSVTPEAIRNNEELVLPPRISRVNGWSLPLHYFRVVTWAVFVGLSLATFRIFIPLLPHSWKYIAYVVTGGIFSFHLVVHLIASCIDPADSNVRLMKNYSQPMPLFDRSKHAHVIQNQFCHLCKVTVNKKTKHCISCNKCVSGFDHHCKWINNCVGSRNYWFFFSTVASATAGMLCLIAILLYVLVQYLVNPRVLRTDPRYEDVKNMNTWLLFLPLFPVQVQTLIVVIIRMLVLLLDLLGLVQLGQLLIFHIYLKAKKMTTFEYLINTRKEESSKHQAVRKDPYVQMDKGFLQQGAGALGSSAQGVKAKSSLLIYKCPCHFCTSVNQDGDSKAQEADDAPSTSTLGLQQETTEPMKTDSAESED

SEQ ID NO: 101948 - protein, 142 aa, Homo sapiens
  Payload ID: 20316
  Gene Name: zinc finger, DHHC-type containing 11B
  ENSP ID: ENSP00000484004
MNTWLLFLPLFPVQVQTLIVVIIRMLVLLLDLLGLVQLGQLLIFHIYLSMSPTLSPRSPQAWLVRAAHLTPLLEYVPNPEPPTPGARVFVPRVRMCSGSASPRSEIMDKKGKSQEEIKSMRAQQAQQEAELTLRPAGALPGA

SEQ ID NO: 101949 - protein, 267 aa, Homo sapiens
  Payload ID: 20317
  Gene Name: zinc finger, DHHC-type containing 12
  Uniprot ID: Q96GR4
  ENSP ID: ENSP00000361748
MAPWALLSPGVLVRTGHTVLTWGITLVLFLHDTELRQWEEQGELLLPLTFLLLVLGSLLLYLAVSLMDPGYVNVQPQPQEELKEEQTAMVPPAIPLRRCRYCLVLQPLRARHCRECRRCVRRYDHHCPWMENCVGERNHPLFVVYLALQLVVLLWGLYLAWSGLRFFQPWGQWLRSSGLLFATFLLLSLFSLVASLLLVSHLYLVASNTTTWEFISSHRIAYLRQRPSNPFDRGLTRNLAHFFCGWPSGSWETLWAEEEEEGSSPAV

SEQ ID NO: 101950 - protein, 281 aa, Homo sapiens
  Payload ID: 20317
  Gene Name: zinc finger, DHHC-type containing 12
  ENSP ID: ENSP00000361752
MAPWALLSPGVLVRTGHTVLTWGITLVLFLHDTGEPDPERPRTHPIPQLRQWEEQGELLLPLTFLLLVLGSLLLYLAVSLMDPGYVNVQPQPQEELKEEQTAMVPPAIPLRRCRYCLVLQPLRARHCRECRRCVRRYDHHCPWMENCVGERNHPLFVVYLALQLVVLLWGLYLAWSGLRFFQPWGQWLRSSGLLFATFLLLSLFSLVASLLLVSHLYLVASNTTTWEFISSHRIAYLRQRPSNPFDRGLTRNLAHFFCGWPSGSWETLWAEEEEEGSSPAV

SEQ ID NO: 101951 - protein, 210 aa, Homo sapiens
  Payload ID: 20317
  Gene Name: zinc finger, DHHC-type containing 12
  ENSP ID: ENSP00000384205
MAPWALLSPGVLVRTGHTVLTWGITLVLFLHDTDKSADELLATHSHSWNQHLQAFAQPGTHFPTSNCTPTPPTPVLPGPASLCSPASPELRQWEEQGELLLPLTFLLLVLGSLLLYLAVSLMDPGYVNVQPQPQEELKEEQTAMVPPAIPLRRCRYCLVLQPLRARHCRECRRCVRRYDHHCPWMENCVGERNHPLFVVYLALQLVVLLW

SEQ ID NO: 101952 - protein, 205 aa, Homo sapiens
  Payload ID: 20317
  Gene Name: zinc finger, DHHC-type containing 12
  ENSP ID: ENSP00000387587
MAPWALLSPGVLVRTGHTVLTWGITLVLFLHDTELRQWEEQGELLLPLTFLLLVLGSLLLYLAVSLMDPGYVNVQPQPQEELKEEQTAMVPPAIPLRRCRYCLVLQPLRARHCRECRRCVRRYDHHCPWMENCVGERNHPLFVVYLALQLVVLLWGLYLACTRPLSPAPQVRPPVLPALGSVVAVQRAPVRHLPAAVPLLVGGQP

SEQ ID NO: 101953 - protein, 492 aa, Homo sapiens
  Payload ID: 20318
  Gene Name: zinc finger, DHHC-type containing 13
  Uniprot ID: Q8IUH4
  ENSP ID: ENSP00000382288
MVILLLQHGADPTLIDGEGFSSIHLAVLFQHMPIIAYLISKGQSVNMTDVNGQTPLMLSAHKVIGPEPTGFLLKFNPSLNVVDKIHQNTPLHWAVAAGNVNAVDKLLEAGSSLDIQNVKGETPLDMALQNKNQLIIHMLKTEAKMRANQKFRLWRWLQKCELFLLLMLSVITMWAIGYILDFNSDSWLLKGCLLVTLFFLTSLFPRFLVGYKNLVYLPTAFLLSSVFWIFMTWFILFFPDLAGAPFYFSFIFSIVAFLYFFYKTWATDPGFTKASEEEKKVNIITLAETGSLDFRTFCTSCLIRKPLRSLHCHVCNCCVARYDQHCLWTGRCIGFGNHHYYIFFLFFLSMVCGWIIYGSFIYLSSHCATTFKEDGLWTYLNQIVACSPWVLYILMLATFHFSWSTFLLLNQLFQIAFLGLTSHERISLQKQSKHMKQTLSLRKTPYNLGFMQNLADFFQCGCFGLVKPCVVDWTSQYTMVFHPAREKVLRSV

SEQ ID NO: 101954 - protein, 622 aa, Homo sapiens
  Payload ID: 20318
  Gene Name: zinc finger, DHHC-type containing 13
  Uniprot ID: Q8IUH4
  ENSP ID: ENSP00000400113
MEGPGLGSQCRNHSHGPHPPGFGRYGICAHENKELANAREALPLIEDSSNCDIVKATQYGIFERCKELVEAGYDVRQPDKENVSLLHWAAINNRLDLVKFYISKGAVVDQLGGDLNSTPLHWAIRQGHLPMVILLLQHGADPTLIDGEGFSSIHLAVLFQHMPIIAYLISKGQSVNMTDVNGQTPLMLSAHKVIGPEPTGFLLKFNPSLNVVDKIHQNTPLHWAVAAGNVNAVDKLLEAGSSLDIQNVKGETPLDMALQNKNQLIIHMLKTEAKMRANQKFRLWRWLQKCELFLLLMLSVITMWAIGYILDFNSDSWLLKGCLLVTLFFLTSLFPRFLVGYKNLVYLPTAFLLSSVFWIFMTWFILFFPDLAGAPFYFSFIFSIVAFLYFFYKTWATDPGFTKASEEEKKVNIITLAETGSLDFRTFCTSCLIRKPLRSLHCHVCNCCVARYDQHCLWTGRCIGFGNHHYYIFFLFFLSMVCGWIIYGSFIYLSSHCATTFKEDGLWTYLNQIVACSPWVLYILMLATFHFSWSTFLLLNQLFQIAFLGLTSHERISLQKQSKHMKQTLSLRKTPYNLGFMQNLADFFQCGCFGLVKPCVVDWTSQYTMVFHPAREKVLRSV

SEQ ID NO: 101955 - protein, 109 aa, Homo sapiens
  Payload ID: 20319
  Gene Name: zinc finger, DHHC-type containing 14
  ENSP ID: ENSP00000345721
  MOD_RES (1)..(1): Any amino acid
XGGYRPPPRTKEVIINGQTVKLKYCFTCKIFRPPRASHCSLCDNCVVFIFAFVITHVILRSQQTGFLNALKDSPASVLEAVVCFFSVWSIVGLSGFHTYLISSNQTTNE

SEQ ID NO: 101956 - protein, 488 aa, Homo sapiens
  Payload ID: 20319
  Gene Name: zinc finger, DHHC-type containing 14
  Uniprot ID: Q8IZN3
  ENSP ID: ENSP00000352821
MPPGGGGPMKDCEYSQISTHSSSPMESPHKKKKIAARRKWEVFPGRNKFFCNGRIMMARQTGVFYLTLVLILVTSGLFFAFDCPYLAVKITPAIPAVAGILFFFVMGTLLRTSFSDPGVLPRATPDEAADLERQIDIANGTSSGGYRPPPRTKEVIINGQTVKLKYCFTCKIFRPPRASHCSLCDNCVERFDHHCPWVGNCVGKRNYRFFYMFILSLSFLTVFIFAFVITHVILRSQQTGFLNALKDSPASVLEAVVCFFSVWSIVGLSGFHTYLISSNQTTNEDIKGSWSNKRGKENYNPYSYGNIFTNCCVALCGPISPSLIDRRGYIQPDTPQPAAPSNGITMYGATQSQSDMCDQDQCIQSTKFVLQAAATPLLQSEPSLTSDELHLPGKPGLGTPCASLTLGPPTPPASMPNLAEATLADVMPRKDEHMGHQFLTPDEAPSPPRLLAAGSPLAHSRTMHVLGLASQDSLHEDSVRGLVKLSSV

SEQ ID NO: 101957 - protein, 473 aa, Homo sapiens
  Payload ID: 20319
  Gene Name: zinc finger, DHHC-type containing 14
  Uniprot ID: Q8IZN3
  ENSP ID: ENSP00000410713
MPPGGGGPMKDCEYSQISTHSSSPMESPHKKKKIAARRKWEVFPGRNKFFCNGRIMMARQTGVFYLTLVLILVTSGLFFAFDCPYLAVKITPAIPAVAGILFFFVMGTLLRTSFSDPGVLPRATPDEAADLERQIDIANGTSSGGYRPPPRTKEVIINGQTVKLKYCFTCKIFRPPRASHCSLCDNCVERFDHHCPWVGNCVGKRNYRFFYMFILSLSFLTVFIFAFVITHVILRSQQTGFLNALKDSPASVLEAVVCFFSVWSIVGLSGFHTYLISSNQTTNEDIKGSWSNKRGKENYNPYSYGNIFTNCCVALCGPISPSLIDRRGYIQPDTPQPAAPSNGITMYGATQSQSDMAAATPLLQSEPSLTSDELHLPGKPGLGTPCASLTLGPPTPPASMPNLAEATLADVMPRKDEHMGHQFLTPDEAPSPPRLLAAGSPLAHSRTMHVLGLASQDSLHEDSVRGLVKLSSV

SEQ ID NO: 101958 - protein, 123 aa, Homo sapiens
  Payload ID: 20319
  Gene Name: zinc finger, DHHC-type containing 14
  ENSP ID: ENSP00000428211
  MOD_RES (1)..(1): Any amino acid
XCPYLAVKITPAIPAVAGILFFFVMGTLLRTSFSDPGVLPRATPDEAADLERQIDIANGTSSGGYRPPPRTKEVIINGQTVKLKYCFTCKIFRPPRASHCSLCDNCVERFDHHCPWVHSKQDS

SEQ ID NO: 101959 - protein, 337 aa, Homo sapiens
  Payload ID: 20320
  Gene Name: zinc finger, DHHC-type containing 15
  Uniprot ID: Q96MV8
  ENSP ID: ENSP00000362465
MRRGWKMALSGGLRCCRRVLSWVPVLVIVLVVLWSYYAYVFELCLVTVLSPAEKVIYLILYHAIFVFFTWTYWKSIFTLPQQPNQKFHLSYTDKERYENEERPEVQKQMLVDMAKKLPVYTRTGSGAVRFCDRCHLIKPDRCHHCSVCAMCVLKMDHHCPWVNNCIGFSNYKFFLQFLAYSVLYCLYIATTVFSYFIKYWRGELPSVRSKFHVLFLLFVACMFFVSLVILFGYHCWLVSRNKTTLEAFCTPVFTSGPEKNGFNLGFIKNIQQVFGDKKKFWLIPIGSSPGDGHSFPMRSMNESQNPLLANEETWEDNEDDNQDYPEGSSSLAVETET

SEQ ID NO: 101960 - protein, 328 aa, Homo sapiens
  Payload ID: 20320
  Gene Name: zinc finger, DHHC-type containing 15
  Uniprot ID: Q96MV8
  ENSP ID: ENSP00000445420
MRRGWKMALSGGLRCCRRVLSWVPVLVIVLVVLWSYYAYVFELCLVIYLILYHAIFVFFTWTYWKSIFTLPQQPNQKFHLSYTDKERYENEERPEVQKQMLVDMAKKLPVYTRTGSGAVRFCDRCHLIKPDRCHHCSVCAMCVLKMDHHCPWVNNCIGFSNYKFFLQFLAYSVLYCLYIATTVFSYFIKYWRGELPSVRSKFHVLFLLFVACMFFVSLVILFGYHCWLVSRNKTTLEAFCTPVFTSGPEKNGFNLGFIKNIQQVFGDKKKFWLIPIGSSPGDGHSFPMRSMNESQNPLLANEETWEDNEDDNQDYPEGSSSLAVETET

SEQ ID NO: 101961 - protein, 296 aa, Homo sapiens
  Payload ID: 20321
  Gene Name: zinc finger, DHHC-type containing 16
  Uniprot ID: Q969W1
  ENSP ID: ENSP00000304487
MRGQRSLLLGPARLCLRLLLLLGYRRRCPPLLRGLVQRWRYGKVCLRSLLYNSFGGSDTAVDAAFEPVYWLVDNVIRWFGVGRNDIATVSICKKCIYPKPARTHHCSICNRCVLKMDHHCPWLNNCVGHYNHRYFFSFCFFMTLGCVYCSYGSWDLFREAYAAIETYHQTPPPTFSFRERMTHKSLVYLWFLCSSVALALGALTVWHAVLISRGETSIERHINKKERRRLQAKGRVFRNPYNYGCLDNWKVFLGVDTGRHWLTRVLLPSSHLPHGNGMSWEPPPWVTAHSASVMAV

SEQ ID NO: 101962 - protein, 338 aa, Homo sapiens
  Payload ID: 20321
  Gene Name: zinc finger, DHHC-type containing 16
  Uniprot ID: Q969W1
  ENSP ID: ENSP00000323360
MRGQRSLLLGPARLCLRLLLLLGYRRRCPPLLRGLVQRWRYGKVCLRSLLYNSFGGSDTAVDAAFEPVYWLVDNVIRWFGVVFVVLVIVLTGSIVAIAYLCVLPLILRTYSVPRLCWHFFYSHWNLILIVFHYYQAITTPPGYPPQGRNDIATVSICKKCIYPKPARTHHCSICNSYGSWDLFREAYAAIEKMKQLDKNKLQAVANQTYHQTPPPTFSFRERMTHKSLVYLWFLCSSVALALGALTVWHAVLISRGETSIERHINKKERRRLQAKGRVFRNPYNYGCLDNWKVFLGVDTGRHWLTRVLLPSSHLPHGNGMSWEPPPWVTAHSASVMAV

SEQ ID NO: 101963 - protein, 361 aa, Homo sapiens
  Payload ID: 20321
  Gene Name: zinc finger, DHHC-type containing 16
  Uniprot ID: Q969W1
  ENSP ID: ENSP00000345383
MRGQRSLLLGPARLCLRLLLLLGYRRRCPPLLRGLVQRWRYGKVCLRSLLYNSFGGSDTAVDAAFEPVYWLVDNVIRWFGVVFVVLVIVLTGSIVAIAYLCVLPLILRTYSVPRLCWHFFYSHWNLILIVFHYYQAITTPPGYPPQGRNDIATVSICKKCIYPKPARTHHCSICNRCVLKMDHHCPWLNNCVGHYNHRYFFSFCFFMTLGCVYCSYGSWDLFREAYAAIETYHQTPPPTFSFRERMTHKSLVYLWFLCSSVALALGALTVWHAVLISRGETSIERHINKKERRRLQAKGRVFRNPYNYGCLDNWKVFLGVDTGRHWLTRVLLPSSHLPHGNGMSWEPPPWVTAHSASVMAV

SEQ ID NO: 101964 - protein, 361 aa, Homo sapiens; identical to SEQ ID NO: 101963
  Payload ID: 20321
  Gene Name: zinc finger, DHHC-type containing 16
  Uniprot ID: Q969W1
  ENSP ID: ENSP00000359879

SEQ ID NO: 101965 - protein, 307 aa, Homo sapiens
  Payload ID: 20321
  Gene Name: zinc finger, DHHC-type containing 16
  ENSP ID: ENSP00000359883
MRGQRSLLLGPARLCLRLLLLLGYRRRCPPLLRGLVQRWRYGKVCLRSLLYNSFGGSDTAVDAAFEPVYWLVDNVIRWFGVVFVVLVIVLTGSIVAIAYLCVLPLILRTYSVPRLCWHFFYSHWNLILIVFHYYQAITTPPGYPPQGRNDIATVSICKKCIYPKPARTHHCSICNRCVLKMDHHCHILPPALSKLPTSLRPSFLSSVALALGALTVWHAVLISRGETSIERHINKKERRRLQAKGRVFRNPYNYGCLDNWKVFLGVDTGRHWLTRVLLPSSHLPHGNGMSWEPPPWVTAHSASVMAV

SEQ ID NO: 101966 - protein, 377 aa, Homo sapiens
  Payload ID: 20321
  Gene Name: zinc finger, DHHC-type containing 16
  Uniprot ID: Q969W1
  ENSP ID: ENSP00000359891
MRGQRSLLLGPARLCLRLLLLLGYRRRCPPLLRGLVQRWRYGKVCLRSLLYNSFGGSDTAVDAAFEPVYWLVDNVIRWFGVVFVVLVIVLTGSIVAIAYLCVLPLILRTYSVPRLCWHFFYSHWNLILIVFHYYQAITTPPGYPPQGRNDIATVSICKKCIYPKPARTHHCSICNRCVLKMDHHCPWLNNCVGHYNHRYFFSFCFFMTLGCVYCSYGSWDLFREAYAAIEKMKQLDKNKLQAVANQTYHQTPPPTFSFRERMTHKSLVYLWFLCSSVALALGALTVWHAVLISRGETSIERHINKKERRRLQAKGRVFRNPYNYGCLDNWKVFLGVDTGRHWLTRVLLPSSHLPHGNGMSWEPPPWVTAHSASVMAV

SEQ ID NO: 101967 - protein, 377 aa, Homo sapiens; identical to SEQ ID NO: 101966
  Payload ID: 20321
  Gene Name: zinc finger, DHHC-type containing 16
  Uniprot ID: Q969W1
  ENSP ID: ENSP00000377357

SEQ ID NO: 101968 - protein, 301 aa, Homo sapiens
  Payload ID: 20321
  Gene Name: zinc finger, DHHC-type containing 16
  ENSP ID: ENSP00000396286
  MOD_RES (1)..(1): Any amino acid
XAVDAAFEPVYWLVDNVIRWFGVVFVVLVIVLTGSIVAIAYLCVLPLILRTYSVPRLCWHFFYSHWNLILIVFHYYQAITTPPGYPPQGRNDIATVSICKKCIYPKPARTHHCSICNRCVLKMDHHCPWLNNCVGHYNHRYFFSFCFFMTLGCVYCSYGSWDLFREAYAAIEKMKQLDKNKLQAVANQTYHQTPPPTFSFRERMTHKSLVYLWFLCSRGETSIERHINKKERRRLQAKGRVFRNPYNYGCLDNWKVFLGVDTGRHWLTRVLLPSSHLPHGNGMSWEPPPWVTAHSASVMAV

SEQ ID NO: 101969 - protein, 242 aa, Homo sapiens
  Payload ID: 20321
  Gene Name: zinc finger, DHHC-type containing 16
  ENSP ID: ENSP00000398532
MRGQRSLLLGPARLCLRLLLLLGYRRRCPPLLRGLVQRWRYGKVCLRSLLYNSFGGSDTAVDAAFEPVYWLVDNVIRWFGVGRNDIATVSICKKCIYPKPARTHHCSICNRCVLKMDHHCPWLNNCVGHYNHRYFFSFCFFMTLGCVYCSYGSWDLFREAYAAIEKMKQLDKNKLQAVANQTYHQTPPPTFSFRERMTHKSLVYLWFLCSSVALALGALTVWHAVLISRGETSIERHINKKE

SEQ ID NO: 101970 - protein, 213 aa, Homo sapiens
  Payload ID: 20321
  Gene Name: zinc finger, DHHC-type containing 16
  ENSP ID: ENSP00000400719
MRGQRSLLLGPARLCLRLLLLLGYRRRCPPLLRGLVQRWRYGKVCLRSLLYNSFGGSDTAVDAAFEPVYWLVDNVIRWFGVVFVVLVIVLTGSIVAIAYLCVLPLILRTYSVPRLCWHFFYSHWNLILIVFHYYQAITTPPGYPPQGRNDIATVSICKKCIYPKPARTHHCSICNRCVLKMDHHCPWLNNCVGHYNHRYFFSFCFFMTLGCVY

SEQ ID NO: 101971 - protein, 319 aa, Homo sapiens
  Payload ID: 20321
  Gene Name: zinc finger, DHHC-type containing 16
  ENSP ID: ENSP00000405240
  MOD_RES (1)..(1): Any amino acid
XRRCPPLLRGLVQRWRYGKVCLRSLLYNSFGGSDTAVDAAFEPVYWLVDNVIRWFGVVFVVLVIVLTGSIVAIAYLCVLPLILRTYSVPRLCWHFFYSHWNLILIVFHYYQAITTPPGYPPQGRNDIATVSICKKCIYPKPARTHHCSICNRCVLKMDHHCPWLNNCVGHYNHRYFFSFCFFMTLGCVYCSYGSWDLFREAYAAIETYHQTPPPTFSFRERMTHKSLVYLWFLCSRGETSIERHINKKERRRLQAKGRVFRNPYNYGCLDNWKVFLGVDTGRHWLTRVLLPSSHLPHGNGMSWEPPPWVTAHSASVMAV

SEQ ID NO: 101972 - protein, 632 aa, Homo sapiens
  Payload ID: 20322
  Gene Name: zinc finger, DHHC-type containing 17
  Uniprot ID: Q8IUH5
  ENSP ID: ENSP00000403397
MQREEGFNTKMADGPDEYDTEAGCVPLLHPEEIKPQSHYNHGYGEPLGRKTHIDDYSTWDIVKATQYGIYERCRELVEAGYDVRQPDKENVTLLHWAAINNRIDLVKYYISKGAIVDQLGGDLNSTPLHWATRQGHLSMVVQLMKYGADPSLIDGEGCSCIHLAAQFGHTSIVAYLIAKGQDVDMMDQNGMTPLMWAAYRTHSVDPTRLLLTFNVSVNLGDKYHKNTALHWAVLAGNTTVISLLLEAGANVDAQNIKGESALDLAKQRKNVWMINHLQEARQAKGYDNPSFLRKLKADKEFRQKVMLGTPFLVIWLVGFIADLNIDSWLIKGLMYGGVWATVQFLSKSFFDHSMHSALPLGIYLATKFWMYVTWFFWFWNDLNFLFIHLPFLANSVALFYNFGKSWKSDPGIIKATEEQKKKTIVELAETGSLDLSIFCSTCLIRKPVRSKHCGVCNRCIAKFDHHCPWVGNCVGAGNHRYFMGYLFFLLFMICWMIYGCISYWGLHCETTYTKDGFWTYITQIATCSPWMFWMFLNSVFHFMWVAVLLMCQMYQISCLGITTNERMNARRYKHFKVTTTSIESPFNHGCVRNIIDFFEFRCCGLFRPVIVDWTRQYTIEYDQISGSGYQLV

SEQ ID NO: 101973 - protein, 44 aa, Homo sapiens
  Payload ID: 20322
  Gene Name: zinc finger, DHHC-type containing 17
  ENSP ID: ENSP00000446954
  MOD_RES (1)..(1): Any amino acid
XFNTKMADGPDEYDTEAGCVPLLHPENGLARCGPLHLGLLSLQN

SEQ ID NO: 101974 - protein, 35 aa, Homo sapiens
  Payload ID: 20322
  Gene Name: zinc finger, DHHC-type containing 17
  ENSP ID: ENSP00000447871
MQREEGFNTKMADGPDEYDTEAGCVPLLHPEIWNI

SEQ ID NO: 101975 - protein, 35 aa, Homo sapiens
  Payload ID: 20322
  Gene Name: zinc finger, DHHC-type containing 17
  ENSP ID: ENSP00000447934
NTKMADGPDEYDTEAGCVPLLHPEFEMELRSCCPG

SEQ ID NO: 101976 - protein, 155 aa, Homo sapiens
  Payload ID: 20322
  Gene Name: zinc finger, DHHC-type containing 17
  ENSP ID: ENSP00000448757
  MOD_RES (1)..(1): Any amino acid
XIVKATQYGIYERCRELVEAGYDVRQPDKENVTLLHWAAINNRIDLVKYYISKGAIVDQLGGDLNSTPLHWATRQGHLSMVVQLMKYGADPSLIDGEGCSCIHLAAQFGHTSIVAYLIAKGQDYFKKCTCILEMLSEVAEDIPDNTIKVNPEMDL

SEQ ID NO: 101977 - protein, 201 aa, Homo sapiens
  Payload ID: 20322
  Gene Name: zinc finger, DHHC-type containing 17
  ENSP ID: ENSP00000449551
  MOD_RES (1)..(1): Any amino acid
XEEGFNTKMADGPDEYDTEAGCVPLLHPEEIKPQSHYNHGYGEPLGRKTHIDDYSTWDIVKATQYGIYERCRELVEAGYDVRQPDKENVTLLHWAAINNRIDLVKYYISKGAIVDQLGGDLNSTPLHWATRQGHLSMVVQLMKYGADPSLIDGEGCSCIHLAAQFGHTSIVAYLIAKGQDVDMMDQNGMTPLMWAAYRTHS

SEQ ID NO: 101978 - protein, 28 aa, Homo sapiens
  Payload ID: 20322
  Gene Name: zinc finger, DHHC-type containing 17
  ENSP ID: ENSP00000449728
NTKMADGPDEYDTEAGCVPLLHPEIWNI

SEQ ID NO: 101979 - protein, 161 aa, Homo sapiens
  Payload ID: 20322
  Gene Name: zinc finger, DHHC-type containing 17
  ENSP ID: ENSP00000449734
MALPDVGPFTLDYSAFRTDVDMMDQNGMTPLMWAAYRTHSVDPTRLLLTFNVSVNLGDKYHKNTALHWAVLAGNTTVISLLLEAGANVDAQNIKGESALDLAKQRKNVWMINHLQEARQAKGYDNPSFLRKLKADKEFRQKVMLGTPFLVIWLVGFIADLN

SEQ ID NO: 101980 - protein, 48 aa, Homo sapiens
  Payload ID: 20322
  Gene Name: zinc finger, DHHC-type containing 17
  ENSP ID: ENSP00000449836
  MOD_RES (1)..(1): Any amino acid
XSGLCAPSPPRDMEYMNAVENWWKQVMMYGNRTKKMLPSSIGLPSITE

SEQ ID NO: 101981 - protein, 126 aa, Homo sapiens
  Payload ID: 20322
  Gene Name: zinc finger, DHHC-type containing 17
  ENSP ID: ENSP00000450295
MGIVMSFQEIKPQSHYNHGYGEPLGRKTHIDDYSTWDIVKATQYGIYERCRELVEAGYDVRQPDKENVTLLHWAAINNRIDLVKYYISKGAIVDQLGGDLNSTPLHWATRQGHLSMVVQLMKYGAD

SEQ ID NO: 101982 - protein, 253 aa, Homo sapiens
  Payload ID: 20323
  Gene Name: zinc finger, DHHC-type containing 18
  Uniprot ID: Q9NUE0
  ENSP ID: ENSP00000363256
MSCLLQTSFTDPGILPRATVCEAAALEKQIDNTGSSTYRPPPRTREVLINGQMVKLKYCFTCKMFRPPRTSHCSVCDNCVERFDHHCPWVGNCVGRRNYRFFYAFILSLSFLTAFIFACVVTHLTLRAQGSNFLSTLKETPASVLELVICFFSIWSILGLSGFHTYLVASNLTTNEDIKGSWSSKRGGEASVNPYSHKSIITNCCAVLCGPLPPSLIDRRGFVQSDTVLPSPIRSDEPACRAKPDASMVGGHP

SEQ ID NO: 101983 - protein, 388 aa, Homo sapiens
  Payload ID: 20323
  Gene Name: zinc finger, DHHC-type containing 18
  Uniprot ID: Q9NUE0
  ENSP ID: ENSP00000363257
MKDCEYQQISPGAAPLPASPGARRPGPAASPTPGPGPAPPAAPAPPRWSSSGSGSGSGSGSLGRRPRRKWEVFPGRNRFYCGGRLMLAGHGGVFALTLLLILTTTGLFFVFDCPYLARKLTLAIPIIAAILFFFVMSCLLQTSFTDPGILPRATVCEAAALEKQIDNTGSSTYRPPPRTREVLINGQMVKLKYCFTCKMFRPPRTSHCSVCDNCVERFDHHCPWVGNCVGRRNYRFFYAFILSLSFLTAFIFACVVTHLTLRAQGSNFLSTLKETPASVLELVICFFSIWSILGLSGFHTYLVASNLTTNEDIKGSWSSKRGGEASVNPYSHKSIITNCCAVLCGPLPPSLIDRRGFVQSDTVLPSPIRSDEPACRAKPDASMVGGHP

SEQ ID NO: 101984 - protein, 158 aa, Homo sapiens
  Payload ID: 20323
  Gene Name: zinc finger, DHHC-type containing 18
  ENSP ID: ENSP00000435510
MSCLLQTSFTDPGILPRATVCEAAALEKQIDNTGSSTYRPPPRTREVLINGQMVKLKYCFTCKMFRPPRTSHCSVCDNCVERFDHHCPWVGNCVGRRNYRFFYAFILSLSFLTAFIFACVVTHLTLRAQGSNFLSTLKETPASVLELVICFFSIWSIL

SEQ ID NO: 101985 - protein, 161 aa, Homo sapiens
  Payload ID: 20323
  Gene Name: zinc finger, DHHC-type containing 18
  ENSP ID: ENSP00000436203
  MOD_RES (1)..(1): Any amino acid
XFYAFILSLSFLTAFIFACVVTHLTLRAQGSNFLSTLKETPASVLELVICFFSIWSILGLSGFHTYLVASNLTTNEDIKGSWSSKRGGEASVNPYSHKSIITNCCAVLCGPLPPSLIDRRGFVQSDTVLPSPIRSDEPACRAKPDASMEDTCQDFAISCTA

SEQ ID NO: 101986 - protein, 309 aa, Homo sapiens
  Payload ID: 20324
  Gene Name: zinc finger, DHHC-type containing 19
  Uniprot ID: Q8WVZ1
  ENSP ID: ENSP00000296326
MTLLTDATPLVKEPHPLPLVPRPWFLPSLFAAFNVVLLVFFSGLFFAFPCRWLAQNGEWAFPVITGSLFVLTFFSLVSLNFSDPGILHQGSAEQGPLTVHVVWVNHGAFRLQWCPKCCFHRPPRTYHCPWCNICVEDFDHHCKWVNNCIGHRNFRFFMLLVLSLCLYSGAMLVTCLIFLVRTTHLPFSTDKAIAIVVAVSAAGLLVPLSLLLLIQALSVSSADRTYKGKCRHLQGYNPFDQGCASNWYLTICAPLGPKYMAEAVQLQRVVGPDWTSMPNLHPPMSPSALNPPAPTSGSLQSREGTPGAW

SEQ ID NO: 101987 - protein, 282 aa, Homo sapiens
  Payload ID: 20324
  Gene Name: zinc finger, DHHC-type containing 19
  ENSP ID: ENSP00000380678
MTLLTDATPLVKEPHPLPLVPRPWFLPSLFAAFNVVLLVFFSGLFFAFPCRWLAQNGEWAFPVITGSLFVLTFFSLVSLNFSDPGILHQGSAEQGPLTVHVVWVNHGAFRLQWCPKCCFHRPPRTYHCPWCNICVEDFDHHCKWVNNCIGHRNFRFFMLLVLSLCLYSGAMLVTCLIFLVRTTHLPFSTDKAIAIVVAVSAAGLLVPLSLLLLIQALSVSSADRTYKGKCRHLQGYNPFDQGCASNWYLTICAPLGPKAAASWMRLASASCRAKPWAVCFPS

SEQ ID NO: 101988 - protein, 229 aa, Homo sapiens
  Payload ID: 20324
  Gene Name: zinc finger, DHHC-type containing 19
  Uniprot ID: Q8WVZ1
  ENSP ID: ENSP00000393710
MTLLTDATPLVKEPHPLPLVPRPWFLPSLFAAFNVVLLVFFSGLFFAFPCRWLAQNGEWAFPVITGSLFVLTFFSLVSLNFSDPGILHQGSAEQGPLTVHVVWVNHGAFRLQWCPKCCFHRPPRTYHCPWCNICVEDFDHHCKWVNNCIGHRNFRFFMLLVLSLCLYSGAMLVTCLIFLVRTTHLPFSTDKAIAIVVAVSAAGLLVPLSLLLLIQALSVSSADRTYKGK

SEQ ID NO: 101989 - protein, 367 aa, Homo sapiens
  Payload ID: 20325
  Gene Name: zinc finger, DHHC-type containing 2
  Uniprot ID: Q9UIJ5
  ENSP ID: ENSP00000262096
MAPSGPGSSARRRCRRVLYWIPVVFITLLLGWSYYAYAIQLCIVSMENTGEQVVCLMAYHLLFAMFVWSYWKTIFTLPMNPSKEFHLSYAEKDLLEREPRGEAHQEVLRRAAKDLPIYTRTMSGAIRYCDRCQLIKPDRCHHCSVCDKCILKMDHHCPWVNNCVGFSNYKFFLLFLAYSLLYCLFIAATDLQYFIKFWTNGLPDTQAKFHIMFLFFAAAMFSVSLSSLFGYHCWLVSKNKSTLEAFRSPVFRHGTDKNGFSLGFSKNMRQVFGDEKKYWLLPIFSSLGDGCSFPTCLVNQDPEQASTPAGLNSTAKNLENHQFPAKPLRESQSHLLTDSQSWTESSINPGKCKAGMSNPALTMENET

SEQ ID NO: 101990 - protein, 130 aa, Homo sapiens
  Payload ID: 20325
  Gene Name: zinc finger, DHHC-type containing 2
  ENSP ID: ENSP00000430317
MENTGEQVVCLMAYHLLFAMFVWSYWKTIFTLPMNPSKEFHLSYAEKDLLEREPRGEAHQEVLRRAAKDLPIYTRTMSGAIRYCDRCQLIKPDRCHHCSVCDKCILKMDHHCPWVNNCVGFSNYKFFLLF

SEQ ID NO: 101991 - protein, 7 aa, Homo sapiens
  Payload ID: 20325
  Gene Name: zinc finger, DHHC-type containing 2
  ENSP ID: ENSP00000430804
MENTGEQ

SEQ ID NO: 101992 - protein, 320 aa, Homo sapiens
  Payload ID: 20326
  Gene Name: zinc finger, DHHC-type containing 20
  Uniprot ID: Q5W0Z9
  ENSP ID: ENSP00000313583
MAPWTLWRCCQRVVGWVPVLFITFVVVWSYYAYVVELCVFTIFGNEENGKTVVYLVAFHLFFVMFVWSYWMTIFTSPASPSKEFYLSNSEKERYEKEFSQERQQEILRRAARALPIYTTSASKTIRYCEKCQLIKPDRAHHCSACDSCILKMDHHCPWVNNCVGFSNYKFFLLFLLYSLLYCLFVAATVLEYFIKFWTNELTDTRAKFHVLFLFFVSAMFFISVLSLFSYHCWLVGKNRTTIESFRAPTFSYGPDGNGFSLGCSKNWRQVFGDEKKYWLLPIFSSLGDGCSFPTRLVGMDPEQASVTNQNEYARRSKLQR

SEQ ID NO: 101993 - protein, 354 aa, Homo sapiens
  Payload ID: 20326
  Gene Name: zinc finger, DHHC-type containing 20
  Uniprot ID: Q5W0Z9
  ENSP ID: ENSP00000371905
MAPWTLWRCCQRVVGWVPVLFITFVVVWSYYAYVVELCVFTIFGNEENGKTVVYLVAFHLFFVMFVWSYWMTIFTSPASPSKEFYLSNSEKERYEKEFSQERQQEILRRAARALPIYTTSASKTIRYCEKCQLIKPDRAHHCSACDSCILKMDHHCPWVNNCVGFSNYKFFLLFLLYSLLYCLFVAATVLEYFIKFWTNELTDTRAKFHVLFLFFVSAMFFISVLSLFSYHCWLVGKNRTTIESFRAPTFSYGPDGNGFSLGCSKNWRQVFGDEKKYWLLPIFSSLGDGCSFPTRLVGMDPEQASVTNQNEYARSGSNQPFPIKPLSESKNRLLDSESQWLENGAEEGIVKSGV

SEQ ID NO: 101994 - protein, 365 aa, Homo sapiens
  Payload ID: 20326
  Gene Name: zinc finger, DHHC-type containing 20
  Uniprot ID: Q5W0Z9
  ENSP ID: ENSP00000383433
MAPWTLWRCCQRVVGWVPVLFITFVVVWSYYAYVVELCVFTIFGNEENGKTVVYLVAFHLFFVMFVWSYWMTIFTSPASPSKEFYLSNSEKERYEKEFSQERQQEILRRAARALPIYTTSASKTIRYCEKCQLIKPDRAHHCSACDSCILKMDHHCPWVNNCVGFSNYKFFLLFLLYSLLYCLFVAATVLEYFIKFWTNELTDTRAKFHVLFLFFVSAMFFISVLSLFSYHCWLVGKNRTTIESFRAPTFSYGPDGNGFSLGCSKNWRQVFGDEKKYWLLPIFSSLGDGCSFPTRLVGMDPEQASVTNQNEYARSSGSNQPFPIKPLSESKNRLLDSESQWLENGAEEGIVKSGTNNHVTVAIEN

SEQ ID NO: 101995 - protein, 365 aa, Homo sapiens; identical to SEQ ID NO: 101994
  Payload ID: 20326
  Gene Name: zinc finger, DHHC-type containing 20
  Uniprot ID: Q5W0Z9
  ENSP ID: ENSP00000401232

SEQ ID NO: 101996 - protein, 292 aa, Homo sapiens
  Payload ID: 20326
  Gene Name: zinc finger, DHHC-type containing 20
  ENSP ID: ENSP00000443236
MFVWSYWMTIFTSPASPSKEFYLSNSEKERYEKEFSQERQQEILRRAARALPIYTTSASKTIRYCEKCQLIKPDRAHHCSACDSCILKMDHHCPWVNNCVGFSNYKFFLLFLLYSLLYCLFVAATVLEYFIKFWTNELTDTRAKFHVLFLFFVSAMFFISVLSLFSYHCWLVGKNRTTIESFRAPTFSYGPDGNGFSLGCSKNWRQVFGDEKKYWLLPIFSSLGDGCSFPTRLVGMDPEQASVTNQNEYARSSGSNQPFPIKPLSESKNRLLDSESQWLENGAEEGIVKSGV

SEQ ID NO: 101997 - protein, 19 aa, Homo sapiens
  Payload ID: 20326
  Gene Name: zinc finger, DHHC-type containing 20
  ENSP ID: ENSP00000485858
EEGIVKSGTNNHVTVAIEN

SEQ ID NO: 101998 - protein, 265 aa, Homo sapiens
  Payload ID: 20327
  Gene Name: zinc finger, DHHC-type containing 21
  Uniprot ID: Q8IVQ6
  ENSP ID: ENSP00000370303
MGLRIHFVVDPHGWCCMGLIVFVWLYNIVLIPKIVLFPHYEEGHIPGILIIIFYGISIFCLVALVRASITDPGRLPENPKIPHGEREFWELCNKCNLMRPKRSHHCSRCGHCVRRMDHHCPWINNCVGEDNHWLFLQLCFYTELLTCYALMFSFCHYYYFLPLKKRNLDLFVFRHELAIMRLAAFMGITMLVGITGLFYTQLIGIITDTTSIEKMSNCCEDISRPRKPWQQTFSEVFGTRWKILWFIPFRQRQPLRVPYHFANHV

SEQ ID NO: 101999 - protein, 263 aa, Homo sapiens
  Payload ID: 20328
  Gene Name: zinc finger, DHHC-type containing 22
  Uniprot ID: Q8N966
  ENSP ID: ENSP00000318222
MLALRLLNVVAPAYFLCISLVTFVLQLFLFLPSMREDPAAARLFSPALLHGALFLFLSANALGNYVLVIQNSPDDLGACQGASARKTPCPSPSTHFCRVCARVTLRHDHHCFFTGNCIGSRNMRNFVLFCLYTSLACLYSMVAGVAYISAVLSISFAHPLAFLTLLPTSISQFFSGAVLGSEMFVILMLYLWFAIGLACAGFCCHQLLLILRGQTRHQVRKGVAVRARPWRKNLQEVFGKRWLLGLLVPMFNVGSESSKQQDK

SEQ ID NO: 102000 - protein, 40 aa, Homo sapiens
  Payload ID: 20328
  Gene Name: zinc finger, DHHC-type containing 22
  ENSP ID: ENSP00000450478
MLALRLLNVVAPAYFLCISLVTFVLQLFLFLPSMREDPAA

SEQ ID NO: 102001 - protein, 109 aa, Homo sapiens
  Payload ID: 20328
  Gene Name: zinc finger, DHHC-type containing 22
  ENSP ID: ENSP00000451337
MLALRLLNVVAPAYFLCISLVTFVLQLFLFLPSMREDPAAARLFSPALLHGALFLFLSANALGNYVLVIQNSPDDLGACQGASARKTPCPSPSTHFCRVCARVTLRHDH

SEQ ID NO: 102002 - protein, 409 aa, Homo sapiens
  Payload ID: 20329
  Gene Name: zinc finger, DHHC-type containing 23
  Uniprot ID: Q8IYP9
  ENSP ID: ENSP00000330485
MTQKGSMKPVKKKKTEEPELEPLCCCEYIDRNGEKNHVATCLCDCQDLDEGCDRWITCKSLQPETCERIMDTISDRLRIPWLRGAKKVNISIIPPLVLLPVFLHVASWHFLLGVVVLTSLPVLALWYYYLTHRRKEQTLFFLSLGLFSLGYMYYVFLQEVVPKGRVGPVQLAVLTCGLFLILLALHRAKKNPGYLSNPASGDRSLSSSQLECLSRKGQEKTKGFPGADMSGSLNNRTTKDDPKGSSKMPAGSPTKAKEDWCAKCQLVRPARAWHCRICGICVRRMDHHCVWINSCVGESNHQAFILALLIFLLTSVYGITLTLDTICRDRSVFTALFYCPGVYANYSSALSFTCVWYSVIITAGMAYIFLIQLINISYNVTEREVQQALRQKTGRRLLCGLIVDTGLLG

SEQ ID NO: 102003 - protein, 75 aa, Homo sapiens
  Payload ID: 20329
  Gene Name: zinc finger, DHHC-type containing 23
  ENSP ID: ENSP00000417579
YNVTEREVQQALRQKTGRRLLCGLIVDTDLSYSRTKYLIADIARGTFQVPGSLEEFQLPSYEVAVAFLLLLFPLS

SEQ ID NO: 102004 - protein, 403 aa, Homo sapiens
  Payload ID: 20329
  Gene Name: zinc finger, DHHC-type containing 23
  ENSP ID: ENSP00000417840
MKPVKKKKTEEPELEPLCCCEYIDRNGEKNHVATCLCDCQDLDEGCDRWITCKSLQPETCERIMDTISDRLRIPWLRGAKKVNISIIPPLVLLPVFLHVASWHFLLGVVVLTSLPVLALWYYYLTHRRKEQTLFFLSLGLFSLGYMYYVFLQEVVPKGRVGPVQLAVLTCGLFLILLALHRAKKNPGYLSNPASGDRSLSSSQLECLSRKGQEKTKGFPGADMSGSLNNRTTKDDPKGSSKMPAGSPTKAKEDWCAKCQLVRPARAWHCRICGICVRRMDHHCVWINSCVGESNHQAFILALLIFLLTSVYGITLTLDTICRDRSVFTALFYCPGVYANYSSALSFTCVWYSVIITAGMAYIFLIQLINISYNVTEREVQQALRQKTGRRLLCGLIVDTGLLG

SEQ ID NO: 102005 - protein, 412 aa, Homo sapiens
  Payload ID: 20329
  Gene Name: zinc finger, DHHC-type containing 23
  ENSP ID: ENSP00000420251
MTQKGSMKPVKKKKTEEPELEPLCCCEYIDRNGEKNHVATCLCDCQDLDEGCDRWITCKSLQPETCERIMDTISDRLRIPWLRGAKKVNISIIPPLVLLPVFLHVASWHFLLGVVVLTSLPVLALWYYYLTHRRKEQTLFFLSLGLFSLGYMYYVFLQEVVPKGRVGPVQLAVLTCGLFLILLALHRAKKNPGYLSNPASGDRSLSSSQLECLSRKGQEKTKGFPGADMSGSLNNRTTKDDPKGSSKMPAGSPTKAKEDWCAKCQLVRPARAWHCRICGICVRRMDHHCVWINSCVGESNHQAFILALLIFLLTSVYGITLTLDTICRDRSVFTALFYCPGVYANYSSALSFTCVWYSVIITAGMAYIFLIQLINISYNVTEREVQQALRQKTGRRLLCGLIVDTGKVLAHL

SEQ ID NO: 102006 - protein, 148 aa, Homo sapiens
  Payload ID: 20329
  Gene Name: zinc finger, DHHC-type containing 23
  ENSP ID: ENSP00000420292
MTQKGSMKPVKKKKTEEPELEPLCCCEYIDRNGEKNHVATCLCDCQDLDEGCDRWITCKSLQPETCERIMDTISDRLRIPWLRGAKKVNISIIPPLVLLPVFLHVASWHFLLGVVVLTSLPVLALWYYYLTHRRKEQTLFFLSLGLFS

SEQ ID NO: 102007 - protein, 284 aa, Homo sapiens
  Payload ID: 20330
  Gene Name: zinc finger, DHHC-type containing 24
  Uniprot ID: Q6UX98
  ENSP ID: ENSP00000309429
MGQPWAAGSTDGAPAQLPLVLTALWAAAVGLELAYVLVLGPGPPPLGPLARALQLALAAFQLLNLLGNVGLFLRSDPSIRGVMLAGRGLGQGWAYCYQCQSQVPPRSGHCSACRVCILRRDHHCRLLGRCVGFGNYRPFLCLLLHAAGVLLHVSVLLGPALSALLRAHTPLHMAALLLLPWLMLLTGRVSLAQFALAFVTDTCVAGALLCGAGLLFHGMLLLRGQTTWEWARGQHSYDLGPCHNLQAALGPRWALVWLWPFLASPLPGDGITFQTTADVGHTAS

SEQ ID NO: 102008 - protein, 261 aa, Homo sapiens
  Payload ID: 20330
  Gene Name: zinc finger, DHHC-type containing 24
  ENSP ID: ENSP00000431321
MGQPWAAGSTDGAPAQLPLVLTALWAAAVGLELAYVLVLGPGPPPLGPLARALQLALAAFQLLNLLGNVGLFLRSDPSIRGVMLAGRGLGQGWAYCYQCQSQVPPRSGHCSACRVCILRRDHHCRLLGRCVGFGNYRPFLCLLLHAAGVLLHVSVLLGPALSALLRAHTPLHMAALLLLPWLMLLTDNPCPATALTTTKRSPWCPRSILCMCLQQLSEHPRLPPAHLHREVPSTPQAQCCGNQPHAPSSLRNSDLQATCTS

SEQ ID NO: 102009 - protein, 202 aa, Homo sapiens
  Payload ID: 20330
  Gene Name: zinc finger, DHHC-type containing 24
  ENSP ID: ENSP00000436503
MGQPWAAGSTDGAPAQLPLVLTALWAAAVGLELAYVLVLGPGPPPLGPLARALQLALAAFQLLNLLGNVGLFLRSDPSIRGVMLAGRGLGQGWAYCYQCQSQVPPRSGHCSACRVCILRRDHHCRLLGRCVGFGNYRPFLCLLLHAAGVLLHVSVLLGPALSALLRAHTPLHMAALLLLPWLMLLTAPSSLRNSDLQATCTS

SEQ ID NO: 102010 - protein, 327 aa, Homo sapiens; identical to SEQ ID NO: 61091
  Payload ID: 20331
  Gene Name: zinc finger, DHHC-type containing 3
  Uniprot ID: Q9NYG2
  ENSP ID: ENSP00000296127

SEQ ID NO: 102011 - protein, 333 aa, Homo sapiens; identical to SEQ ID NO: 61094
  Payload ID: 20331
  Gene Name: zinc finger, DHHC-type containing 3
  ENSP ID: ENSP00000345268

SEQ ID NO: 102012 - protein, 299 aa, Homo sapiens; identical to SEQ ID NO: 61097
  Payload ID: 20331
  Gene Name: zinc finger, DHHC-type containing 3
  Uniprot ID: Q9NYG2
  ENSP ID: ENSP00000395502

SEQ ID NO: 102013 - protein, 60 aa, Homo sapiens; identical to SEQ ID NO: 61092
  Payload ID: 20331
  Gene Name: zinc finger, DHHC-type containing 3
  ENSP ID: ENSP00000402545
  MOD_RES (1)..(1): Any amino acid

SEQ ID NO: 102014 - protein, 195 aa, Homo sapiens; identical to SEQ ID NO: 61096
  Payload ID: 20331
  Gene Name: zinc finger, DHHC-type containing 3
  ENSP ID: ENSP00000404108

SEQ ID NO: 102015 - protein, 44 aa, Homo sapiens; identical to SEQ ID NO: 61098
  Payload ID: 20331
  Gene Name: zinc finger, DHHC-type containing 3
  ENSP ID: ENSP00000408294

SEQ ID NO: 102016 - protein, 111 aa, Homo sapiens; identical to SEQ ID NO: 61095
  Payload ID: 20331
  Gene Name: zinc finger, DHHC-type containing 3
  ENSP ID: ENSP00000409755
  MOD_RES (1)..(1): Any amino acid

SEQ ID NO: 102017 - protein, 95 aa, Homo sapiens; identical to SEQ ID NO: 61093
  Payload ID: 20331
  Gene Name: zinc finger, DHHC-type containing 3
  ENSP ID: ENSP00000416132

SEQ ID NO: 102018 - protein, 344 aa, Homo sapiens
  Payload ID: 20332
  Gene Name: zinc finger, DHHC-type containing 4
  Uniprot ID: Q9NPG8
  ENSP ID: ENSP00000337475
MDFLVLFLFYLASVLMGLVLICVCSKTHSLKGLARGGAQIFSCIIPECLQRAVHGLLHYLFHTRNHTFIVLHLVLQGMVYTEYTWEVFGYCQELELSLHYLLLPYLLLGVNLFFFTLTCGTNPGIITKANELLFLHVYEFDEVMFPKNVRCSTCDLRKPARSKHCSVCNWCVHRFDHHCVWVNNCIGAWNIRYFLIYVLTLTASAATVAIVSTTFLVHLVVMSDLYQETYIDDLGHLHVMDTVFLIQYLFLTFPRIVFMLGFVVVLSFLLGGYLLFVLYLAATNQTTNEWYRGDWAWCQRCPLVAWPPSAEPQVHRNIHSHGLRSNLQEIFLPAFPCHERKKQE

SEQ ID NO: 102019 - protein, 344 aa, Homo sapiens; identical to SEQ ID NO: 102018
  Payload ID: 20332
  Gene Name: zinc finger, DHHC-type containing 4
  Uniprot ID: Q9NPG8
  ENSP ID: ENSP00000379934

SEQ ID NO: 102020 - protein, 344 aa, Homo sapiens; identical to SEQ ID NO: 102018
  Payload ID: 20332
  Gene Name: zinc finger, DHHC-type containing 4
  Uniprot ID: Q9NPG8
  ENSP ID: ENSP00000379935

SEQ ID NO: 102021 - protein, 344 aa, Homo sapiens; identical to SEQ ID NO: 102018
  Payload ID: 20332
  Gene Name: zinc finger, DHHC-type containing 4
  Uniprot ID: Q9NPG8
  ENSP ID: ENSP00000379937

SEQ ID NO: 102022 - protein, 344 aa, Homo sapiens; identical to SEQ ID NO: 102018
  Payload ID: 20332
  Gene Name: zinc finger, DHHC-type containing 4
  Uniprot ID: Q9NPG8
  ENSP ID: ENSP00000379941

SEQ ID NO: 102023 - protein, 344 aa, Homo sapiens; identical to SEQ ID NO: 102018
  Payload ID: 20332
  Gene Name: zinc finger, DHHC-type containing 4
  Uniprot ID: Q9NPG8
  ENSP ID: ENSP00000385027

SEQ ID NO: 102024 - protein, 165 aa, Homo sapiens
  Payload ID: 20332
  Gene Name: zinc finger, DHHC-type containing 4
  ENSP ID: ENSP00000418496
MDFLVLFLFYLASVLMGLVLICVCSKTHSLKGLARGGAQIFSCIIPECLQRAVHGLLHYLFHTRNHTFIVLHLVLQGMVYTEYTWEVFGYCQELELSLHYLLLPYLLLGVNLFFFTLTCGTNPGIITKANELLFLHVYEFDEVMFPKNVRCSTCDLRKPARSKHC

SEQ ID NO: 102025 - protein, 715 aa, Homo sapiens
  Payload ID: 20333
  Gene Name: zinc finger, DHHC-type containing 5
  Uniprot ID: Q9C0B5
  ENSP ID: ENSP00000287169
MPAESGKRFKPSKYVPVSAAAIFLVGATTLFFAFTCPGLSLYVSPAVPIYNAIMFLFVLANFSMATFMDPGIFPRAEEDEDKEDDFRAPLYKTVEIKGIQVRMKWCATCRFYRPPRCSHCSVCDNCVEEFDHHCPWVNNCIGRRNYRYFFLFLLSLTAHIMGVFGFGLLYVLYHIEELSGVRTAVTMAVMCVAGLFFIPVAGLTGFHVVLVARGRTTNEQVTGKFRGGVNPFTNGCCNNVSRVLCSSPAPRYLGRPKKEKTIVIRPPFLRPEVSDGQITVKIMDNGIQGELRRTKSKGSLEITESQSADAEPPPPPKPDLSRYTGLRTHLGLATNEDSSLLAKDSPPTPTMYKYRPGYSSSSTSAAMPHSSSAKLSRGDSLKEPTSIAESSRHPSYRSEPSLEPESFRSPTFGKSFHFDPLSSGSRSSSLKSAQGTGFELGQLQSIRSEGTTSTSYKSLANQTRNGSLSYDSLLTPSDSPDFESVQAGPEPDPPLGYTSPFLSARLAQQREAERHPRLVPTGPTHREPSPVRYDNLSRHIVASLQEREKLLRQSPPLPGREEEPGLGDSGIQSTPGSGHAPRTSSSSDDSKRSPLGKTPLGRPAVPRFGKPDGLRGRGVGSPEPGPTAPYLGRSMSYSSQKAQPGVSETEEVALQPLLTPKDEVQLKTTYSKSNGQPKSLGSASPGPGQPPLSSPTRGGVKKVSGVGGTTYEISV

SEQ ID NO: 102026 - protein, 138 aa, Homo sapiens
  Payload ID: 20333
  Gene Name: zinc finger, DHHC-type containing 5
  ENSP ID: ENSP00000431209
MKWCATCRFYRPPRCSHCSVCDNCVEEFDHHCPWVNNCIGRRNYRYFFLFLLSLTAHIMGVFGFGLLYVLYHIEELSGVRTAVTMAVMCVAGLFFIPVAGLTGFHVVLVARGRTTNEQVTGKFRGGVNPFTNGCCNNV

SEQ ID NO: 102027 - protein, 662 aa, Homo sapiens
  Payload ID: 20333
  Gene Name: zinc finger, DHHC-type containing 5
  Uniprot ID: Q9C0B5
  ENSP ID: ENSP00000432202
MFLFVLANFSMATFMDPGIFPRAEEDEDKEDDFRAPLYKTVEIKGIQVRMKWCATCRFYRPPRCSHCSVCDNCVEEFDHHCPWVNNCIGRRNYRYFFLFLLSLTAHIMGVFGFGLLYVLYHIEELSGVRTAVTMAVMCVAGLFFIPVAGLTGFHVVLVARGRTTNEQVTGKFRGGVNPFTNGCCNNVSRVLCSSPAPRYLGRPKKEKTIVIRPPFLRPEVSDGQITVKIMDNGIQGELRRTKSKGSLEITESQSADAEPPPPPKPDLSRYTGLRTHLGLATNEDSSLLAKDSPPTPTMYKYRPGYSSSSTSAAMPHSSSAKLSRGDSLKEPTSIAESSRHPSYRSEPSLEPESFRSPTFGKSFHFDPLSSGSRSSSLKSAQGTGFELGQLQSIRSEGTTSTSYKSLANQTRNGSLSYDSLLTPSDSPDFESVQAGPEPDPPLGYTSPFLSARLAQQREAERHPRLVPTGPTHREPSPVRYDNLSRHIVASLQEREKLLRQSPPLPGREEEPGLGDSGIQSTPGSGHAPRTSSSSDDSKRSPLGKTPLGRPAVPRFGKPDGLRGRGVGSPEPGPTAPYLGRSMSYSSQKAQPGVSETEEVALQPLLTPKDEVQLKTTYSKSNGQPKSLGSASPGPGQPPLSSPTRGGVKKVSGVGGTTYEISV

SEQ ID NO: 102028 - protein, 103 aa, Homo sapiens
  Payload ID: 20333
  Gene Name: zinc finger, DHHC-type containing 5
  ENSP ID: ENSP00000435593
MKWCATCRFYRPPRCSHCSVCDNCVEEFDHHCPWVNNCIGRRNYRYFFLFLLSLTAHIMGVFGFGLLYVLYHIEELSGVRTAVTMAVMCVAGLFFIPVAGLTG

SEQ ID NO: 102029 - protein, 300 aa, Homo sapiens
  Payload ID: 20333
  Gene Name: zinc finger, DHHC-type containing 5
  ENSP ID: ENSP00000435722
RAEEDEDKEDDFRAPLYKTVEIKGIQVRMKWCATCRFYRPPRCSHCSVCDNCVEVTGKFRGGVNPFTNGCCNNVSRVLCSSPAPRYLGRPKKEKTIVIRPPFLRPEVSDGQITVKIMDNGIQGELRRTKSKGSLEITESQSADAEPPPPPKPDLSRYTGLRTHLGLATNEDSSLLAKDSPPTPTMYKYRPGYSSSSTSAAMPHSSSAKLSRGDSLKEPTSIAESSRHPSYRSEPSLEPESFRSPTFGKSFHFDPLSSGSRSSSLKSAQGTGFELGQLQSIRSEGTTSTSYKSLANQTRNG

SEQ ID NO: 102030 - protein, 409 aa, Homo sapiens
  Payload ID: 20334
  Gene Name: zinc finger, DHHC-type containing 6
  Uniprot ID: Q9H6R6
  ENSP ID: ENSP00000358412
MGTFCSVIKFENLQELKRLCHWGPIIALGVIAICSTMAMIDSVLWYWPLHTTGGSVNFIMLINWTVMILYNYFNAMFVGPGFVPLGWKPDTMYLQYCKVCQAYKAPRSHHCRKCNRCVMKMDHHCPWINNCCGYQNHASFTLFLLLAPLGCIHAAFIFVMTMYTQLYHRLSFGWNTVKIDMSAARRDPLPIVPFGLAAFATTLFALGLALGTTIAVGMLFFIQMKIILRNKTSIESWIEEKAKDRIQYYQLDEVFVFPYDMGSRWRNFKQVFTWSGVPEGDGLEWPVREGCHQYSLTIEQLKQKADKRVRSVRYKVIEDYSGACCPLNKGIKTFFTSPCTEEPRIQLQKGEFILATRGLRYWLYGDKILDDSFIEGVSRIRGWFPRKCVEKCPCDAETDQAPEGEKKNR

SEQ ID NO: 102031 - protein, 413 aa, Homo sapiens
  Payload ID: 20334
  Gene Name: zinc finger, DHHC-type containing 6
  Uniprot ID: Q9H6R6
  ENSP ID: ENSP00000358413
MGTFCSVIKFENLQELKRLCHWGPIIALGVIAICSTMAMIDSVLWYWPLHTTGGSVNFIMLINWTVMILYNYFNAMFVGPGFVPLGWKPEISQDTMYLQYCKVCQAYKAPRSHHCRKCNRCVMKMDHHCPWINNCCGYQNHASFTLFLLLAPLGCIHAAFIFVMTMYTQLYHRLSFGWNTVKIDMSAARRDPLPIVPFGLAAFATTLFALGLALGTTIAVGMLFFIQMKIILRNKTSIESWIEEKAKDRIQYYQLDEVFVFPYDMGSRWRNFKQVFTWSGVPEGDGLEWPVREGCHQYSLTIEQLKQKADKRVRSVRYKVIEDYSGACCPLNKGIKTFFTSPCTEEPRIQLQKGEFILATRGLRYWLYGDKILDDSFIEGVSRIRGWFPRKCVEKCPCDAETDQAPEGEKKNR

SEQ ID NO: 102032 - protein, 383 aa, Homo sapiens
  Payload ID: 20334
  Gene Name: zinc finger, DHHC-type containing 6
  ENSP ID: ENSP00000486105
MGTFCSVIKFENLQELKRLCHWGPIIALGVIAICSTMAMIDSVLWYWPLHTTGGSVNFIMLINWTVMILYNYFNAMFVGPGFVPLGWKPEISQDTMYLQYCKVCQAYKAPRSHHCRKCNRCVMKMDHHCPWINNCCGYQNHASFTLFLLLAPLGCIHAAFIFVMTMYTQLYHRLSFGWNTVKIDMSAARRDPLPIVPFGLAAFATTLFALGLALGTTIAVGMLFFIQMKIILRNKTSIESWIEEKAKDRIQYYQLDEVFVFPYDMGSRWRNFKQVFTWSGVPEGDGLEWPVREGCHQYSLTIEQLKQKADKRVRSVRYKVIEDYSGACCPLNKGIKTFFTSPCTEEPRIQLQKGEFILATRGLRYWLYGDKILDDSFIEGVLV

SEQ ID NO: 102033 - protein, 308 aa, Homo sapiens
  Payload ID: 20335
  Gene Name: zinc finger, DHHC-type containing 7
  Uniprot ID: Q9NXF8
  ENSP ID: ENSP00000315604
MQPSGHRLRDVEHHPLLAENDNYDSSSSSSSEADVADRVWFIRDGCGMICAVMTWLLVAYADFVVTFVMLLPSKDFWYSVVNGVIFNCLAVLALSSHLRTMLTDPGAVPKGNATKEYMESLQLKPGEVIYKCPKCCCIKPERAHHCSICKRCIRKMDHHCPWVNNCVGEKNQRFFVLFTMYIALSSVHALILCGFQFISCVRGQWTECSDFSPPITVILLIFLCLEGLLFFTFTAVMFGTQIHSICNDETEIERLKSEKPTWERRLRWEGMKSVFGGPPSLLWMNPFVGFRFRRLPTRPRKGGPEFSV

SEQ ID NO: 102034 - protein, 345 aa, Homo sapiens
  Payload ID: 20335
  Gene Name: zinc finger, DHHC-type containing 7
  Uniprot ID: Q9NXF8
  ENSP ID: ENSP00000341681
MQPSGHRLRDVEHHPLLAENDNYDSSSSSSSEADVADRVWFIRDGCGMICAVMTWLLVAYADFVVTFVMLLPSKDFWYSVVNGVIFNCLAVLALSSHLRTMLTDPEKSSDCRPSACTVKTGLDPTLVGICGEGTESVQSLLLGAVPKGNATKEYMESLQLKPGEVIYKCPKCCCIKPERAHHCSICKRCIRKMDHHCPWVNNCVGEKNQRFFVLFTMYIALSSVHALILCGFQFISCVRGQWTECSDFSPPITVILLIFLCLEGLLFFTFTAVMFGTQIHSICNDETEIERLKSEKPTWERRLRWEGMKSVFGGPPSLLWMNPFVGFRFRRLPTRPRKGGPEFSV

SEQ ID NO: 102035 - protein, 95 aa, Homo sapiens
  Payload ID: 20335
  Gene Name: zinc finger, DHHC-type containing 7
  ENSP ID: ENSP00000454390
MQPSGHRLRDVEHHPLLAENDNYDSSSSSSSEADVADRVWFIRDGCGMICAVMTWLLVAYADFVVTFVMLLPSKDFWYSVVNGVIFNCLAVLALS

SEQ ID NO: 102036 - protein, 141 aa, Homo sapiens
  Payload ID: 20335
  Gene Name: zinc finger, DHHC-type containing 7
  ENSP ID: ENSP00000454965
MESLQLKPGEVIYKCPKCCCIKPERAHHCSICKRCIRKMDHHCPWVNNCVGEKNQRFFVLFTMYIALSSVHALILCGFQFISCVRGQWTECSDFSPPITVILLIFLCLEGLLFFTFTAVMFGTQIHSICNDETEIERLKSE

SEQ ID NO: 102037 - protein, 345 aa, Homo sapiens; identical to SEQ ID NO: 102034
  Payload ID: 20335
  Gene Name: zinc finger, DHHC-type containing 7
  Uniprot ID: Q9NXF8
  ENSP ID: ENSP00000456782

SEQ ID NO: 102038 - protein, 673 aa, Homo sapiens
  Payload ID: 20336
  Gene Name: zinc finger, DHHC-type containing 8
  Uniprot ID: Q9ULC8
  ENSP ID: ENSP00000317804
MPRSPGTRLKPAKYIPVATAAALLVGSSTLFFVFTCPWLTRAVSPAVPVYNGIIFLFVLANFSMATFMDPGVFPRADEDEDKEDDFRAPLYKNVDVRGIQVRMKWCATCHFYRPPRCSHCSVCDNCVEVTGKFRGGVNPFTRGCCGNVEHVLCSPLAPRYVVEPPRLPLAVSLKPPFLRPELLDRAAPLKVKLSDNGLKAGLGRSKSKGSLDRLDEKPLDLGPPLPPKIEAGTFSSDLQTPRPGSAESALSVQRTSPPTPAMYKFRPAFPTGPKVPFCGPGEQVPGPDSLTLGDDSIRSLDFVSEPSLDLPDYGPGGLHAAYPPSPPLSASDAFSGALRSLSLKASSRRGGDHVALQPLRSEGGPPTPHRSIFAPHALPNRNGSLSYDSLLNPGSPGGHACPAHPAVGVAGYHSPYLHPGATGDPPRPLPRSFSPVLGPRPREPSPVRYDNLSRTIMASIQERKDREERERLLRSQADSLFGDSGVYDAPSSYSLQQASVLSEGPRGPALRYGSRDDLVAGPGFGGARNPALQTSLSSLSSSVSRAPRTSSSSLQADQASSNAPGPRPSSGSHRSPARQGLPSPPGTPHSPSYAGPKAVAFIHTDLPEPPPSLTVQRDHPQLKTPPSKLNGQSPGLARLGPATGPPGPSASPTRHTLVKKVSGVGGTTYEISV

SEQ ID NO: 102039 - protein, 765 aa, Homo sapiens
  Payload ID: 20336
  Gene Name: zinc finger, DHHC-type containing 8
  Uniprot ID: Q9ULC8
  ENSP ID: ENSP00000334490
MPRSPGTRLKPAKYIPVATAAALLVGSSTLFFVFTCPWLTRAVSPAVPVYNGIIFLFVLANFSMATFMDPGVFPRADEDEDKEDDFRAPLYKNVDVRGIQVRMKWCATCHFYRPPRCSHCSVCDNCVEDFDHHCPWVNNCIGRRNYRYFFLFLLSLSAHMVGVVAFGLVYVLNHAEGLGAAHTTITMAVMCVAGLFFIPVIGLTGFHVVLVTRGRTTNEQVTGKFRGGVNPFTRGCCGNVEHVLCSPLAPRYVVEPPRLPLAVSLKPPFLRPELLDRAAPLKVKLSDNGLKAGLGRSKSKGSLDRLDEKPLDLGPPLPPKIEAGTFSSDLQTPRPGSAESALSVQRTSPPTPAMYKFRPAFPTGPKVPFCGPGEQVPGPDSLTLGDDSIRSLDFVSEPSLDLPDYGPGGLHAAYPPSPPLSASDAFSGALRSLSLKASSRRGGDHVALQPLRSEGGPPTPHRSIFAPHALPNRNGSLSYDSLLNPGSPGGHACPAHPAVGVAGYHSPYLHPGATGDPPRPLPRSFSPVLGPRPREPSPVRYDNLSRTIMASIQERKDREERERLLRSQADSLFGDSGVYDAPSSYSLQQASVLSEGPRGPALRYGSRDDLVAGPGFGGARNPALQTSLSSLSSSVSRAPRTSSSSLQADQASSNAPGPRPSSGSHRSPARQGLPSPPGTPHSPSYAGPKAVAFIHTDLPEPPPSLTVQRDHPQLKTPPSKLNGQSPGLARLGPATGPPGPSASPTRHTLVKKVSGVGGTTYEISV

SEQ ID NO: 102040 - protein, 778 aa, Homo sapiens
  Payload ID: 20336
  Gene Name: zinc finger, DHHC-type containing 8
  Uniprot ID: Q9ULC8
  ENSP ID: ENSP00000384716
MPRSPGTRLKPAKYIPVATAAALLVGSSTLFFVFTCPWLTRAVSPAVPVYNGIIFLFVLANFSMATFMDPGVFPRADEDEDKEDDFRAPLYKNVDVRGIQVRMKWCATCHFYRPPRCSHCSVCDNCVEDFDHHCPWVNNCIGRRNYRYFFLFLLSLSAHMVGVVAFGLVYVLNHAEGLGAAHTTITMAVMCVAGLFFIPVIGLTGFHVVLVTRGRTTNEQVTGKFRGGVNPFTRGCCGNVEHVLCSPLAPRYVVEPPRLPLAVSLKPPFLRPELLDRAAPLKVKLSDNGLKAGLGRSKSKGSLDRLDEKPLDLGPPLPPKIEAGTFSSDLQTPRPGSAESALSVQRTSPPTPAMYKFRPAFPTGPKVPFCGPGEQVPGPDSLTLGDDSIRSLDFVSEPSLDLPDYGPGGLHAAYPPSPPLSASDAFSGALRSLSLKASSRRGGDHVALQPLRSEGGPPTPHRSIFAPHALPNRNGSLSYDSLLNPGSPGGHACPAHPAVGVAGYHSPYLHPGATGDPPRPLPRSFSPVLGPRPREPSPVRYDNLSRTIMASIQERKDREERERLLRSQADSLFGDSGVYDAPSSYSLQQASVLSEGPRGPALRYGSRDDLVAGPGFGGARNPALQTSLSSLSSSVSRAPRTSSSSLQADQASSNAPGPRPSSGSHRSPARQGLPSPPGTPHSPSYAGPKAVAFIHTDLPEPPPSLTVQRGRIGTCTRGWGRRGQPWVPPGLHLCHLGRPEDRPPLRAPWSQAAGAPPRGAMCRLHLAASSLFPSLSGP

SEQ ID NO: 102041 - protein, 180 aa, Homo sapiens
  Payload ID: 20336
  Gene Name: zinc finger, DHHC-type containing 8
  ENSP ID: ENSP00000412807
MVLREGSCAGRQNASACWPHGTTGCPWLTRAVSPAVPVYNGIIFLFVLANFSMATFMDPGVFPRADEDEDKEDDFRAPLYKNVDVRGIQVRMKWCATCHFYRPPRCSHCSVCDNCVEDFDHHCPWVNNCIGRRNYRYFFLFLLSLSAHMVGVVAFGLVYVLNHAEGLGAAHTTITYPWFL

SEQ ID NO: 102042 - protein, 364 aa, Homo sapiens
  Payload ID: 20337
  Gene Name: zinc finger, DHHC-type containing 9
  Uniprot ID: Q9Y397
  ENSP ID: ENSP00000349689
MSVMVVRKKVTRKWEKLPGRNTFCCDGRVMMARQKGIFYLTLFLILGTCTLFFAFECRYLAVQLSPAIPVFAAMLFLFSMATLLRTSFSDPGVIPRALPDEAAFIEMEIEATNGAVPQGQRPPPRIKNFQINNQIVKLKYCYTCKIFRPPRASHCSICDNCVERFDHHCPWVGNCVGKRNYRYFYLFILSLSLLTIYVFAFNIVYVALKSLKIGFLETLKETPGTVLEVLICFFTLWSVVGLTGFHTFLVALNQTTNEDIKGSWTGKNRVQNPYSHGNIVKNCCEVLCGPLPPSVLDRRGILPLEESGSRPPSTQETSSSLLPQSPAPTEHLNSNEMPEDSSTPEEMPPPEPPEPPQEAAEAEK

SEQ ID NO: 102043 - protein, 364 aa, Homo sapiens; identical to SEQ ID NO: 102042
  Payload ID: 20337
  Gene Name: zinc finger, DHHC-type containing 9
  Uniprot ID: Q9Y397
  ENSP ID: ENSP00000360103

SEQ ID NO: 102044 - protein, 170 aa, Homo sapiens
  Payload ID: 20337
  Gene Name: zinc finger, DHHC-type containing 9
  ENSP ID: ENSP00000383991
MSVMVVRKKVTRKWEKLPGRNTFCCDGRVMMARQKGIFYLTLFLILGTCTLFFAFECRYLAVQLSPAIPVFAAMLFLFSMATLLRTSFSDPGVIPRALPDEAAFIEMEIEATNGAVPQGQRPPPRIKNFQINNQIVKLKYCYTCKIFRPPRASHCSICDNCVERFDHHCP

SEQ ID NO: 102045 - protein, 194 aa, Homo sapiens
  Payload ID: 20337
  Gene Name: zinc finger, DHHC-type containing 9
  ENSP ID: ENSP00000406165
  MOD_RES (1)..(1): Any amino acid
XLFLILGTCTLFFAFECRYLAVQLSPAIPVFAAMLFLFSMATLLRTSFSDPGVIPRALPDEAAFIEMEIEATNGAVPQGQRPPPRIKNFQINNQIVKLKYCYTCKIFRPPRASHCSICDNCVESLKIGFLETLKETPGTVLEVLICFFTLWSVVGLTGFHTFLVALNQTTNEDIKGSWTGKNRVQNPYSHGNIV

SEQ ID NO: 102046 - protein, 763 aa, Homo sapiens
  Payload ID: 20338
  Gene Name: zinc finger, FYVE domain containing 1
  Uniprot ID: Q9HBF4
  ENSP ID: ENSP00000326921
MSAQTSPAEKGLNPGLMCQESYACSGTDEAIFECDECCSLQCLRCEEELHRQERLRNHERIRLKPGHVPYCDLCKGLSGHLPGVRQRAIVRCQTCKINLCLECQKRTHSGGNKRRHPVTVYNVSNLQESLEAEEMDEETKRKKMTEKVVSFLLVDENEEIQVTNEEDFIRKLDCKPDQHLKVVSIFGNTGDGKSHTLNHTFFYGREVFKTSPTQESCTVGVWAAYDPVHKVAVIDTEGLLGATVNLSQRTRLLLKVLAISDLVIYRTHADRLHNDLFKFLGDASEAYLKHFTKELKATTARCGLDVPLSTLGPAVIIFHETVHTQLLGSDHPSEVPEKLIQDRFRKLGRFPEAFSSIHYKGTRTYNPPTDFSGLRRALEQLLENNTTRSPRHPGVIFKALKALSDRFSGEIPDDQMAHSSFFPDEYFTCSSLCLSCGVGCKKSMNHGKEGVPHEAKSRCRYSHQYDNRVYTCKACYERGEEVSVVPKTSASTDSPWMGLAKYAWSGRQYWFGNQDPVDTVVRTEIVHVWPGTDGFLKDNNNAAQRLLDGMNFMAQSVSELSLGPTKAVTSWLTDQIAPAYWRPNSQILSCNKCATSFKDNDTKHHCRACGEGFCDSCSSKTRPVPERGWGPAPVRVCDNCYEARNVQLAVTEAQVDDEGGTLIARKVGEAVQNTLGAVVTAIDIPLGLVKDAARPAYWVPDHEILHCHNCRKEFSIKLSKHHCRACGQGFCDECSHDRRAVPSRGWDHPVRVCFNCNKKPGDL

SEQ ID NO: 102047 - protein, 362 aa, Homo sapiens
  Payload ID: 20338
  Gene Name: zinc finger, FYVE domain containing 1
  Uniprot ID: Q9HBF4
  ENSP ID: ENSP00000377757
MAHSSFFPDEYFTCSSLCLSCGVGCKKSMNHGKEGVPHEAKSRCRYSHQYDNRVYTCKACYERGEEVSVVPKTSASTDSPWMGLAKYAWSGYVIECPNCGVVYRSRQYWFGNQDPVDTVVRTEIVHVWPGTDGFLKDNNNAAQRLLDGMNFMAQSVSELSLGPTKAVTSWLTDQIAPAYWRPNSQILSCNKCATSFKDNDTKHHCRACGEGFCDSCSSKTRPVPERGWGPAPVRVCDNCYEARNVQLAVTEAQVDDEGGTLIARKVGEAVQNTLGAVVTAIDIPLGLVKDAARPAYWVPDHEILHCHNCRKEFSIKLSKHHCRACGQGFCDECSHDRRAVPSRGWDHPVRVCFNCNKKPGDL

SEQ ID NO: 102048 - protein, 777 aa, Homo sapiens
  Payload ID: 20338
  Gene Name: zinc finger, FYVE domain containing 1
  Uniprot ID: Q9HBF4
  ENSP ID: ENSP00000450742
MSAQTSPAEKGLNPGLMCQESYACSGTDEAIFECDECCSLQCLRCEEELHRQERLRNHERIRLKPGHVPYCDLCKGLSGHLPGVRQRAIVRCQTCKINLCLECQKRTHSGGNKRRHPVTVYNVSNLQESLEAEEMDEETKRKKMTEKVVSFLLVDENEEIQVTNEEDFIRKLDCKPDQHLKVVSIFGNTGDGKSHTLNHTFFYGREVFKTSPTQESCTVGVWAAYDPVHKVAVIDTEGLLGATVNLSQRTRLLLKVLAISDLVIYRTHADRLHNDLFKFLGDASEAYLKHFTKELKATTARCGLDVPLSTLGPAVIIFHETVHTQLLGSDHPSEVPEKLIQDRFRKLGRFPEAFSSIHYKGTRTYNPPTDFSGLRRALEQLLENNTTRSPRHPGVIFKALKALSDRFSGEIPDDQMAHSSFFPDEYFTCSSLCLSCGVGCKKSMNHGKEGVPHEAKSRCRYSHQYDNRVYTCKACYERGEEVSVVPKTSASTDSPWMGLAKYAWSGYVIECPNCGVVYRSRQYWFGNQDPVDTVVRTEIVHVWPGTDGFLKDNNNAAQRLLDGMNFMAQSVSELSLGPTKAVTSWLTDQIAPAYWRPNSQILSCNKCATSFKDNDTKHHCRACGEGFCDSCSSKTRPVPERGWGPAPVRVCDNCYEARNVQLAVTEAQVDDEGGTLIARKVGEAVQNTLGAVVTAIDIPLGLVKDAARPAYWVPDHEILHCHNCRKEFSIKLSKHHCRACGQGFCDECSHDRRAVPSRGWDHPVRVCFNCNKKPGDL

SEQ ID NO: 102049 - protein, 362 aa, Homo sapiens; identical to SEQ ID NO: 102047
  Payload ID: 20338
  Gene Name: zinc finger, FYVE domain containing 1
  Uniprot ID: Q9HBF4
  ENSP ID: ENSP00000452232

SEQ ID NO: 102050 - protein, 789 aa, Homo sapiens
  Payload ID: 20338
  Gene Name: zinc finger, FYVE domain containing 1
  ENSP ID: ENSP00000452442
MSAQTSPAEKGLNPGLMCQESYACSGTDEAIFECDECCSLQCLRCEEELHRQERLRNHERIRLKPGHVPYCDLCKGLSGHLPGVRQRAIVRCQTCKINLCLECQKRTHSGGNKRRHPVTVYNVSNLQESLEAEEMDEETKRKKMTEKVVSFLLVDENEEIQVTNEEDFIRKLDCKPDQHLKVVSIFGNTGDGKSHTLNHTFFYGREVFKTSPTQESCTVGVWAAYDPVHKVAVIDTEGLLGATVNLSQRTRLLLKVLAISDLVIYRTHADRLHNDLFKFLGDASEAYLKHFTKELKATTARCGLDVPLSTLGPAVIIFHETVHTQLLGSDHPSEVPEKLIQDRFRKLGRFPEAFSSIHYKGTRTYNPPTDFSGLRRALEQLLENNTTRSPRHPGVIFKALKALSDRFSGEIPDDQMAHSSFFPDEYFTCSSLCLSCGVGCKKSMNHGKEGVPHEAKSRCRYSHQYDNRVYTCKACYERGEEVSVVPKTSASTDSPWMGLAKYAWSGYVIECPNCGVVYRSRQYWFGNQDPVDTVVRTEIVHVWPGTDGFLKDNNNAAQRLLDGMNFMAQSVSELSLGPTKAVTSWLTDQIAPAYWRPNSQILSCNKCATSFKDNDTKHHCRACGEGFCDSCSSKTRPVPERGWGPAPVRVCDNCYEARNVQLAVTEAQVDDEGGTLIARKVGEAVQNTLGAVVTAIDIPLGLVKDAARPAYWVPDHEILHCHNCRKEFSIKLSKHHCRACGQGFCDECSHDRRAVPSRGWDHPVRVCFNCNKKPAWTSLSVMTGKGPLC

SEQ ID NO: 102051 - protein, 1539 aa, Homo sapiens
  Payload ID: 20339
  Gene Name: zinc finger, FYVE domain containing 16
  Uniprot ID: Q7Z3T8
  ENSP ID: ENSP00000337159
MDSYFKAAVSDLDKLLDDFEQNPDEQDYLQDVQNAYDSNHCSVSSELASSQRTSLLPKDQECVNSCASSETSYGTNESSLNEKTLKGLTSIQNEKNVTGLDLLSSVDGGTSDEIQPLYMGRCSKPICDLISDMGNLVHATNSEEDIKKLLPDDFKSNADSLIGLDLSSVSDTPCVSSTDHDSDTVREQQNDISSELQNREIGGIKELGIKVDTTLSDSYNYSGTENLKDKKIFNQLESIVDFNMSSALTRQSSKMFHAKDKLQHKSQPCGLLKDVGLVKEEVDVAVITAAECLKEEGKTSALTCSLPKNEDLCLNDSNSRDENFKLPDFSFQEDKTVIKQSAQEDSKSLDLKDNDVIQDSSSALHVSSKDVPSSLSCLPASGSMCGSLIESKARGDFLPQHEHKDNIQDAVTIHEEIQNSVVLGGEPFKENDLLKQEKCKSILLQSLIEGMEDRKIDPDQTVIRAESLDGGDTSSTVVESQEGLSGTHVPESSDCCEGFINTFSSNDMDGQDLDYFNIDEGAKSGPLISDAELDAFLTEQYLQTTNIKSFEENVNDSKSQMNQIDMKGLDDGNINNIYFNAEAGAIGESHGINIICEIVDKQNTIENGLSLGEKSTIPVQQGLPTSKSEITNQLSVSDINSQSVGGARPKQLFSLPSRTRSSKDLNKPDVPDTIESEPSTADTVVPITCAIDSTADPQVSFNSNYIDIESNSEGGSSFVTANEDSVPENTCKEGLVLGQKQPTWVPDSEAPNCMNCQVKFTFTKRRHHCRACGKVFCGVCCNRKCKLQYLEKEARVCVVCYETISKAQAFERMMSPTGSNLKSNHSDECTTVQPPQENQTSSIPSPATLPVSALKQPGVEGLCSKEQKRVWFADGILPNGEVADTTKLSSGSKRCSEDFSPLSPDVPMTVNTVDHSHSTTVEKPNNETGDITRNEIIQSPISQVPSVEKLSMNTGNEGLPTSGSFTLDDDVFAETEEPSSPTGVLVNSNLPIASISDYRLLCDINKYVCNKISLLPNDEDSLPPLLVASGEKGSVPVVEEHPSHEQIILLLEGESFHPVTFVLNANLLVNVKFIFYSSDKYWYFSTNGLHGLGQAEIIILLLCLPNEDTIPKDIFRLFITIYKDALKGKYIENLDNITFTESFLSSKDHGGFLFITPTFQKLDDLSLPSNPFLCGILIQKLEIPWAKVFPMRLMLRLGAEYKAYPAPLTSIRGRKPLFGEIGHTIMNLLVDLRNYQYTLHNIDQLLIHMEMGKSCIKIPRKKYSDVMKVLNSSNEHVISIGASFSTEADSHLVCIQNDGIYETQANSATGHPRKVTGASFVVFNGALKTSSGFLAKSSIVEDGLMVQITPETMNGLRLALREQKDFKITCGKVDAVDLREYVDICWVDAEEKGNKGVISSVDGISLQGFPSEKIKLEADFETDEKIVKCTEVFYFLKDQDLSILSTSYQFAKEIAMACSAALCPHLKTLKSNGMNKIGLRVSIDTDMVEFQAGSEGQLLPQHYLNDLDSALIPVIHGGTSNSSLPLEIELVFFIIEHLF

SEQ ID NO: 102052 - protein, 51 aa, Homo sapiens
  Payload ID: 20339
  Gene Name: zinc finger, FYVE domain containing 16
  ENSP ID: ENSP00000421785
  MOD_RES (1)..(1): Any amino acid
XGLCSKEQKRVWFADGILPNGEVADTTKLSSGSKRCSEDFSPLSPDVPMCL

SEQ ID NO: 102053 - protein, 40 aa, Homo sapiens
  Payload ID: 20339
  Gene Name: zinc finger, FYVE domain containing 16
  ENSP ID: ENSP00000422356
MGRCSKPICDLISDMGNLVHATNSEEDIKKLLPDDFKSNA

SEQ ID NO: 102054 - protein, 1539 aa, Homo sapiens; identical to SEQ ID NO: 102051
  Payload ID: 20339
  Gene Name: zinc finger, FYVE domain containing 16
  Uniprot ID: Q7Z3T8
  ENSP ID: ENSP00000423663

SEQ ID NO: 102055 - protein, 37 aa, Homo sapiens
  Payload ID: 20339
  Gene Name: zinc finger, FYVE domain containing 16
  ENSP ID: ENSP00000426500
  MOD_RES (1)..(1): Any amino acid
XNGALKTSSGFLAKSSIVEELSVQWMEYHYKDFQVKK

SEQ ID NO: 102056 - protein, 51 aa, Homo sapiens
  Payload ID: 20339
  Gene Name: zinc finger, FYVE domain containing 16
  ENSP ID: ENSP00000426536
TGSNLKSNHSDECTTVQPPQENQTSSIPSPATLPVSALKQPGVEVPAIGKS

SEQ ID NO: 102057 - protein, 1539 aa, Homo sapiens; identical to SEQ ID NO: 102051
  Payload ID: 20339
  Gene Name: zinc finger, FYVE domain containing 16
  Uniprot ID: Q7Z3T8
  ENSP ID: ENSP00000426848

SEQ ID NO: 102058 - protein, 403 aa, Homo sapiens
  Payload ID: 20340
  Gene Name: zinc finger, FYVE domain containing 19
  Uniprot ID: Q96K21
  ENSP ID: ENSP00000299173
MNYDSQQPPLPPLPYAGCRRASGFPALGRGGTVPVGVWGGAGQGREGRSWGEGPRGPGLGRRDLSSADPAVLGATMESRCYGCAVKFTLFKKEYGCKNCGRAFCSGCLSFSAAVPRTGNTQQKVCKQCHEVLTRGSSANASKWSPPQNYKKRVAALEAKQKPSTSQSQGLTRQDQMIAERLARLRQENKPKLVPSQAEIEARLAALKDERQGSIPSTQEMEARLAALQGRVLPSQTPQPAHHTPDTRTQAQQTQDLLTQLAAEVAIDESWKGGGPVTLQDYRLPDSDDDEDEETAIQRVLQQLTEEASLDEASGFNIPAEQASRPWTQPRGAEPEAQDVDPRPEAEEEELPWCCICNEDATLRCAGCDGDLFCARCFREGHDAFELKEHQTSAYSPPRAGQEH

SEQ ID NO: 102059 - protein, 461 aa, Homo sapiens
  Payload ID: 20340
  Gene Name: zinc finger, FYVE domain containing 19
  Uniprot ID: Q96K21
  ENSP ID: ENSP00000337824
MPAVAEALGQEGPPDLSRSAFLATVLTSLSAAFSSMPSSAYSLPFSRSLELDYHTSSCFRGTMVKADCPVPITDLPDSSGKLQYGCKNCGRAFCSGCLSFSAAVPRTGNTQQKVCKQCHEVLTRGSSANASKWSPPQNYKKRVAALEAKQKPSTSQSQGLTRQDQMIAERLARLRQENKPKLVPSQAEIEARLAALKDERQGSIPSTQEMEARLAALQGRVLPSQTPQPAHHTPDTRTQAQQTQDLLTQLAAEVAIDESWKGGGPAASLQNDLNQGGPGSTNSKRQANWSLEEEKSRLLAEAALELREENTRQERILALAKRLAMLRGQDPERVTLQDYRLPDSDDDEDEETAIQRVLQQLTEEASLDEASGFNIPAEQASRPWTQPRGAEPEAQDVDPRPEAEEEELPWCCICNEDATLRCAGCDGDLFCARCFREGHDAFELKEHQTSAYSPPRAGQEH

SEQ ID NO: 102060 - protein, 471 aa, Homo sapiens
  Payload ID: 20340
  Gene Name: zinc finger, FYVE domain containing 19
  Uniprot ID: Q96K21
  ENSP ID: ENSP00000347498
MNYDSQQPPLPPLPYAGCRRASGFPALGRGGTVPVGVWGGAGQGREGRSWGEGPRGPGLGRRDLSSADPAVLGATMESRCYGCAVKFTLFKKEYGCKNCGRAFCSGCLSFSAAVPRTGNTQQKVCKQCHEVLTRGSSANASKWSPPQNYKKRVAALEAKQKPSTSQSQGLTRQDQMIAERLARLRQENKPKLVPSQAEIEARLAALKDERQGSIPSTQEMEARLAALQGRVLPSQTPQPAHHTPDTRTQAQQTQDLLTQLAAEVAIDESWKGGGPAASLQNDLNQGGPGSTNSKRQANWSLEEEKSRLLAEAALELREENTRQERILALAKRLAMLRGQDPERVTLQDYRLPDSDDDEDEETAIQRVLQQLTEEASLDEASGFNIPAEQASRPWTQPRGAEPEAQDVDPRPEAEEEELPWCCICNEDATLRCAGCDGDLFCARCFREGHDAFELKEHQTSAYSPPRAGQEH

SEQ ID NO: 102061 - protein, 271 aa, Homo sapiens
  Payload ID: 20340
  Gene Name: zinc finger, FYVE domain containing 19
  ENSP ID: ENSP00000454704
  MOD_RES (1)..(1): Any amino acid
XPGLGRRDLSSADPAVLGATMESRCYGCAVKFTLFKKEYGCKNCGRAFCSGCLSFSAAVPRTGNTQQKVCKQCHEVLTRRVAALEAKQKPSTSQSQGLTRQDQMIAERLARLRQENKPKLVPSQAEIEARLAALKDERQGSIPSTQEMEARLAALQGRVLPSQTPQPAHHTPDTRTQAQQTQDLLTQLAAEVAIDESWKGGGPAASLQNDLNQGGPGSTNSKRQANWSLEEEKSRLLAEAALELREENTRQERILALAKRLAMLRGQDPER

SEQ ID NO: 102062 - protein, 101 aa, Homo sapiens
  Payload ID: 20340
  Gene Name: zinc finger, FYVE domain containing 19
  ENSP ID: ENSP00000455157
  MOD_RES (1)..(1): Any amino acid
XRRASGFPALGRGGTVPVGVWGGAGQGREGRSWGEGPRGPGLGRRDLSSADPAVLGATMESRCYGCAVKFTLFKKEGLCEGPLKCFSTAVRIVAGPSVQAA

SEQ ID NO: 102063 - protein, 448 aa, Homo sapiens
  Payload ID: 20340
  Gene Name: zinc finger, FYVE domain containing 19
  ENSP ID: ENSP00000456223
MPAVAEALGQEGPPDLSRSAFLATVLTSLSAAFSSMPSSAYRSIYPAVLGATMESRCYGCAVKFTLFKKEYGCKNCGRAFCSGCLSFSAAVPRTGNTQQKVCKQCHEVLTRGSSANASKWSPPQNYKKRVAALEAKQKPSTSQSQGLTRQDQMIAERLARLRQENKPKLVPSQAEIEARLAALKDERQGSIPSTQEMEARLAALQGRVLPSQTPQPAHHTPDTRTQAQQTQDLLTQLAAEVAIDESWKGGGPAASLQNDLNQGGPGSTNSKRQANWSLEEEKSRLLAEAALELREENTRQERILALAKRLAMLRGQDPERVTLQDYRLPDSDDDEDEETAIQRVLQQLTEEASLDEASGFNIPAEQASRPWTQPRGAEPEAQDVDPRPEAEEEELPWCCICNEDATLRCAGCDGDLFCARCFREGHDAFELKEHQTSAYSPPRAGQEH

SEQ ID NO: 102064 - protein, 307 aa, Homo sapiens
  Payload ID: 20340
  Gene Name: zinc finger, FYVE domain containing 19
  ENSP ID: ENSP00000456304
GGTVPVGVWGGAGQGREGRSWGEGPRGPGLGRRDLSSADPAVLGATMESRCYGCAVKFTLFKKEYGCKNCGRAFCSGCLSFSAAVPRTGNTQQKVCKQCHEVLTRGSSANASKWSPPQNYKKRVAALEAKQKPSTSQSQGLTRQDQMIAERLARLRQENKPKLVPSQAEIEARLAALKDERQGSIPSTQEMEARLAALQGRVLPSQTPQPAHHTPDTRTQAQQTQDLLTQLAAEVAIDESWKGGGPGLPLQVTLQDYRLPDSDDDEDEETAIQRVLQQLTEEASLDEASGFNIPAEQASRPWTQPRG

SEQ ID NO: 102065 - protein, 21 aa, Homo sapiens
  Payload ID: 20340
  Gene Name: zinc finger, FYVE domain containing 19
  ENSP ID: ENSP00000456485
  MOD_RES (1)..(1): Any amino acid
XRRDLSSADPAVLGATMEIRL

SEQ ID NO: 102066 - protein, 51 aa, Homo sapiens
  Payload ID: 20340
  Gene Name: zinc finger, FYVE domain containing 19
  ENSP ID: ENSP00000456679
  MOD_RES (1)..(1): Any amino acid
XLGRRDLSSADPAVLGATMESRCYGCAVKFTLFKKERVFCQCLQVVTTSEL

SEQ ID NO: 102067 - protein, 296 aa, Homo sapiens
  Payload ID: 20340
  Gene Name: zinc finger, FYVE domain containing 19
  Uniprot ID: Q96K21
  ENSP ID: ENSP00000457617
MIAERLARLRQENKPKLVPSQAEIEARLAALKDERQGSIPSTQEMEARLAALQGRVLPSQTPQPAHHTPDTRTQAQQTQDLLTQLAAEVAIDESWKGGGPAASLQNDLNQGGPGSTNSKRQANWSLEEEKSRLLAEAALELREENTRQERILALAKRLAMLRGQDPERVTLQDYRLPDSDDDEDEETAIQRVLQQLTEEASLDEASGFNIPAEQASRPWTQPRGAEPEAQDVDPRPEAEEEELPWCCICNEDATLRCAGCDGDLFCARCFREGHDAFELKEHQTSAYSPPRAGQEH

SEQ ID NO: 102068 - protein, 57 aa, Homo sapiens
  Payload ID: 20340
  Gene Name: zinc finger, FYVE domain containing 19
  ENSP ID: ENSP00000457839
MIAERLARLRQENKPKLVPSQAEIEARLAALKDERQGSIPSTQEMEARLAALQGRVL

SEQ ID NO: 102069 - protein, 47 aa, Homo sapiens
  Payload ID: 20340
  Gene Name: zinc finger, FYVE domain containing 19
  ENSP ID: ENSP00000458096
SWGEGPRGPGLGRRDLSSADPAVLGATMESRCYGCAVKFTLFKKEAA

SEQ ID NO: 102070 - protein, 252 aa, Homo sapiens
  Payload ID: 20341
  Gene Name: zinc finger, FYVE domain containing 21
  Uniprot ID: Q9BQ24
  ENSP ID: ENSP00000216602
MSSEVSARRDAKKLVRSPSGLRMVPEHRAFGSPFGLEEPQWVPDKECRRCMQCDAKFDFLTRKHHCRRCGKCFCDRCCSQKVPLRRMCFVDPVRQCAECALVSLKEAEFYDKQLKVLLSGATFLVTFGNSEKPETMTCRLSNNQRYLFLDGDSHYEIEIVHISTVQILTEGFPPGEKDIHAYTSLRGSQPASEGGNARATGMFLQYTVPGTEGVTQLKLTVVEDVTVGRRQAVAWLVAMHKAAKLLYESRDQ

SEQ ID NO: 102071 - protein, 234 aa, Homo sapiens
  Payload ID: 20341
  Gene Name: zinc finger, FYVE domain containing 21
  Uniprot ID: Q9BQ24
  ENSP ID: ENSP00000310543
MSSEVSARRDAKKLVRSPSGLRMVPEHRAFGSPFGLEEPQWVPDKECRRCMQCDAKFDFLTRKHHCRRCGKCFCDRCCSQKVPLRRMCFVDPVRQCAECALVSLKEAEFYDKQLKVLLSGATFLVTFGNSEKPETMTCRLSNNQRYLFLDGDSHYEIEIVHISTVQILTEGFPPGGGNARATGMFLQYTVPGTEGVTQLKLTVVEDVTVGRRQAVAWLVAMHKAAKLLYESRDQ

SEQ ID NO: 102072 - protein, 93 aa, Homo sapiens
  Payload ID: 20341
  Gene Name: zinc finger, FYVE domain containing 21
  ENSP ID: ENSP00000450746
MSSEVSARRDAKKLVRSPSGLRMVPEHRAFGSPFGLEEPQWVPDKECRRCMQCDAKFDFLTRKVRRIPAAWWGAQGLATGGARVQRPAQGPRV

SEQ ID NO: 102073 - protein, 62 aa, Homo sapiens
  Payload ID: 20341
  Gene Name: zinc finger, FYVE domain containing 21
  ENSP ID: ENSP00000452301
MSSEVSARRDAKKLVRSPSGLRMVPEHRAFGSPFGLEEPQWVPDKEEPPSSSRLETQRNLKL

SEQ ID NO: 102074 - protein, 115 aa, Homo sapiens
  Payload ID: 20341
  Gene Name: zinc finger, FYVE domain containing 21
  ENSP ID: ENSP00000473477
  MOD_RES (1)..(1): Any amino acid
XKVLLSGATFLVTFGNSEKPETMTCRLSNNQRYLFLDGDSHYEIEIVHISTVQILTEGFPPGEKDIHAYTSLRGSQPASEGQPLPPHRGSPHAAGPFLPSPPGFCPRGGPCQGSL

SEQ ID NO: 102075 - protein, 2539 aa, Homo sapiens
  Payload ID: 20342
  Gene Name: zinc finger, FYVE domain containing 26
  Uniprot ID: Q68DK2
  ENSP ID: ENSP00000251119
MNHPFGKEEAASQKQLFGFFCECLRRGEWELAQACVPQLQEGQGDIPKRVEDILQALVVCPNLLRCGQDINPQRVAWVWLLVLEKWLAREKKLLPVVFRRKLEFLLLSEDLQGDIPENILEELYETLTQGAVGHVPDGNPRRESWTPRLSSEAVSVLWDLLRQSPQPAQALLELLLEEDDGTGLCHWPLQNALVDLIRKALRALQGPDSVPPGVVDAIYGALRTLRCPAEPLGVELHLLCEELLEACRTEGSPLREERLLSCLLHKASRGLLSLYGHTYAEKVTEKPPRATASGKVSPDHLDPERAMLALFSNPNPAEAWKVAYFYCLSNNKHFLEQILVTALTLLKEEDFPNLGCLLDREFRPLSCLLVLLGWTHCQSLESAKRLLQTLHRTQGPGCDELLRDACDGLWAHLEVLEWCIQQSSNPIPKRDLLYHLHGGDSHSVLYTLHHLTNLPALREEDVLKLLQKVPAKDPQQEPDAVDAPVPEHLSQCQNLTLYQGFCAMKYAIYALCVNSHQHSQCQDCKDSLSEDLASATEPANDSLSSPGAANLFSTYLARCQQYLCSIPDSLCLELLENIFSLLLITSADLHPEPHLPEDYAEDDDIEGKSPSGLRSPSESPQHIAHPERKSERGSLGVPKTLAYTMPSHVKAEPKDSYPGPHRHSFLDLKHFTSGISGFLADEFAIGAFLRLLQEQLDEISSRSPPEKPKQESQSCSGSRDGLQSRLHRLSKVVSEAQWRHKVVTSNHRSEEQPSRRYQPATRHPSLRRGRRTRRSQADGRDRGSNPSLESTSSELSTSTSEGSLSAMSGRNELHSRLHPHPQSSLIPMMFSPPESLLASCILRGNFAEAHQVLFTFNLKSSPSSGELMFMERYQEVIQELAQVEHKIENQNSDAGSSTIRRTGSGRSTLQAIGSAAAAGMVFYSISDVTDKLLNTSGDPIPMLQEDFWISTALVEPTAPLREVLEDLSPPAMAAFDLACSQCQLWKTCKQLLETAERRLNSSLERRGRRIDHVLLNADGIRGFPVVLQQISKSLNYLLMSASQTKSESVEEKGGGPPRCSITELLQMCWPSLSEDCVASHTTLSQQLDQVLQSLREALELPEPRTPPLSSLVEQAAQKAPEAEAHPVQIQTQLLQKNLGKQTPSGSRQMDYLGTFFSYCSTLAAVLLQSLSSEPDHVEVKVGNPFVLLQQSSSQLVSHLLFERQVPPERLAALLAQENLSLSVPQVIVSCCCEPLALCSSRQSQQTSSLLTRLGTLAQLHASHCLDDLPLSTPSSPRTTENPTLERKPYSSPRDSSLPALTSSALAFLKSRSKLLATVACLGASPRLKVSKPSLSWKELRGRREVPLAAEQVARECERLLEQFPLFEAFLLAAWEPLRGSLQQGQSLAVNLCGWASLSTVLLGLHSPIALDVLSEAFEESLVARDWSRALQLTEVYGRDVDDLSSIKDAVLSCAVACDKEGWQYLFPVKDASLRSRLALQFVDRWPLESCLEILAYCISDTAVQEGLKCELQRKLAELQVYQKILGLQSPPVWCDWQTLRSCCVEDPSTVMNMILEAQEYELCEEWGCLYPIPREHLISLHQKHLLHLLERRDHDKALQLLRRIPDPTMCLEVTEQSLDQHTSLATSHFLANYLTTHFYGQLTAVRHREIQALYVGSKILLTLPEQHRASYSHLSSNPLFMLEQLLMNMKVDWATVAVQTLQQLLVGQEIGFTMDEVDSLLSRYAEKALDFPYPQREKRSDSVIHLQEIVHQAADPETLPRSPSAEFSPAAPPGISSIHSPSLRERSFPPTQPSQEFVPPATPPARHQWVPDETESICMVCCREHFTMFNRRHHCRRCGRLVCSSCSTKKMVVEGCRENPARVCDQCYSYCNKDVPEEPSEKPEALDSSKNESPPYSFVVRVPKADEVEWILDLKEEENELVRSEFYYEQAPSASLCIAILNLHRDSIACGHQLIEHCCRLSKGLTNPEVDAGLLTDIMKQLLFSAKMMFVKAGQSQDLALCDSYISKVDVLNILVAAAYRHVPSLDQILQPAAVTRLRNQLLEAEYYQLGVEVSTKTGLDTTGAWHAWGMACLKAGNLTAAREKFSRCLKPPFDLNQLNHGSRLVQDVVEYLESTVRPFVSLQDDDYFATLRELEATLRTQSLSLAVIPEGKIMNNTYYQECLFYLHNYSTNLAIISFYVRHSCLREALLHLLNKESPPEVFIEGIFQPSYKSGKLHTLENLLESIDPTLESWGKYLIAACQHLQKKNYYHILYELQQFMKDQVRAAMTCIRFFSHKAKSYTELGEKLSWLLKAKDHLKIYLQETSRSSGRKKTTFFRKKMTAADVSRHMNTLQLQMEVTRFLHRCESAGTSQITTLPLPTLFGNNHMKMDVACKVMLGGKNVEDGFGIAFRVLQDFQLDAAMTYCRAARQLVEKEKYSEIQQLLKCVSESGMAAKSDGDTILLNCLEAFKRIPPQELEGLIQAIHNDDNKVRAYLICCKLRSAYLIAVKQEHSRATALVQQVQQAAKSSGDAVVQDICAQWLLTSHPRGAHGPGSRK

SEQ ID NO: 102076 - protein, 444 aa, Homo sapiens
  Payload ID: 20342
  Gene Name: zinc finger, FYVE domain containing 26
  ENSP ID: ENSP00000450431
MNHPFGKEEAASQKQLFGFFCECLRRGEWELAQACVPQLQEGQGDIPKRVEDILQALVVCPNLLRCGQDINPQRVAWVWLLVLEKWLAREKKLLPVVFRRKLEFLLLSEDLQGDIPENILEELYETLTQGAVGHVPDGNPRRESWTPRLSSEAVSVLWDLLRQSPQPAQALLELLLEEDDGTGLCHWPLQNALVDLIRKALRALQGPDSVPPGVVDAIYGALRTLRCPAEPLGVELHLLCEELLEACRTEGSPLREERLLSCLLHKASRGLLSLYGHTYAEKVTEKPPRATASGKVSPDHLDPERAMLALFSNPNPAEAWKVAYFYCLSNNKHFLEQILVTALTLLKEEDFPNLGCLLDREFRPLSCLLVLLGWTHCQSLESAKRLLQTLHRTQGPGCDELLRDACDGLWAHLEVLEWCIQQSRCCKSLLNLPGQVSTVSVQYS

SEQ ID NO: 102077 - protein, 2225 aa, Homo sapiens
  Payload ID: 20342
  Gene Name: zinc finger, FYVE domain containing 26
  ENSP ID: ENSP00000450603
MNHPFGKEEAASQKQLFGFFCECLRRGEWELAQACVPQLQEGQGDIPKRVEDILQALVVCPNLLRCGQDINPQRVAWVWLLVLEKWLAREKKLLPVVFRRKLEFLLLSEDLQGDIPENILEELYETLTQGAVGHVPDGNPRRESWTPRLSSEAVSVLWDLLRQSPQPAQALLELLLEEDDGTGLCHWPLQNALVDLIRKALRALQGPDSVPPGVVDAIYGALRTLRCPAEPLGVELHLLCEELLEACRTEGSPLREERLLSCLLHKASRGLLSLYGHTYAEKVTEKPPRATASGKVSPDHLDPERAMLALFSNPNPAEAWKVAYFYCLSNNKHFLEQILVTALTLLKEEDFPNLGCLLDREFRPLSCLLVLLGWTHCQSLESAKRLLQTLHRTQGPGCDELLRDACDGLWAHLEVLEWCIQQSSNPIPKRDLLYHLHGGDSHSVLYTLHHLTNLPALREEDVLKLLQKVPAKDPQQEPDAVDAPVPEHLSQCQNLTLYQGFCAMKYAIYALCVNSHQHSQCQDCKDSLSEDLASATEPANDSLSSPGAANLFSTYLARCQQYLCSIPDSLCLELLENIFSLLLITSADLHPEPHLPEDYAEDDDIEGKSPSGLRSPSESPQHIAHPERKSERGSLGVPKTLAYTMPSHVKAEPKDSYPGPHRHSFLDLKHFTSGISGFLADEFAIGAFLRLLQEQLDEISSRSPPEKPKQESQSCSGSRDGLQSRLHRLSKVVSEAQWRHKVVTSNHRSEEQPSRRYQPATRHPSLRRGRRTRRSQADGRDRGSNPSLESTSSELSTSTSEGSLSAMSGRNELHSRLHPHPQSSLIPMMFSPPESLLASCILRGNFAEAHQVLFTFNLKSSPSSGELMFMERYQEVIQELAQVEHKIENQNSDAGSSTIRRTGSGRSTLQAIGSAAAAGMVFYSISDVTDKLLNTSGDPIPMLQEDFWISTALVEPTAPLREVLEDLSPPAMAAFDLACSQCQLWKTCKQLLETAERRLNSSLERRGRRIDHVLLNADGIRGFPVVLQQISKSLNYLLMSASQTKSESVEEKGGGPPRCSITELLQMCWPSLSEDCVASHTTLSQQLDQVLQSLREALELPEPRTPPLSSLVEQAAQKAPEAEAHPVQIQTQLLQKNLGKQTPSGSRQMDYLGTFFSYCSTLAAVLLQSLSSEPDHVEVKVGNPFVLLQQSSSQLVSHLLFERQVPPERLAALLAQENLSLSVPQVIVSCCCEPLALCSSRQSQQTSSLLTRLGTLAQLHASHCLDDLPLSTPSSPRTTENPTLERKPYSSPRDSSLPALTSSALAFLKSRSKLLATVACLGASPRLKVSKPSLSWKELRGRREVPLAAEQVARECERLLEQFPLFEAFLLAAWEPLRGSLQQGQSLAVNLCGWASLSTVLLGLHSPIALDVLSEAFEESLVARDWSRALQLTEVYGRDVDDLSSIKDAVLSCAVACDKEGWQYLFPVKDASLRSRLALQFVDRWPLESCLEILAYCISDTAVQEGLKCELQRKLAELQVYQKILGLQSPPVWCDWQTLRSCCVEDPSTVMNMILEAQEYELCEEWGCLYPIPREHLISLHQKHLLHLLERRDHDKALQLLRRIPDPTMCLEVTEQSLDQHTSLATSHFLANYLTTHFYGQLTAVRHREIQALYVGSKILLTLPEQHRASYSHLSSNPLFMLEQLLMNMKVDWATVAVQTLQQLLVGQEIGFTMDEVDSLLSRYAEKALDFPYPQREKRSDSVIHLQEIVHQAADPETLPRSPSAEFSPAAPPGISSIHSPSLRERSFPPTQPSQEFVPPATPPARHQWVPDETESICMVCCREHFTMFNRRHHCRRCGRLVCSSCSTKKMVVEGCRENPARVCDQCYSYCNKDVPEEPSEKPEALDSSKNESPPYSFVVRVPKADEVEWILDLKEEENELVRSEFYYEQAPSASLCIAILNLHRDSIACGHQLIEHCCRLSKGLTNPEVDAGLLTDIMKQLLFSAKMMFVKAGQSQDLALCDSYISKVDVLNILVAAAYRHVPSLDQILQPAAVTRLRNQLLEAEYYQLGVEVSTKTGLDTTGAWHAWGMACLKAGNLTAAREKFSRCLKPPFDLNQLNHGSRLVQDVVEYLESTVRPFVSLQDDDYFATLRELEATLRTQSLSLAVIPEGKIMNNTYYQECLFYLHNYSTNLAIISFYVRHSCLREALLHLLNKVGHGHSSKRQCLPYSSGLDHSALSGTITP

SEQ ID NO: 102078 - protein, 327 aa, Homo sapiens
  Payload ID: 20342
  Gene Name: zinc finger, FYVE domain containing 26
  ENSP ID: ENSP00000452142
MNNTYYQECLFYLHNYSTNLAIISFYVRHSCLREALLHLLNKESPPEVFIEGIFQPSYKSGKLHTLENLLESIDPTLESWGKYLIAACQHLQKKNYYHILYELQQFMKDQVRAAMTCIRFFSHKAKSYTELGEKLSWLLKAKDHLKIYLQETSRSSGRKKTTFFRKKMTAADVSRHMNTLQLQMEVTRFLHRCESAGTSQITTLPLPTLFGNNHMKMDVACKVMLGGKNVEDGFGIAFRVLQDFQLDAAMTYCRAARQLVEKEKYSEIQQLLKCVSESGMAAKSDGDTILLNCLEAFKRIPPQELEGLIQAIHNDDNKVSGIVSKRW

SEQ ID NO: 102079 - protein, 372 aa, Homo sapiens
  Payload ID: 20343
  Gene Name: zinc finger, FYVE domain containing 27
  Uniprot ID: Q5T4F4
  ENSP ID: ENSP00000337993
MQTSEREGSGPELSPSVMPEAPLESPPFPTKSPAFDLFNLVLSYKRLEIYLEPLKDAGAWYSVGALMISVPALLGYLQEVCRARLPDSELMRRKYHSVRQEDLQRGRLSRPEAVAEVKSFLIQLEAFLSRLCCTCEAAYRVLHWENPVVSSQFYGALLGTVCMLYLLPLCWVLTLLNSTLFLGNVEFFRVVSEYRASLQQRMNPKQEEHAFESPPPPDVGGKDGLMDSTPALTPTEDLTPGSVEEAEEAEPDEEFKDAIEEDDEGAPCPAEDELALQDNGFLSKNEVLRSKVSRLTERLRKRYPTNNFGNCTGCSATFSVLKKRRSCSNCGNSFCSRCCSFKVPKSSMGATAPEAQRETVFVCASCNQTLSK

SEQ ID NO: 102080 - protein, 318 aa, Homo sapiens
  Payload ID: 20343
  Gene Name: zinc finger, FYVE domain containing 27
  Uniprot ID: Q5T4F4
  ENSP ID: ENSP00000350148
MQTSEREGSGPELSPSVMPEAPLESPPFPTKSPAFDLFNLVLSYKRLEIYLEPLKDAGDGVRYLLSLIQLEAFLSRLCCTCEAAYRVLHWENPVVSSQFYGALLGTVCMLYLLPLCWVLTLLNSTLFLGNVEFFRVVSEYRASLQQRMNPKQEEHAFESPPPPDVGGKDGLMDSTPALTPTEDLTPGSVEEAEEAEPDEEFKDAIEEDDEGAPCPAEDELALQDNGFLSKNEVLRSKVSRLTERLRKRYPTNNFGNCTGCSATFSVLKKRRSCSNCGNSFCSRCCSFKVPKSSMGATAPEAQRETVFVCASCNQTLSK

SEQ ID NO: 102081 - protein, 404 aa, Homo sapiens
  Payload ID: 20343
  Gene Name: zinc finger, FYVE domain containing 27
  Uniprot ID: Q5T4F4
  ENSP ID: ENSP00000353069
MQTSEREGSGPELSPSVMPEAPLESPPFPTKSPAFDLFNLVLSYKRLEIYLEPLKDAGDGVRYLLRWQMPLCSLLTCLGLNVLFLTLNEGAWYSVGALMISVPALLGYLQEVCRARLPDSELMRRKYHSVRQEDLQRGRLSRPEAVAEVKSFLIQLEAFLSRLCCTCEAAYRVLHWENPVVSSQFYGALLGTVCMLYLLPLCWVLTLLNSTLFLGNVEFFRVVSEYRASLQQRMNPKQEEHAFESPPPPDVGGKDGLMDSTPALTPTEDLTPGSVEEAEEAEPDEEFKDAIEEDDEGAPCPAEDELALQDNGFLSKNEVLRSKVSRLTERLRKRYPTNNFGNCTGCSATFSVLKKRRSCSNCGNSFCSRCCSFKVPKSSMGATAPEAQRETVFVCASCNQTLSK

SEQ ID NO: 102082 - protein, 311 aa, Homo sapiens
  Payload ID: 20343
  Gene Name: zinc finger, FYVE domain containing 27
  Uniprot ID: Q5T4F4
  ENSP ID: ENSP00000359642
MISVPALLGYLQEVCRARLPDSELMRRKYHSVRQEDLQRGRLSRPEAVAEVKSFLIQLEAFLSRLCCTCEAAYRVLHWENPVVSSQFYGALLGTVCMLYLLPLCWVLTLLNSTLFLGNVEFFRVVSEYRASLQQRMNPKQEEHAFESPPPPDVGGKDGLMDSTPALTPTESLSSQDLTPGSVEEAEEAEPDEEFKDAIEEDDEGAPCPAEDELALQDNGFLSKNEVLRSKVSRLTERLRKRYPTNNFGNCTGCSATFSVLKKRRSCSNCGNSFCSRCCSFKVPKSSMGATAPEAQRETVFVCASCNQTLSK

SEQ ID NO: 102083 - protein, 286 aa, Homo sapiens
  Payload ID: 20343
  Gene Name: zinc finger, FYVE domain containing 27
  Uniprot ID: Q5T4F4
  ENSP ID: ENSP00000359646
MQTSEREGSGPELSPSVMPEAPLESPPFPTKSPAFDLFNLVLSYKRLEIYLEPLKDAGDGVRYLLRFYGALLGTVCMLYLLPLCWVLTLLNSTLFLGNVEFFRVVSEYRASLQQRMNPKQEEHAFESPPPPDVGGKDGLMDSTPALTPTEDLTPGSVEEAEEAEPDEEFKDAIEEDDEGAPCPAEDELALQDNGFLSKNEVLRSKVSRLTERLRKRYPTNNFGNCTGCSATFSVLKKRRSCSNCGNSFCSRCCSFKVPKSSMGATAPEAQRETVFVCASCNQTLSK

SEQ ID NO: 102084 - protein, 411 aa, Homo sapiens
  Payload ID: 20343
  Gene Name: zinc finger, FYVE domain containing 27
  Uniprot ID: Q5T4F4
  ENSP ID: ENSP00000377282
MQTSEREGSGPELSPSVMPEAPLESPPFPTKSPAFDLFNLVLSYKRLEIYLEPLKDAGDGVRYLLRWQMPLCSLLTCLGLNVLFLTLNEGAWYSVGALMISVPALLGYLQEVCRARLPDSELMRRKYHSVRQEDLQRGRLSRPEAVAEVKSFLIQLEAFLSRLCCTCEAAYRVLHWENPVVSSQFYGALLGTVCMLYLLPLCWVLTLLNSTLFLGNVEFFRVVSEYRASLQQRMNPKQEEHAFESPPPPDVGGKDGLMDSTPALTPTEDLTPGSVEEAEEAEPDEEFKDAIEETHLVVLEDDEGAPCPAEDELALQDNGFLSKNEVLRSKVSRLTERLRKRYPTNNFGNCTGCSATFSVLKKRRSCSNCGNSFCSRCCSFKVPKSSMGATAPEAQRETVFVCASCNQTLSK

SEQ ID NO: 102085 - protein, 416 aa, Homo sapiens
  Payload ID: 20343
  Gene Name: zinc finger, FYVE domain containing 27
  Uniprot ID: Q5T4F4
  ENSP ID: ENSP00000409594
MQTSEREGSGPELSPSVMPEAPLESPPFPTKSPAFDLFNLVLSYKRLEIYLEPLKDAGDGVRYLLRWQMPLCSLLTCLGLNVLFLTLNEGAWYSVGALMISVPALLGYLQEVCRARLPDSELMRRKYHSVRQEDLQRGRLSRPEAVAEVKSFLIQLEAFLSRLCCTCEAAYRVLHWENPVVSSQFYGALLGTVCMLYLLPLCWVLTLLNSTLFLGNVEFFRVVSEYRASLQQRMNPKQEEHAFESPPPPDVGGKDGLMDSTPALTPTESLSSQDLTPGSVEEAEEAEPDEEFKDAIEETHLVVLEDDEGAPCPAEDELALQDNGFLSKNEVLRSKVSRLTERLRKRYPTNNFGNCTGCSATFSVLKKRRSCSNCGNSFCSRCCSFKVPKSSMGATAPEAQRETVFVCASCNQTLSK

SEQ ID NO: 102086 - protein, 887 aa, Homo sapiens
  Payload ID: 20344
  Gene Name: zinc finger, FYVE domain containing 28
  Uniprot ID: Q9HCC9
  ENSP ID: ENSP00000290974
MMNRFRKWLYKPKRSDPQLLARFYYADEELNQVAAELDSLDGRKDPQRCTLLVSQFRSCQDNVLNIINQIMDECIPQDRAPRDFCVKFPEEIRHDNLAGQLWFGAECLAAGSIIMNRELESMAMRPLAKELTRSLEDVRGALRDQALRDLNTYTEKMREALRHFDVLFAEFELSYVSAMVPVKSPREYYVQQEVIVLFCETVERALDFGYLTQDMIDDYEPALMFSIPRLAIVCGLVVYADGPLNLDRKVEDMSELFRPFHTLLRKIRDLLQTLTEEELHTLERNLCISQDVEFPIRADVQGPAALAPALSAPLPPEGPLSAKAKDPDAELACSMQYDDQELEQLSRMVHRAGDEMSSLLSPPIACQSPAHRPGAEGSPGGEASPGRPRLRSGSDEEERVFFMDDVEGTAEALARPESPAGPFGWAGSTWADPQEKGQGGPGGAAGISLPASEKEEDLSNNNLEAEGTDGASLAGTSSCSCLDSRLHLDGWEVGADDAETAEMIAHRTGGMKLSATVIFNPKSPTSLDSAVATQEAASEPVAEGMDGGPHKLSTGATNCLLHSCVCCGSCGDSREDVVERLREKCSPGGVIGASYAAGLAKASDRAPERQEEAPPPSEDASNGREPKAPTSDKCLPHTSGSQVDTASGLQGEAGVAGQQEPEARELHAGSPSAHEAPQALSGSSSSTAGSCSSDKMGPEAAPAATHAAPQATREKIRSRFHGSHDLIHRLFVCISGVADQLQTNYASDLRSILKTLFEVMATKPETDDKEKLRKVTQTLRSAALEDCALCQETLSSSELAAKTRDGDFEDPPEWVPDEACGFCTACKAPFTVIRRKHHCRSCGKIFCSRCSSHSAPLPRYGQVKPVRVCTHCYMFHVTPFYSDKAGL

SEQ ID NO: 102087 - protein, 172 aa, Homo sapiens
  Payload ID: 20344
  Gene Name: zinc finger, FYVE domain containing 28
  Uniprot ID: Q9HCC9
  ENSP ID: ENSP00000422638
MMNRFRKWLYKPKDNVLNIINQIMDECIPQDRAPRDFCVKFPEEIRHDNLAGQLWFGAECLAAGSIIMNRELESMAMRPLAKELTRSLEDVRGALRDQALRDLNTYTEKMREALRHFDVLFAEFELSYVSAMVPVKSPREYYVQQEVIVLFCETVERNGKGVLKFMWNCNGP

SEQ ID NO: 102088 - protein, 287 aa, Homo sapiens
  Payload ID: 20344
  Gene Name: zinc finger, FYVE domain containing 28
  Uniprot ID: Q9HCC9
  ENSP ID: ENSP00000423694
MMNRFRKWLYKPKRSDPQLLARFYYADEELNQVAAELDSLDGRKDPQRCTLLVSQFRSCQDNVLNIINQIMDECIPQDRAPRDFCVKFPEEIRHDNLAGQLWFGAECLAAGSIIMNRELESMAMRPLAKELTRSLEDVRGALRDQALRDLNTYTEKMREALRHFDVLFAEFELSYVSAMVPVKSPREYYVQQEVIVLFCETVERALDFGYLTQDMIDDYEPALMFSIPRLAIVCPLLPAHPRTRAGATAHVACRMVAGSSSGALTHPPVSKQGVISALLRPLPELPP

SEQ ID NO: 102089 - protein, 857 aa, Homo sapiens
  Payload ID: 20344
  Gene Name: zinc finger, FYVE domain containing 28
  Uniprot ID: Q9HCC9
  ENSP ID: ENSP00000425706
MMNRFRKWLYKPKRSDPQLLARFYYADEELNQVAAELDSLDGRKDPQRCTLLVSQFRSCQDNVLNIINQIMDECIPQDRAPRDFCVKFPEEIRHDNLAGQLWFGAECLAAGSIIMNRELESMAMRPLAKELTRSLEDVRGALRDQALRDLNTYTEKMREALRHFDVLFAEFELSYVSAMVPVKSPREYYVQQEVIVLFCETVESGLVVYADGPLNLDRKVEDMSELFRPFHTLLRKIRDLLQTLTEEELHTLERNLCISQDVEFPIRADVQGPAALAPALSAPLPPEGPLSAKAKDPDAELACSMQYDDQELEQLSRMVHRAGDEMSSLLSPPIACQSPAHRPGAEGSPGGEASPGRPRLRSGSDEEERVFFMDDVEGTAEALARPESPAGPFGWAGSTWADPQEKGQGGPGGAAGISLPASEKEEDLSNNNLEAEGTDGASLAGTSSCSCLDSRLHLDGWEVGADDAETAEMIAHRTGGMKLSATVIFNPKSPTSLDSAVATQEAASEPVAEGMDGGPHKLSTGATNCLLHSCVCCGSCGDSREDVVERLREKCSPGGVIGASYAAGLAKASDRAPERQEEAPPPSEDASNGREPKAPTSDKCLPHTSGSQVDTASGLQGEAGVAGQQEPEARELHAGSPSAHEAPQALSGSSSSTAGSCSSDKMGPEAAPAATHAAPQATREKIRSRFHGSHDLIHRLFVCISGVADQLQTNYASDLRSILKTLFEVMATKPETDDKEKLRKVTQTLRSAALEDCALCQETLSSSELAAKTRDGDFEDPPEWVPDEACGFCTACKAPFTVIRRKHHCRSCGKIFCSRCSSHSAPLPRYGQVKPVRVCTHCYMFHVTPFYSDKAGL

SEQ ID NO: 102090 - protein, 163 aa, Homo sapiens
  Payload ID: 20344
  Gene Name: zinc finger, FYVE domain containing 28
  Uniprot ID: Q9HCC9
  ENSP ID: ENSP00000425766
MDECIPQDRAPRDFCVKFPEEIRHDNLAGQLWFGAECLAAGSIIMNRELESMAMRPLAKELTRSLEDVRGALRDQALRDLNTYTEKMREALRHFDVLFAEFELSYVSAMVPVKSPREYYVQQEVIVLFCETVERALDFGYLTQDMIDDYEPALMFSIPRLAIV

SEQ ID NO: 102091 - protein, 817 aa, Homo sapiens
  Payload ID: 20344
  Gene Name: zinc finger, FYVE domain containing 28
  Uniprot ID: Q9HCC9
  ENSP ID: ENSP00000426299
MDECIPQDRAPRDFCVKFPEEIRHDNLAGQLWFGAECLAAGSIIMNRELESMAMRPLAKELTRSLEDVRGALRDQALRDLNTYTEKMREALRHFDVLFAEFELSYVSAMVPVKSPREYYVQQEVIVLFCETVERALDFGYLTQDMIDDYEPALMFSIPRLAIVCGLVVYADGPLNLDRKVEDMSELFRPFHTLLRKIRDLLQTLTEEELHTLERNLCISQDVEFPIRADVQGPAALAPALSAPLPPEGPLSAKAKDPDAELACSMQYDDQELEQLSRMVHRAGDEMSSLLSPPIACQSPAHRPGAEGSPGGEASPGRPRLRSGSDEEERVFFMDDVEGTAEALARPESPAGPFGWAGSTWADPQEKGQGGPGGAAGISLPASEKEEDLSNNNLEAEGTDGASLAGTSSCSCLDSRLHLDGWEVGADDAETAEMIAHRTGGMKLSATVIFNPKSPTSLDSAVATQEAASEPVAEGMDGGPHKLSTGATNCLLHSCVCCGSCGDSREDVVERLREKCSPGGVIGASYAAGLAKASDRAPERQEEAPPPSEDASNGREPKAPTSDKCLPHTSGSQVDTASGLQGEAGVAGQQEPEARELHAGSPSAHEAPQALSGSSSSTAGSCSSDKMGPEAAPAATHAAPQATREKIRSRFHGSHDLIHRLFVCISGVADQLQTNYASDLRSILKTLFEVMATKPETDDKEKLRKVTQTLRSAALEDCALCQETLSSSELAAKTRDGDFEDPPEWVPDEACGFCTACKAPFTVIRRKHHCRSCGKIFCSRCSSHSAPLPRYGQVKPVRVCTHCYMFHVTPFYSDKAGL

SEQ ID NO: 102092 - protein, 82 aa, Homo sapiens
  Payload ID: 20344
  Gene Name: zinc finger, FYVE domain containing 28
  ENSP ID: ENSP00000427471
MDECIPQDRAPRDFCVKFPEEIRHDNLAGQLWFGAECLAAGSIIMNRELESMAMRPLAKELTRSLEDVRGALRDQALRDLNT

SEQ ID NO: 102093 - protein, 192 aa, Homo sapiens
  Payload ID: 20344
  Gene Name: zinc finger, FYVE domain containing 28
  ENSP ID: ENSP00000427654
MGPEAAPAATHAAPQATREKIRSRFHGSHDLIHRLFVCISGVADQLQTNYASDLRSILKTLFEVMATKPETDDKEKLRKVTQTLRSAALEDCALCQETLSSSELAAKTRDGDFEDPPEWVPDEACGFCTACKAPFTVIRRKHHCRSCGKIFCSRCSSHSAPLPRYGQVKPVRVCTHCYMFHVTPFYSDKAGL

SEQ ID NO: 102094 - protein, 1425 aa, Homo sapiens
  Payload ID: 20345
  Gene Name: zinc finger, FYVE domain containing 9
  Uniprot ID: O95405
  ENSP ID: ENSP00000287727
MENYFQAEAYNLDKVLDEFEQNEDETVSSTLLDTKWNKILDPPSHRLSFNPTLASVNESAVSNESQPQLKVFSLAHSAPLTTEEEDHCANGQDCNLNPEIATMWIDENAVAEDQLIKRNYSWDDQCSAVEVGEKKCGNLACLPDEKNVLVVAVMHNCDKRTLQNDLQDCNNYNSQSLMDAFSCSLDNENRQTDQFSFSINESTEKDMNSEKQMDPLNRPKTEGRSVNHLCPTSSDSLASVCSPSQLKDDGSIGRDPSMSAITSLTVDSVISSQGTDGCPAVKKQENYIPDEDLTGKISSPRTDLGSPNSFSHMSEGILMKKEPAEESTTEESLRSGLPLLLKPDMPNGSGRNNDCERCSDCLVPNEVRADENEGYEHEETLGTTEFLNMTEHFSESQDMTNWKLTKLNEMNDSQVNEEKEKFLQISQPEDTNGDSGGQCVGLADAGLDLKGTCISESEECDFSTVIDTPAANYLSNGCDSYGMQDPGVSFVPKTLPSKEDSVTEEKEIEESKSECYSNIYEQRGNEATEGSGLLLNSTGDLMKKNYLHNFCSQVPSVLGQSSPKVVASLPSISVPFGGARPKQPSNLKLQIPKPLSDHLQNDFPANSGNNTKNKNDILGKAKLGENSATNVCSPSLGNISNVDTNGEHLESYEAEISTRPCLALAPDSPDNDLRAGQFGISARKPFTTLGEVAPVWVPDSQAPNCMKCEARFTFTKRRHHCRACGKVFCASCCSLKCKLLYMDRKEARVCVICHSVLMNAQAWENMMSASSQSPNPNNPAEYCSTIPPLQQAQASGALSSPPPTVMVPVGVLKHPGAEVAQPREQRRVWFADGILPNGEVADAAKLTMNGTSSAGTLAVSHDPVKPVTTSPLPAETDICLFSGSITQVGSPVGSAMNLIPEDGLPPILISTGVKGDYAVEEKPSQISVMQQLEDGGPDPLVFVLNANLLSMVKIVNYVNRKCWCFTTKGMHAVGQSEIVILLQCLPDEKCLPKDIFNHFVQLYRDALAGNVVSNLGHSFFSQSFLGSKEHGGFLYVTSTYQSLQDLVLPTPPYLFGILIQKWETPWAKVFPIRLMLRLGAEYRLYPCPLFSVRFRKPLFGETGHTIMNLLADFRNYQYTLPVVQGLVVDMEVRKTSIKIPSNRYNEMMKAMNKSNEHVLAGGACFNEKADSHLVCVQNDDGNYQTQAISIHNQPRKVTGASFFVFSGALKSSSGYLAKSSIVEDGVMVQITAENMDSLRQALREMKDFTITCGKADAEEPQEHIHIQWVDDDKNVSKGVVSPIDGKSMETITNVKIFHGSEYKANGKVIRWTEVFFLENDDQHNCLSDPADHSRLTEHVAKAFCLALCPHLKLLKEDGMTKLGLRVTLDSDQVGYQAGSNGQPLPSQYMNDLDSALVPVIHGGACQLSEGPVVMELIFYILENIV

SEQ ID NO: 102095 - protein, 1366 aa, Homo sapiens
  Payload ID: 20345
  Gene Name: zinc finger, FYVE domain containing 9
  Uniprot ID: O95405
  ENSP ID: ENSP00000349737
MENYFQAEAYNLDKVLDEFEQNEDETVSSTLLDTKWNKILDPPSHRLSFNPTLASVNESAVSNESQPQLKVFSLAHSAPLTTEEEDHCANGQDCNLNPEIATMWIDENAVAEDQLIKRNYSWDDQCSAVEVGEKKCGNLACLPDEKNVLVVAVMHNCDKRTLQNDLQDCNNYNSQSLMDAFSCSLDNENRQTDQFSFSINESTEKDMNSEKQMDPLNRPKTEGRSVNHLCPTSSDSLASVCSPSQLKDDGSIGRDPSMSAITSLTVDSVISSQGTDGCPAVKKQENYIPDEDLTGKISSPRTDLGSPNSFSHMSEGILMKKEPAEESTTEESLRSGLPLLLKPDMPNGSGRNNDCERCSDCLVPNEVRADENEGYEHEETLGTTEFLNMTEHFSESQDMTNWKLTKLNEMNDSQVNEEKEKFLQISQPEDTNGDSGGQCVGLADAGLDLKGTCISESEECDFSTVIDTPAANYLSNGCDSYGMQDPGVSFVPKTLPSKEDSVTEEKEIEESKSECYSNIYEQRGNEATEGSGLLLNSTGDLMKKNYLHNFCSQVPSVLGQSSPKVVASLPSISVPFGGARPKQPSNLKLQIPKPLSDHLQNDFPANSGNNTKNKNDILGKAKLGENSATNVCSPSLGNISNVDTNGEHLESYEAEISTRPCLALAPDSPDNDLRAGQFGISARKPFTTLGEVAPVWVPDSQAPNCMKCEARFTFTKRRHHCRACGKVFCASCCSLKCKLLYMDRKEARVCVICHSVLMNVAQPREQRRVWFADGILPNGEVADAAKLTMNGTSSAGTLAVSHDPVKPVTTSPLPAETDICLFSGSITQVGSPVGSAMNLIPEDGLPPILISTGVKGDYAVEEKPSQISVMQQLEDGGPDPLVFVLNANLLSMVKIVNYVNRKCWCFTTKGMHAVGQSEIVILLQCLPDEKCLPKDIFNHFVQLYRDALAGNVVSNLGHSFFSQSFLGSKEHGGFLYVTSTYQSLQDLVLPTPPYLFGILIQKWETPWAKVFPIRLMLRLGAEYRLYPCPLFSVRFRKPLFGETGHTIMNLLADFRNYQYTLPVVQGLVVDMEVRKTSIKIPSNRYNEMMKAMNKSNEHVLAGGACFNEKADSHLVCVQNDDGNYQTQAISIHNQPRKVTGASFFVFSGALKSSSGYLAKSSIVEDGVMVQITAENMDSLRQALREMKDFTITCGKADAEEPQEHIHIQWVDDDKNVSKGVVSPIDGKSMETITNVKIFHGSEYKANGKVIRWTEVFFLENDDQHNCLSDPADHSRLTEHVAKAFCLALCPHLKLLKEDGMTKLGLRVTLDSDQVGYQAGSNGQPLPSQYMNDLDSALVPVIHGGACQLSEGPVVMELIFYILENIV

SEQ ID NO: 102096 - protein, 1425 aa, Homo sapiens; identical to SEQ ID NO: 102094
  Payload ID: 20345
  Gene Name: zinc finger, FYVE domain containing 9
  Uniprot ID: O95405
  ENSP ID: ENSP00000360647

SEQ ID NO: 102097 - protein, 271 aa, Homo sapiens
  Payload ID: 20346
  Gene Name: zinc finger, GATA-like protein 1
  Uniprot ID: P0C6A0
  ENSP ID: ENSP00000384434
MTEPQVGCVACPRVHKEPAQVGTPWPAKPRSHPRKRDPTALLPRSLWPACQESVTALCFLQETVERLGQSPAQDTPVLGPCWDPMALGTQGRLLLDRDSKDTQTRISQKGRRLQPPGTPSAPPQRRPRKQLNPCRGTERVDPGFEGVTLKFQIKPDSSLQIIPTYSLPCSSRSQESPADAVGGPAAHPGGTEAHSAGSEALEPRRCASCRTQRTPLWRDAEDGTPLCNACGIRYKKYGTRCSSCWLVPRKNVQPKRLCGRCGVSLDPIQEG

SEQ ID NO: 102098 - protein, 187 aa, Homo sapiens
  Payload ID: 20346
  Gene Name: zinc finger, GATA-like protein 1
  ENSP ID: ENSP00000385403
MALGTQGRLLLDRDSKDTQTRISQKGRRLQPPGTPSAPPQRRPRKQLNPCRGTERVDPGFEGVTLKFQIKPDSSLQIIPTYSLPCSSRSQESPADAVGGPAAHPGGTEAHSAGSEALEPRRCASCRTQRTPLWRDAEDGTPLCNACGIRYKKYGTRCSSCWLVPRKNVQPKRLCGRCGVSLDPIQEG

SEQ ID NO: 102099 - protein, 1062 aa, Homo sapiens
  Payload ID: 20347
  Gene Name: zinc finger, GRF-type containing 1
  Uniprot ID: Q86YA3
  ENSP ID: ENSP00000309095
MESQEFIVLYTHQKMKKSKVWQDGILKITHLGNKAILYDDKGACLESLFLKCLEVKPGDDLESDRYLITVEEVKVAGAIGIVKQNVNKEAPELNSRTFISSGRSLGCQPSGLKRKFTGFQGPRQVPKKMVIMESGESAASHEAKKTGPTIFSPFCSMPPLFPTVGKKDVNNILADPENIVTYKNRERNAMDFSSVFSPSFQINPEVLCEENYFCSPVNSGNKLSDSLLTNEPVKRDSLASHYSGVSQNIRSKAQILALLKSESSSSCEELNSEMTEHFPQKQPQGSLKIATKPKYLIQQEECAEMKSTENLYYQHQSENTMRNKSRWAMYLSSQSSPIHSSTVDGNDTERKPKAQEDDVNSNLKDLSLQKIIQFVETYAEERKKYNVDQSVGNNDPSWNQEVKLEIPSFNESSSLQVTCSSAENDGILSESDIQEDNKIPFNQNDKGCIKGSVLIKENAQEVNTCGTLEKEYEQSESSLPELKHLQIESSNNSRISDDITDMISESKMDNESLNSIHESLSNVTQPFLEVTFNLNNFETSDTEEESQESNKISQDSESWVKDILVNDGNSCFQKRSENTNCEEIEGEHLPFLTSVSDKPTVTFPVKETLPSQFCDKTYVGFDMGICKTENTGKEIEEYSDTLSNFESFKWTDAVYGDNKEDANKPIQEVRINYDFALPPNKSKGINMNLHIPHIQNQIAENSNLFSEDAQPQPFILGSDLDKNDEHVLPSTSSSDNSVQLLNTNQNHYECIALDKSNTHISNSLFYPLGKKHLISKDTEAHISEPEDLGKIRSPPPDHVEVETAREGKQYWNPRNSSELSGLVNTISILKSLCEHSTALDSLEILKKKNTVFQQGTQQTYEPDSPPEVRKPFITVVSPKSPHLHKDSQQILKEDEVELSEPLQSVQFSSSGSKEETAFQAVIPKQIERKTCDPKPVEFQGHQVKGSATSGVMVRGHSSQLGCSQFPDSTEYENFMTETPELPSTCMQIDFLQVTSPEENISTLSPVSTFSLNSRDEDFMVEFSETSLKARTLPDDLHFLNLEGSRYHIALISVYSFKMKFFI

SEQ ID NO: 102100 - protein, 2104 aa, Homo sapiens
  Payload ID: 20347
  Gene Name: zinc finger, GRF-type containing 1
  Uniprot ID: Q86YA3
  ENSP ID: ENSP00000390505
MESQEFIVLYTHQKMKKSKVWQDGILKITHLGNKAILYDDKGACLESLFLKCLEVKPGDDLESDRYLITVEEVKVAGAIGIVKQNVNKEAPELNSRTFISSGRSLGCQPSGLKRKFTGFQGPRQVPKKMVIMESGESAASHEAKKTGPTIFSPFCSMPPLFPTVGKKDVNNILADPENIVTYKNRERNAMDFSSVFSPSFQINPEVLCEENYFCSPVNSGNKLSDSLLTNEPVKRDSLASHYSGVSQNIRSKAQILALLKSESSSSCEELNSEMTEHFPQKQPQGSLKIATKPKYLIQQEECAEMKSTENLYYQHQSENTMRNKSRWAMYLSSQSSPIHSSTVDGNDTERKPKAQEDDVNSNLKDLSLQKIIQFVETYAEERKKYNVDQSVGNNDPSWNQEVKLEIPSFNESSSLQVTCSSAENDGILSESDIQEDNKIPFNQNDKGCIKGSVLIKENAQEVNTCGTLEKEYEQSESSLPELKHLQIESSNNSRISDDITDMISESKMDNESLNSIHESLSNVTQPFLEVTFNLNNFETSDTEEESQESNKISQDSESWVKDILVNDGNSCFQKRSENTNCEEIEGEHLPFLTSVSDKPTVTFPVKETLPSQFCDKTYVGFDMGICKTENTGKEIEEYSDTLSNFESFKWTDAVYGDNKEDANKPIQEVRINYDFALPPNKSKGINMNLHIPHIQNQIAENSNLFSEDAQPQPFILGSDLDKNDEHVLPSTSSSDNSVQLLNTNQNHYECIALDKSNTHISNSLFYPLGKKHLISKDTEAHISEPEDLGKIRSPPPDHVEVETAREGKQYWNPRNSSELSGLVNTISILKSLCEHSTALDSLEILKKKNTVFQQGTQQTYEPDSPPEVRKPFITVVSPKSPHLHKDSQQILKEDEVELSEPLQSVQFSSSGSKEETAFQAVIPKQIERKTCDPKPVEFQGHQVKGSATSGVMVRGHSSQLGCSQFPDSTEYENFMTETPELPSTCMQIDFLQVTSPEENISTLSPVSTFSLNSRDEDFMVEFSETSLKARTLPDDLHFLNLEGMKKSRSLENENLQRLSLLSRTQVPLITLPRTDGPPDLDSHSYMINSNTYESSGSPMLNLCEKSAVLSFSIEPEDQNETFFSEESREVNPGDVSLNNISTQSKWLKYQNTSQCNVATPNRVDKRITDGFFAEAVSGMHFRDTSERQSDAVNESSLDSVHLQMIKGMLYQQRQDFSSQDSVSRKKVLSLNLKQTSKTEEIKNVLGGSTCYNYSVKDLQEISGSELCFPSGQKIKSAYLPQRQIHIPAVFQSPAHYKQTFTSCLIEHLNILLFGLAQNLQKALSKVDISFYTSLKGEKLKNAENNVPSCHHSQPAKLVMVKKEGPNKGRLFYTCDGPKADRCKFFKWLEDVTPGYSTQEGARPGMVLSDIKSIGLYLRSQKIPLYEECQLLVRKGFDFQRKQYGKLKKFTTVNPEFYNEPKTKLYLKLSRKERSSAYSKNDLWVVSKTLDFELDTFIACSAFFGPSSINEIEILPLKGYFPSNWPTNMVVHALLVCNASTELTTLKNIQDYFNPATLPLTQYLLTTSSPTIVSNKRVSKRKFIPPAFTNVSTKFELLSLGATLKLASELIQVHKLNKDQATALIQIAQMMASHESIEEVKELQTHTFPITIIHGVFGAGKSYLLAVVILFFVQLFEKSEAPTIGNARPWKLLISSSTNVAVDRVLLGLLSLGFENFIRVGSVRKIAKPILPYSLHAGSENESEQLKELHALMKEDLTPTERVYVRKSIEQHKLGTNRTLLKQVRVVGVTCAACPFPCMNDLKFPVVVLDECSQITEPASLLPIARFECEKLILVGDPKQLPPTIQGSDAAHENGLEQTLFDRLCLMGHKPILLRTQYRCHPAISAIANDLFYKGALMNGVTEIERSPLLEWLPTLCFYNVKGLEQIERDNSFHNVAEATFTLKLIQSLIASGIAGSMIGVITLYKSQMYKLCHLLSAVDFHHPDIKTVQVSTVDAFQGAEKEIIILSCVRTRQVGFIDSEKRMNVALTRGKRHLLIVGNLACLRKNQLWGRVIQHCEGREDGLQHANQYEPQLNHLLKDYFEKQVEEKQKKKSEKEKSKDKSHS

SEQ ID NO: 102101 - protein, 681 aa, Homo sapiens
  Payload ID: 20347
  Gene Name: zinc finger, GRF-type containing 1
  ENSP ID: ENSP00000404365
CEKSAVLSFSIEPEDQNETFFSEESREVNPGDVSLNNISTQSKWLKYQNTSQCNVATPNRVDKRITDGFFAEAVSGMHFRDTSERQSDAVNESSLDSVHLQMIKGMLYQQRQDFSSQDSVSRKKVLSLNLKQTSKTEEIKNVLGGSTCYNYSVKDLQEISGSELCFPSGQKIKSAYLPQRQIHIPAVFQSPAHYKQTFTSCLIEHLNILLFGLAQNLQKALSKVDISFYTSLKGEKLKNAENNVPSCHHSQPAKLVMVKKEGPNKGRLFYTCDGPKADRCKFFKWLEDVTPGYSTQEGARPGMVLSDIKSIGLYLRSQKIPLYEECQLLVRKGFDFQRKQYGKLKKFTTVNPEFYNEPKTKLYLKLSRKERSSAYSKNDLWVVSKTLDFELDTFIACSAFFGPSSINEIEILPLKGYFPSNWPTNMVVHALLVCNASTELTTLKNIQDYFNPATLPLTQYLLTTSSPTIVSNKRVSKRKFIPPAFTNVSTKFELLSLGATLKLASELIQVHKLNKDQATALIQIAQMMASHESIEEVKELQTHTFPITIIHGVFGAGKSYLLAVVILFFVQLFEKSEAPTIGNARPWKLLISSSTNVAVDRVLLGLLSLGFENFIRVGSVRKIAKPILPYSLHAGSENESEQLKELHALMKEDLTPTERVYVRKSIEQHKLGTNRTLLKQV

SEQ ID NO: 102102 - protein, 61 aa, Homo sapiens
  Payload ID: 20347
  Gene Name: zinc finger, GRF-type containing 1
  ENSP ID: ENSP00000424429
MESQEFIVLYTHQKMKKSKVWQDGILKITHLGNKTESCSVAQAGVQWHSLGSLQPLHPRFK

SEQ ID NO: 102103 - protein, 2104 aa, Homo sapiens; identical to SEQ ID NO: 102100
  Payload ID: 20347
  Gene Name: zinc finger, GRF-type containing 1
  Uniprot ID: Q86YA3
  ENSP ID: ENSP00000424737

SEQ ID NO: 102104 - protein, 38 aa, Homo sapiens
  Payload ID: 20347
  Gene Name: zinc finger, GRF-type containing 1
  ENSP ID: ENSP00000424946
MESQEFIVLYTHQKMKKSKVWQDGILKITHLGNKIQCL

SEQ ID NO: 102105 - protein, 174 aa, Homo sapiens
  Payload ID: 20347
  Gene Name: zinc finger, GRF-type containing 1
  ENSP ID: ENSP00000424995
MESQEFIVLYTHQKMKKSKVWQDGILKITHLGNKAILYDDKGACLESLFLKCLEVKPGDDLESDRYLITVEEVKVAGAIGIVKQNVNKEAPELNSRTFISSGRSLGCQPSGLKRKFTGFQGPRQVPKKMVIMESGESAASHEAKKTGPTIFSPFCSMPPLFPTVGKKDVNNILA

SEQ ID NO: 102106 - protein, 935 aa, Homo sapiens
  Payload ID: 20347
  Gene Name: zinc finger, GRF-type containing 1
  ENSP ID: ENSP00000426938
MESQEFIVLYTHQKMKKSKVWQDGILKITHLGNKAILYDDKGACLESLFLKCLEVKPGDDLESDRYLITVEEVKVAGAIGIVKQNVNKEAPELNSRTFISSGRSLGCQPSGLKRKFTGFQGPRQVPKKMVIMESGESAASHEAKKTGPTIFSPFCSMPPLFPTVGKKDVNNILADPENIVTYKNRERNAMDFSSVFSPSFQINPEVLCEENYFCSPVNSGNKLSDSLLTNEPVKRDSLASHYSGVSQNIRSKAQILALLKSESSSSCEELNSEMTEHFPQKQPQGSLKIATKPKYLIQQEECAEMKSTENLYYQHQSENTMRNKSRWAMYLSSQSSPIHSSTVDGNDTERKPKAQEDDVNSNLKDLSLQKIIQFVETYAEERKKYNVDQSVGNNDPSWNQEVKLEIPSFNESSSLQVTCSSAENDGILSESDIQEDNKIPFNQNDKGCIKGSVLIKENAQEVNTCGTLEKEYEQSESSLPELKHLQIESSNNSRISDDITDMISESKMDNESLNSIHESLSNVTQPFLEVTFNLNNFETSDTEEESQESNKISQDSESWVKDILVNDGNSCFQKRSENTNCEEIEGEHLPFLTSVSDKPTVTFPVKETLPSQFCDKTYVGFDMGICKTENTGKEIEEYSDTLSNFESFKWTDAVYGDNKEDANKPIQEVRINYDFALPPNKSKGINMNLHIPHIQNQIAENSNLFSEDAQPQPFILGSDLDKNDEHVLPSTSSSDNSVQLLNTNQNHYECIALDKSNTHISNSLFYPLGKKHLISKDTEAHISEPEDLGKIRSPPPDHVEVETAREGKQYWNPRNSSELSGLVNTISILKSLCEHSTALDSLEILKKKNTVFQQGTQQTYEPDSPPEVRKPFITVVSPKSPHLHKDSQQILKEDEVELSEPLQSVQFSSSGSKEETAFQAVIPKQIERKTCDPKG

SEQ ID NO: 102107 - protein, 239 aa, Homo sapiens
  Payload ID: 20347
  Gene Name: zinc finger, GRF-type containing 1
  Uniprot ID: Q86YA3
  ENSP ID: ENSP00000482897
MGHKPILLRTQYRCHPAISAIANDLFYKGALMNGVTEIERSPLLEWLPTLCFYNVKGLEQIERDNSFHNVAEATFTLKLIQSLIASGIAGSMIGVITLYKSQMYKLCHLLSAVDFHHPDIKTVQVSTVDAFQGAEKEIIILSCVRTRQVGFIDSEKRMNVALTRGKRHLLIVGNLACLRKNQLWGRVIQHCEGREDGLQHANQYEPQLNHLLKDYFEKQVEEKQKKKSEKEKSKDKSHS

SEQ ID NO: 102108 - protein, 154 aa, Homo sapiens
  Payload ID: 20348
  Gene Name: zinc finger, HIT-type containing 1
  Uniprot ID: O43257
  ENSP ID: ENSP00000304593
MVEKKTSVRSQDPGQRRVLDRAARQRRINRQLEALENDNFQDDPHAGLPQLGKRLPQFDDDADTGKKKKKTRGDHFKLRFRKNFQALLEEQNLSVAEGPNYLTACAGPPSRPQRPFCAVCGFPSPYTCVSCGARYCTVRCLGTHQETRCLKWTV

SEQ ID NO: 102109 - protein, 403 aa, Homo sapiens
  Payload ID: 20349
  Gene Name: zinc finger, HIT-type containing 2
  Uniprot ID: Q9UHR6
  ENSP ID: ENSP00000308548
MEPAGPCGFCPAGEVQPARYTCPRCNAPYCSLRCYRTHGTCAENFYRDQVLGELRGCSAPPSRLASALRRLRQQRETEDEPGEAGLSSGPAPGGLSGLWERLAPGEKAAFERLLSRGEAGRLLPPWRPWWWNRGAGPQLLEELDNAPGSDAAELELAPARTPPDSVKDASAAEPAAAERVLGDVPGACTPVVPTRIPAIVSLSRGPVSPLVRFQLPNVLFAYAHTLALYHGGDDALLSDFCATLLGVSGALGAQQVFASAEEALQAAAHVLEAGEHPPGPLGTRGAMHEVARILLGEGPTNQKGYTLAALGDLAQTLGRARKQAVAREERDHLYRARKKCQFLLAWTNENEAALTPLALDCARAHQAHAVVAEEVAALTGELERLWGGPVPPAPRTLIEELPS

SEQ ID NO: 102110 - protein, 186 aa, Homo sapiens
  Payload ID: 20349
  Gene Name: zinc finger, HIT-type containing 2
  ENSP ID: ENSP00000436896
MEPAGPCGFCPAGEVQPARYTCPRCNAPYCSLRCYRTHGTCAENFYRDQLPNVLFAYAHTLALYHGGDDALLSDFCATLLGVSGALGAQQVFASAEEALQAAAHVLEAGEHPPGPLGTRGAMHEVARILLGEGPTNQKGYTLAALGDLAQTLGRARKQAVAREERDHLYRARKKCQFLLAWTNENE

SEQ ID NO: 102111 - protein, 40 aa, Homo sapiens
  Payload ID: 20350
  Gene Name: zinc finger, HIT-type containing 3
  ENSP ID: ENSP00000478067
MASLKCSTVVCVICLEKPKYRCPACRVPYATLKLVLLRKK

SEQ ID NO: 102112 - protein, 148 aa, Homo sapiens
  Payload ID: 20350
  Gene Name: zinc finger, HIT-type containing 3
  Uniprot ID: Q15649
  ENSP ID: ENSP00000478183
MASLKCSTVVCVICLEKPKYRCPACRVPYCSVVCFRKHKEQCNPETRPVEKKIRSALPTKTVKPVENKDDDDSIADFLNSDEEEDRVSLQNLKNLDGLSSCHPGWSAAAQSRLTATSPSQIQAILMPQPPEQLGLQAPATTPNQFLYF

SEQ ID NO: 102113 - protein, 148 aa, Homo sapiens; identical to SEQ ID NO: 102112
  Payload ID: 20350
  Gene Name: zinc finger, HIT-type containing 3
  Uniprot ID: Q15649
  ENSP ID: ENSP00000479727

SEQ ID NO: 102114 - protein, 42 aa, Homo sapiens
  Payload ID: 20350
  Gene Name: zinc finger, HIT-type containing 3
  ENSP ID: ENSP00000481499
MVNLDQGEDKAKLMRAYMQEPLFVEFADCCLGIVEPSQNEES

SEQ ID NO: 102115 - protein, 155 aa, Homo sapiens
  Payload ID: 20350
  Gene Name: zinc finger, HIT-type containing 3
  Uniprot ID: Q15649
  ENSP ID: ENSP00000481504
MASLKCSTVVCVICLEKPKYRCPACRVPYCSVVCFRKHKEQCNPETRPVEKKIRSALPTKTVKPVENKDDDDSIADFLNSDEEEDRVSLQNLKNLGESATLRSLLLNPHLRQLMVNLDQGEDKAKLMRAYMQEPLFVEFADCCLGIVEPSQNEES

SEQ ID NO: 102116 - protein, 90 aa, Homo sapiens
  Payload ID: 20350
  Gene Name: zinc finger, HIT-type containing 3
  ENSP ID: ENSP00000481522
  MOD_RES (1)..(1): Any amino acid
XCVICLEKPKYRCPACRVPYCSVVCFRKHKGESATLRSLLLNPHLRQLMVNLDQGEDKAKLMRAYMQEPLFVEFADCCLGIVEPSQNEES

SEQ ID NO: 102117 - protein, 12 aa, Homo sapiens
  Payload ID: 20350
  Gene Name: zinc finger, HIT-type containing 3
  ENSP ID: ENSP00000481843
MVNLDQGEDKAK

SEQ ID NO: 102118 - protein, 90 aa, Homo sapiens; identical to SEQ ID NO: 102116
  Payload ID: 20350
  Gene Name: zinc finger, HIT-type containing 3
  ENSP ID: ENSP00000482153
  MOD_RES (1)..(1): Any amino acid

SEQ ID NO: 102119 - protein, 42 aa, Homo sapiens
  Payload ID: 20350
  Gene Name: zinc finger, HIT-type containing 3
  ENSP ID: ENSP00000483088
MASLKCSTVVCVICLEKPKYRCPACRVPYCSVVCFRKHKVQP

SEQ ID NO: 102120 - protein, 29 aa, Homo sapiens
  Payload ID: 20350
  Gene Name: zinc finger, HIT-type containing 3
  ENSP ID: ENSP00000484178
MVNLDQGEDKAKLMRAYMQEPLFVEFADC

SEQ ID NO: 102121 - protein, 155 aa, Homo sapiens; identical to SEQ ID NO: 102115
  Payload ID: 20350
  Gene Name: zinc finger, HIT-type containing 3
  Uniprot ID: Q15649
  ENSP ID: ENSP00000484687

SEQ ID NO: 102122 - protein, 29 aa, Homo sapiens
  Payload ID: 20350
  Gene Name: zinc finger, HIT-type containing 3
  ENSP ID: ENSP00000487661
MVNLDQGEDKAKLMRAYMQEPLFVEFADC

SEQ ID NO: 102123 - protein, 42 aa, Homo sapiens; identical to SEQ ID NO: 102114
  Payload ID: 20350
  Gene Name: zinc finger, HIT-type containing 3
  ENSP ID: ENSP00000487918

SEQ ID NO: 102124 - protein, 40 aa, Homo sapiens; identical to SEQ ID NO: 102111
  Payload ID: 20350
  Gene Name: zinc finger, HIT-type containing 3
  ENSP ID: ENSP00000488252

SEQ ID NO: 102125 - protein, 12 aa, Homo sapiens
  Payload ID: 20350
  Gene Name: zinc finger, HIT-type containing 3
  ENSP ID: ENSP00000488528
MVNLDQGEDKAK

SEQ ID NO: 102126 - protein, 42 aa, Homo sapiens; identical to SEQ ID NO: 102119
  Payload ID: 20350
  Gene Name: zinc finger, HIT-type containing 3
  ENSP ID: ENSP00000488910

SEQ ID NO: 102127 - protein, 470 aa, Homo sapiens
  Payload ID: 20351
  Gene Name: zinc finger, HIT-type containing 6
  Uniprot ID: Q9NWK9
  ENSP ID: ENSP00000359606
MEFAAENEGKSGGGLHSVAEGVRLSPEPGREGVRDLAGAEEFGGGEEGTGLTGIKEIGDGEEGSGQRPEEIPMDLTVVKQEIIDWPGTEGRLAGQWVEQEVEDRPEVKDENAGVLEVKQETDSSLVVKEAKVGEPEVKEEKVKEEVMDWSEVKEEKDNLEIKQEEKFVGQCIKEELMHGECVKEEKDFLKKEIVDDTKVKEEPPINHPVGCKRKLAMSRCETCGTEEAKYRCPRCMRYSCSLPCVKKHKAELTCNGVRDKTAYISIQQFTEMNLLSDYRFLEDVARTADHISRDAFLKRPISNKYMYFMKNRARRQGINLKLLPNGFTKRKENSTFFDKKKQQFCWHVKLQFPQSQAEYIEKRVPDDKTINEILKPYIDPEKSDPVIRQRLKAYIRSQTGVQILMKIEYMQQNLVRYYELDPYKSLLDNLRNKVIIEYPTLHVVLKGSNNDMKVLHQVKSESTKNVGNEN

SEQ ID NO: 102128 - protein, 431 aa, Homo sapiens
  Payload ID: 20351
  Gene Name: zinc finger, HIT-type containing 6
  Uniprot ID: Q9NWK9
  ENSP ID: ENSP00000414344
MEFAAENEGKSGGGLHSVAEGVRLSPEPGREGVRDLAGAEEFGGGEEGTGLTGIKEIGDGEEGSGQRPEEIPMDLTVVKQETDSSLVVKEAKVGEPEVKEEKVKEEVMDWSEVKEEKDNLEIKQEEKFVGQCIKEELMHGECVKEEKDFLKKEIVDDTKVKEEPPINHPVGCKRKLAMSRCETCGTEEAKYRCPRCMRYSCSLPCVKKHKAELTCNGVRDKTAYISIQQFTEMNLLSDYRFLEDVARTADHISRDAFLKRPISNKYMYFMKNRARRQGINLKLLPNGFTKRKENSTFFDKKKQQFCWHVKLQFPQSQAEYIEKRVPDDKTINEILKPYIDPEKSDPVIRQRLKAYIRSQTGVQILMKIEYMQQNLVRYYELDPYKSLLDNLRNKVIIEYPTLHVVLKGSNNDMKVLHQVKSESTKNVGNEN

SEQ ID NO: 102129 - protein, 527 aa, Homo sapiens
  Payload ID: 20352
  Gene Name: zinc finger, imprinted 2
  Uniprot ID: Q9NZV7
  ENSP ID: ENSP00000468984
MYQPEDDNNSDVTSDDDMTRNRRESSPPHSVHSFSGDRDWDRRGRSRDMEPRDRWSHTRNPRSRMPPRDLSLPVVAKTSFEMDREDDRDSRAYESRSQDAESYQNVVDLAEDRKPHNTIQDNMENYRKLLSLGFLAQDSVPAEKRNTEMLDNLPSAGSQFPDFKHLGTFLVFEELVTFEDVLVDFSPEELSSLSAAQRNLYREVMLENYRNLVSLGHQFSKPDIISRLEEEESYAMETDSRHTVICQGESHDDPLEPHQGNQEKLLTPITMNDPKTLTPERSYGSDEFERSSNLSKQSKDPLGKDPQEGTAPGICTSPQSASQENKHNRCEFCKRTFSTQVALRRHERIHTGKKPYECKQCAEAFYLMPHLNRHQKTHSGRKTSGCNEGRKPSVQCANLCERVRIHSQEDYFECFQCGKAFLQNVHLLQHLKAHEAARVLPPGLSHSKTYLIRYQRKHDYVGERACQCCDCGRVFSRNSYLIQHYRTHTQERPYQCQLCGKCFGRPSYLTQHYQLHSQEKTVECDHC

SEQ ID NO: 102130 - protein, 66 aa, Homo sapiens
  Payload ID: 20352
  Gene Name: zinc finger, imprinted 2
  ENSP ID: ENSP00000469173
MYQPEDDNNSDVTSDDDMTRNRRESSPPHSVHSFSGDRDWDRRGRSRDMEPRDRWSHTRNPRSSES

SEQ ID NO: 102131 - protein, 193 aa, Homo sapiens
  Payload ID: 20352
  Gene Name: zinc finger, imprinted 2
  ENSP ID: ENSP00000469185
MYQPEDDNNSDVTSDDDMTRNRRESSPPHSVHSFSGDRDWDRRGRSRDMEPRDRWSHTRNPRSRMPPRDLSLPVVAKTSFEMDREDDRDSRAYESRSQDAESYQNVVDLAEDRKPHNTIQDNMENYRKLLSLGVQLAEDDGHSHMTQGHSSRSKRSAYPSTSRGFLAQDSVPAEKRNTEMLDNLPSAGSQVGP

SEQ ID NO: 102132 - protein, 527 aa, Homo sapiens; identical to SEQ ID NO: 102129
  Payload ID: 20352
  Gene Name: zinc finger, imprinted 2
  Uniprot ID: Q9NZV7
  ENSP ID: ENSP00000470326

SEQ ID NO: 102133 - protein, 162 aa, Homo sapiens
  Payload ID: 20352
  Gene Name: zinc finger, imprinted 2
  ENSP ID: ENSP00000471643
MYQPEDDNNSDVTSDDDMTRNRRESSPPHSVHSFSGDRDWDRRGRSRDMEPRDRWSHTRNPRSRMPPRDLSLPVVAKTSFEMDREDDRDSRAYESRSQDAESYQNVVDLAEDRKPHNTIQDNMENYRKLLSLGFLAQDSVPAEKRNTEMLDNLPSAGSQVGP

SEQ ID NO: 102134 - protein, 527 aa, Homo sapiens; identical to SEQ ID NO: 102129
  Payload ID: 20352
  Gene Name: zinc finger, imprinted 2
  Uniprot ID: Q9NZV7
  ENSP ID: ENSP00000472306

SEQ ID NO: 102135 - protein, 527 aa, Homo sapiens; identical to SEQ ID NO: 102129
  Payload ID: 20352
  Gene Name: zinc finger, imprinted 2
  Uniprot ID: Q9NZV7
  ENSP ID: ENSP00000486502

SEQ ID NO: 102136 - protein, 472 aa, Homo sapiens
  Payload ID: 20353
  Gene Name: zinc finger, imprinted 3
  Uniprot ID: Q96PE6
  ENSP ID: ENSP00000269834
MNNSQGRVTFEDVTVNFTQGEWQRLNPEQRNLYRDVMLENYSNLVSVGQGETTKPDVILRLEQGKEPWLEEEEVLGSGRAEKNGDIGGQIWKPKDVKESLAREVPSINKETLTTQKGVECDGSKKILPLGIDDVSSLQHYVQNNSHDDNGYRKLVGNNPSKFVGQQLKCNACRKLFSSKSRLQSHLRRHACQKPFECHSCGRAFGEKWKLDKHQKTHAEERPYKCENCGNAYKQKSNLFQHQKMHTKEKPYQCKTCGKAFSWKSSCINHEKIHNAKKSYQCNECEKSFRQNSTLIQHKKVHTGQKPFQCTDCGKAFIYKSDLVKHQRIHTGEKPYKCSICEKAFSQKSNVIDHEKIHTGKRAYECDLCGNTFIQKKNLIQHKKIHTGEKPYECNRCGKAFFQKSNLHSHQKTHSGERTYRCSECGKTFIRKLNLSLHKKTHTGQKPYGCSECGKAFADRSYLVRHQKRIHSR

SEQ ID NO: 102137 - protein, 638 aa, Homo sapiens
  Payload ID: 20354
  Gene Name: zinc finger, matrin-type 1
  Uniprot ID: Q5H9K5
  ENSP ID: ENSP00000361868
MESCSVTRLECSGAISAHCSLHLPGSSDSPASASQIAGTTDAIWNEQEKAELFTDKFCQVCGVMLQFESQRISHYEGEKHAQNVSFYFQMHGEQNEVPGKKMKMHVENFQVHRYEGVDKNKFCDLCNMMFSSPLIAQSHYVGKVHAKKLKQLMEEHDQASPSGFQPEMAFSMRTYVCHICSIAFTSLDMFRSHMQGSEHQIKESIVINLVKNSRKTQDSYQNECADYINVQKARGLEAKTCFRKMEESSLETRRYREVVDSRPRHRMFEQRLPFETFRTYAAPYNISQAMEKQLPHSKKTYDSFQDELEDYIKVQKARGLDPKTCFRKMRENSVDTHGYREMVDSGPRSRMCEQRFSHEASQTYQRPYHISPVESQLPQWLPTHSKRTYDSFQDELEDYIKVQKARGLEPKTCFRKIGDSSVETHRNREMVDVRPRHRMLEQKLPCETFQTYSGPYSISQVVENQLPHCLPAHDSKQRLDSISYCQLTRDCFPEKPVPLSLNQQENNSGSYSVESEVYKHLSSENNTADHQAGHKRKHQKRKRHLEEGKERPEKEQSKHKRKKSYEDTDLDKDKSIRQRKREEDRVKVSSGKLKHRKKKKSHDVPSEKEERKHRKEKKKSVEERTEEEMLWDESILGF

SEQ ID NO: 102138 - protein, 638 aa, Homo sapiens; identical to SEQ ID NO: 102137
  Payload ID: 20354
  Gene Name: zinc finger, matrin-type 1
  Uniprot ID: Q5H9K5
  ENSP ID: ENSP00000437529

SEQ ID NO: 102139 - protein, 199 aa, Homo sapiens
  Payload ID: 20355
  Gene Name: zinc finger, matrin-type 2
  Uniprot ID: Q96NC0
  ENSP ID: ENSP00000274712
MASGSGTKNLDFRRKWDKDEYEKLAEKRLTEEREKKDGKPVQPVKRELLRHRDYKVDLESKLGKTIVITKTTPQSEMGGYYCNVCDCVVKDSINFLDHINGKKHQRNLGMSMRVERSTLDQVKKRFEVNKKKMEEKQKDYDFEERMKELREEEEKAKAYKKEKQKEKKRRAEEDLTFEEDDEMAAVMGFSGFGSTKKSY

SEQ ID NO: 102140 - protein, 53 aa, Homo sapiens
  Payload ID: 20355
  Gene Name: zinc finger, matrin-type 2
  ENSP ID: ENSP00000473397
MGGYYCNVCDCVVKDSINFLDHINGKKHQRNLGMSMRVERSTLDQVKKRFEVN

SEQ ID NO: 102141 - protein, 129 aa, Homo sapiens
  Payload ID: 20355
  Gene Name: zinc finger, matrin-type 2
  ENSP ID: ENSP00000473644
ASGSGTKNLDFRRKWDKDEYEKLAEKRLTEEREKKDGKPVQPVKRELLRHRDYKVDLESKLGKTIVITKTTPQSEMGGYYCNVCDCVVKDSINFLDHINGKKRKAWRSEKPGHVYACGTFHPGSGEETF

SEQ ID NO: 102142 - protein, 289 aa, Homo sapiens
  Payload ID: 20356
  Gene Name: zinc finger, matrin-type 3
  Uniprot ID: Q9HA38
  ENSP ID: ENSP00000311221
MILLQHAVLPPPKQPSPSPPMSVATRSTGTLQLPPQKPFGQEASLPLAGEEELSKGGEQDCALEELCKPLYCKLCNVTLNSAQQAQAHYQGKNHGKKLRNYYAANSCPPPARMSNVVEPAATPVVPVPPQMGSFKPGGRVILATENDYCKLCDASFSSPAVAQAHYQGKNHAKRLRLAEAQSNSFSESSELGQRRARKEGNEFKMMPNRRNMYTVQNNSAGPYFNPRSRQRIPRDLAMCVTPSGQFYCSMCNVGAGEEMEFRQHLESKQHKSKVSEQRYRNEMENLGYV

SEQ ID NO: 102143 - protein, 288 aa, Homo sapiens
  Payload ID: 20356
  Gene Name: zinc finger, matrin-type 3
  Uniprot ID: Q9HA38
  ENSP ID: ENSP00000396506
MILLQHAVLPPPKQPSPSPPMSVATRSTGTLQLPPQKPFGQEASLPLAGEEELSKGGEQDCALEELCKPLYCKLCNVTLNSAQQAQAHYQGKNHGKKLRNYYAANSCPPPARMSNVVEPAATPVVPVPPQMGSFKPGGRVILATENDYCKLCDASFSSPAVAQAHYQGKNHAKRLRLAEAQSNSFSESSELGQRRARKEGNEFKMMPNRRNMYTVQNNSGPYFNPRSRQRIPRDLAMCVTPSGQFYCSMCNVGAGEEMEFRQHLESKQHKSKVSEQRYRNEMENLGYV

SEQ ID NO: 102144 - protein, 148 aa, Homo sapiens
  Payload ID: 20356
  Gene Name: zinc finger, matrin-type 3
  ENSP ID: ENSP00000398920
MILLQHAVLPPPKQPSPSPPMSVATRSTGTLQLPPQKPFGQEASLPLAGEEELSKGGEQDCALEELCKPLYCKLCNVTLNSAQQAQAHYQGKNHGKKLRNYYAANSCPPPARMSNVVEPAATPVVPVPPQMGSFKPGGRVILATENDY

SEQ ID NO: 102145 - protein, 229 aa, Homo sapiens
  Payload ID: 20357
  Gene Name: zinc finger, matrin-type 4
  Uniprot ID: Q9H898
  ENSP ID: ENSP00000297737
MKSSDIDQDLFTDSYCKVCSAQLISESQRVAHYESRKHASKVRLYYMLHPRDGGCPAKRLRSENGSDADMVDKNKCCTLCNMSFTSAVVADSHYQGKIHAKRLKLLLGEKTPLKTTATPLSPLKPPRMDTAPVVASPYQRRDSDRYCGLCAAWFNNPLMAQQHYDGKKHKKNAARVALLEQLGTTLDMGELRGLRRNYRCTICSVSLNSIEQYHAHLKGSKHQTNLKNK

SEQ ID NO: 102146 - protein, 153 aa, Homo sapiens
  Payload ID: 20357
  Gene Name: zinc finger, matrin-type 4
  Uniprot ID: Q9H898
  ENSP ID: ENSP00000319785
MKSSDIDQDLFTDSYCKVCSAQLISESQRVAHYESRKHASKVRLYYMLHPRDGGCPAKRLRSENGSDADMVDKNKCCTLCNMSFTSAVVADSHYQGKIHAKRLKLLLGEKTPLKTTGLRRNYRCTICSVSLNSIEQYHAHLKGSKHQTNLKNK

SEQ ID NO: 102147 - protein, 46 aa, Homo sapiens
  Payload ID: 20357
  Gene Name: zinc finger, matrin-type 4
  ENSP ID: ENSP00000427918
MKSSDIDQDLFTDSYCKVCSAQLISESQRVAHYECGAVPLGMSNVT

SEQ ID NO: 102148 - protein, 211 aa, Homo sapiens
  Payload ID: 20357
  Gene Name: zinc finger, matrin-type 4
  ENSP ID: ENSP00000428423
MKSSDIDQDLFTDSYCKVCSAQLISESQRVAHYESRKHASKVRLYYMLHPRDGGCPAKRLRSENGSDADMVDKNKCCTLCNMSFTSAVVADSHYQGKIHAKRLKLLLGEKTPLKTTATPLSPLKPPRMDTAPVVASPYQRRDSDRYCGLCAAWFNNPLMAQQHYDGKKHKKNAARVALLEQLGTTLDMGELRGLRRNYRCTICSVSLNSIE

SEQ ID NO: 102149 - protein, 46 aa, Homo sapiens; identical to SEQ ID NO: 102147
  Payload ID: 20357
  Gene Name: zinc finger, matrin-type 4
  ENSP ID: ENSP00000429068

SEQ ID NO: 102150 - protein, 61 aa, Homo sapiens
  Payload ID: 20357
  Gene Name: zinc finger, matrin-type 4
  ENSP ID: ENSP00000430050
MKSSDIDQDLFTDSYCKVCSAQLISESQRVAHYEGPEFLRKGNFIRHTKPKEDVTLKKVAV

SEQ ID NO: 102151 - protein, 170 aa, Homo sapiens
  Payload ID: 20358
  Gene Name: zinc finger, matrin-type 5
  Uniprot ID: Q9UDW3
  ENSP ID: ENSP00000344241
MGKRYFCDYCDRSFQDNLHNRKKHLNGLQHLKAKKVWYDMFRDAAAILLDEQNKRPCRKFLLTGQCDFGSNCRFSHMSERDLQELSIQVEEERRAREWLLDAPELPEGHLEDWLEKRAKRLSSAPSSRAEPIRTTVFQYPVGWPPVQELPPSLRAPPPGGWPLQPRVQWG

SEQ ID NO: 102152 - protein, 1067 aa, Homo sapiens
  Payload ID: 20359
  Gene Name: zinc finger, MIZ-type containing 1
  Uniprot ID: Q9ULJ6
  ENSP ID: ENSP00000334474
MNSMDRHIQQTNDRLQCIKQHLQNPANFHNAATELLDWCGDPRAFQRPFEQSLMGCLTVVSRVAAQQGFDLDLGYRLLAVCAANRDKFTPKSAALLSSWCEELGRLLLLRHQKSRQSDPPGKLPMQPPLSSMSSMKPTLSHSDGSFPYDSVPWQQNTNQPPGSLSVVTTVWGVTNTSQSQVLGNPMANANNPMNPGGNPMASGMTTSNPGLNSPQFAGQQQQFSAKAGPAQPYIQQSMYGRPNYPGSGGFGASYPGGPNAPAGMGIPPHTRPPADFTQPAAAAAAAAVAAAAATATATATATVAALQETQNKDINQYGPMGPTQAYNSQFMNQPGPRGPASMGGSMNPASMAAGMTPSGMSGPPMGMNQPRPPGISPFGTHGQRMPQQTYPGPRPQSLPIQNIKRPYPGEPNYGNQQYGPNSQFPTQPGQYPAPNPPRPLTSPNYPGQRMPSQPSSGQYPPPTVNMGQYYKPEQFNGQNNTFSGSSYSNYSQGNVNRPPRPVPVANYPHSPVPGNPTPPMTPGSSIPPYLSPSQDVKPPFPPDIKPNMSALPPPPANHNDELRLTFPVRDGVVLEPFRLEHNLAVSNHVFHLRPTVHQTLMWRSDLELQFKCYHHEDRQMNTNWPASVQVSVNATPLTIERGDNKTSHKPLHLKHVCQPGRNTIQITVTACCCSHLFVLQLVHRPSVRSVLQGLLKKRLLPAEHCITKIKRNFSSVAASSGNTTLNGEDGVEQTAIKVSLKCPITFRRIQLPARGHDCKHVQCFDLESYLQLNCERGTWRCPVCNKTALLEGLEVDQYMWGILNAIQHSEFEEVTIDPTCSWRPVPIKSDLHIKDDPDGIPSKRFKTMSPSQMIMPNVMEMIAALGPGPSPYPLPPPPGGTNSNDYSSQGNNYQGHGNFDFPHGNPGGTSMNDFMHGPPQLSHPPDMPNNMAALEKPLSHPMQETMPHAGSSDQPHPSIQQGLHVPHPSSQSGPPLHHSGAPPPPPSQPPRQPPQAAPSSHPHSDLTFNPSSALEGQAGAQGASDMPEPSLDLLPELTNPDELLSYLDPPDLPSNSNDDLLSLFENN

SEQ ID NO: 102153 - protein, 968 aa, Homo sapiens [sequence omitted]

SEQ ID NO: 102154 - protein, 220 aa, Homo sapiens
  Payload ID: 20359
  Gene Name: zinc finger, MIZ-type containing 1
  ENSP ID: ENSP00000481736
MNSMDRHIQQTNDRLQCIKQHLQNPANFHNAATELLDWCGDPRAFQRPFEQSLMGCLTVVSRVAAQQGFDLDLGYRLLAVCAANRDKFTPKSAALLSSWCEELGRLLLLRHQKSRQSDPPGKLPMQPPLSSMSSMKPTLSHSDGSFPYDSVPWLPAYPACTPPPSQSHPNSCSLKQKQPLAFPPPLCSIWLTTLQGLLGSLSCVHFVSGWSVPREPHGLG

SEQ ID NO: 102155 - protein, 894 aa, Homo sapiens
  Payload ID: 20360
  Gene Name: zinc finger, MIZ-type containing 2
  Uniprot ID: Q8NF64
  ENSP ID: ENSP00000265346
MNSMNPMKPALPPAPHGDGSFAYESVPWQQSATQPAGSLSVVTTVWGVGNATQSQVLGNPMGPAGSPSGSSMMPGVAGGSSALTSPQCLGQQAFAEGGANKGYVQQGVYSRGGYPGAPGFTTGYAGGPGGLGLPSHAARPSTDFTQAAAAAAVAAAAATATATATATVAALQEKQSQELSQYGAMGAGQSFNSQFLQHGGPRGPSVPAGMNPTGIGGVMGPSGLSPLAMNPTRAAGMTPLYAGQRLPQHGYPGPPQAQPLPRQGVKRTYSEVYPGQQYLQGGQYAPSTAQFAPSPGQPPAPSPSYPGHRLPLQQGMTQSLSVPGPTGLHYKPTRSIPGYPSSPLPGNPTPPMTPSSSVPYMSPNQEVKSPFLPDLKPNLNSLHSSPSGSGPCDELRLTFPVRDGVVLEPFRLQHNLAVSNHVFQLRDSVYKTLIMRPDLELQFKCYHHEDRQMNTNWPASVQVSVNATPLTIERGDNKTSHKPLYLKHVCQPGRNTIQITVTACCCSHLFVLQLVHRPSVRSVLQGLLKKRLLPAEHCITKIKRNFSSGTIPGTPGPNGEDGVEQTAIKVSLKCPITFRRIQLPARGHDCRHIQCFDLESYLQLNCERGTWRCPVCNKTALLEGLEVDQYMLGILIYIQNSDYEEITIDPTCSWKPVPVKPDMHIKEEPDGPALKRCRTVSPAHVLMPSVMEMIAALGPGAAPFAPLQPPSVPAPSDYPGQGSSFLGPGTFPESFPPTTPSTPTLAEFTPGPPPISYQSDIPSSLLTSEKSTACLPSQMAPAGHLDPTHNPGTPGLHTSNLGAPPGPQLHHSNPPPASRQSLGQASLGPTGELAFSPATGVMGPPSMSGAGEAPEPALDLLPELTNPDELLSYLGPPDLPTNNNDDLLSLFENN

SEQ ID NO: 102156 - protein, 920 aa, Homo sapiens
  Payload ID: 20360
  Gene Name: zinc finger, MIZ-type containing 2
  Uniprot ID: Q8NF64
  ENSP ID: ENSP00000311778
MNSMNPMKPALPPAPHGDGSFAYESVPWQQSATQPAGSLSVVTTVWGVGNATQSQVLGNPMGPAGSPSGSSMMPGVAGGSSALTSPQCLGQQAFAEGGANKGYVQQGVYSRGGYPGAPGFTTGYAGGPGGLGLPSHAARPSTDFTQAAAAAAVAAAAATATATATATVAALQEKQSQELSQYGAMGAGQSFNSQFLQHGGPRGPSVPAGMNPTGIGGVMGPSGLSPLAMNPTRAAGMTPLYAGQRLPQHGYPGPPQAQPLPRQGVKRTYSEVYPGQQYLQGGQYAPSTAQFAPSPGQPPAPSPSYPGHRLPLQQGMTQSLSVPGPTGLHYKPTEQFNGQGASFNGGSVSYSQPGLSGPTRSIPGYPSSPLPGNPTPPMTPSSSVPYMSPNQEVKSPFLPDLKPNLNSLHSSPSGSGPCDELRLTFPVRDGVVLEPFRLQHNLAVSNHVFQLRDSVYKTLIMRPDLELQFKCYHHEDRQMNTNWPASVQVSVNATPLTIERGDNKTSHKPLYLKHVCQPGRNTIQITVTACCCSHLFVLQLVHRPSVRSVLQGLLKKRLLPAEHCITKIKRNFSSGTIPGTPGPNGEDGVEQTAIKVSLKCPITFRRIQLPARGHDCRHIQCFDLESYLQLNCERGTWRCPVCNKTALLEGLEVDQYMLGILIYIQNSDYEEITIDPTCSWKPVPVKPDMHIKEEPDGPALKRCRTVSPAHVLMPSVMEMIAALGPGAAPFAPLQPPSVPAPSDYPGQGSSFLGPGTFPESFPPTTPSTPTLAEFTPGPPPISYQSDIPSSLLTSEKSTACLPSQMAPAGHLDPTHNPGTPGLHTSNLGAPPGPQLHHSNPPPASRQSLGQASLGPTGELAFSPATGVMGPPSMSGAGEAPEPALDLLPELTNPDELLSYLGPPDLPTNNNDDLLSLFENN

SEQ ID NO: 102157 - protein, 888 aa, Homo sapiens
  Payload ID: 20360
  Gene Name: zinc finger, MIZ-type containing 2
  ENSP ID: ENSP00000396601
MNSMNPMKPALPPAPHGDGSFAYESVPWQQSATQPAGSLSVVTTVWGVGNATQSQCLGQQAFAEGGANKGYVQQGVYSRGGYPGAPGFTTGYAGGPGGLGLPSHAARPSTDFTQAAAAAAVAAAAATATATATATVAALQEKQSQELSQYGAMGAGQSFNSQFLQHGGPRGPSVPAGMNPTGIGGVMGPSGLSPLAMNPTRAAGMTPLYAGQRLPQHGYPGPPQAQPLPRQGVKRTYSEVYPGQQYLQGGQYAPSTAQFAPSPGQPPAPSPSYPGHRLPLQQGMTQSLSVPGPTGLHYKPTEQFNGQGASFNGGSVSYSQPGLSGPTRSIPGYPSSPLPGNPTPPMTPSSSVPYMSPNQEVKSPFLPDLKPNLNSLHSSPSGSGPCDELRLTFPVRDGVVLEPFRLQHNLAVSNHVFQLRDSVYKTLIMRPDLELQFKCYHHEDRQMNTNWPASVQVSVNATPLTIERGDNKTSHKPLYLKHVCQPGRNTIQITVTACCCSHLFVLQLVHRPSVRSVLQGLLKKRLLPAEHCITKIKRNFSSGTIPGTPGPNGEDGVEQTAIKVSLKCPITFRRIQLPARGHDCRHIQCFDLESYLQLNCERGTWRCPVCNKTALLEGLEVDQYMLGILIYIQNSDYEEITIDPTCSWKPVPVKPDMHIKEEPDGPALKRCRTVSPAHVLMPSVMEMIAALGPGAAPFAPLQPPSVPAPSDYPGQGSSFLGPGTFPESFPPTTPSTPTLAEFTPGPPPISYQSDIPSSLLTSEKSTACLPSQMAPAGHLDPTHNPGTPGLHTSNLGAPPGPQLHHSNPPPASRQSLGQASLGPTGELAFSPATGVMGPPSMSGAGEAPEPALDLLPELTNPDELLSYLGPPDLPTNNNDDLLSLFENN

SEQ ID NO: 102158 - protein, 62 aa, Homo sapiens
  Payload ID: 20360
  Gene Name: zinc finger, MIZ-type containing 2
  ENSP ID: ENSP00000406820
MNSMNPMKPALPPAPHGDGSFAYESVPWQQSATQPAGSLSVVTTVWGVGNATQSQGVPLAAP

SEQ ID NO: 102159 - protein, 862 aa, Homo sapiens
  Payload ID: 20360
  Gene Name: zinc finger, MIZ-type containing 2
  Uniprot ID: Q8NF64
  ENSP ID: ENSP00000409648
MNSMNPMKPALPPAPHGDGSFAYESVPWQQSATQPAGSLSVVTTVWGVGNATQSQCLGQQAFAEGGANKGYVQQGVYSRGGYPGAPGFTTGYAGGPGGLGLPSHAARPSTDFTQAAAAAAVAAAAATATATATATVAALQEKQSQELSQYGAMGAGQSFNSQFLQHGGPRGPSVPAGMNPTGIGGVMGPSGLSPLAMNPTRAAGMTPLYAGQRLPQHGYPGPPQAQPLPRQGVKRTYSEVYPGQQYLQGGQYAPSTAQFAPSPGQPPAPSPSYPGHRLPLQQGMTQSLSVPGPTGLHYKPTRSIPGYPSSPLPGNPTPPMTPSSSVPYMSPNQEVKSPFLPDLKPNLNSLHSSPSGSGPCDELRLTFPVRDGVVLEPFRLQHNLAVSNHVFQLRDSVYKTLIMRPDLELQFKCYHHEDRQMNTNWPASVQVSVNATPLTIERGDNKTSHKPLYLKHVCQPGRNTIQITVTACCCSHLFVLQLVHRPSVRSVLQGLLKKRLLPAEHCITKIKRNFSSGTIPGTPGPNGEDGVEQTAIKVSLKCPITFRRIQLPARGHDCRHIQCFDLESYLQLNCERGTWRCPVCNKTALLEGLEVDQYMLGILIYIQNSDYEEITIDPTCSWKPVPVKPDMHIKEEPDGPALKRCRTVSPAHVLMPSVMEMIAALGPGAAPFAPLQPPSVPAPSDYPGQGSSFLGPGTFPESFPPTTPSTPTLAEFTPGPPPISYQSDIPSSLLTSEKSTACLPSQMAPAGHLDPTHNPGTPGLHTSNLGAPPGPQLHHSNPPPASRQSLGQASLGPTGELAFSPATGVMGPPSMSGAGEAPEPALDLLPELTNPDELLSYLGPPDLPTNNNDDLLSLFENN

SEQ ID NO: 102160 - protein, 920 aa, Homo sapiens; identical to SEQ ID NO: 102156
  Payload ID: 20360
  Gene Name: zinc finger, MIZ-type containing 2
  Uniprot ID: Q8NF64
  ENSP ID: ENSP00000414723

SEQ ID NO: 102161 - protein, 89 aa, Homo sapiens
  Payload ID: 20360
  Gene Name: zinc finger, MIZ-type containing 2
  ENSP ID: ENSP00000415501
MNSMNPMKPALPPAPHGDGSFAYESVPWQQSATQPAGSLSVVTTVWGVGNATQSQVLGNPMGPAGSPSGSSMMPGVAGGSSALTSPQCL

SEQ ID NO: 102162 - protein, 923 aa, Homo sapiens
  Payload ID: 20360
  Gene Name: zinc finger, MIZ-type containing 2
  ENSP ID: ENSP00000483853
MNSMNPMKPALPPAPHGDGSFAYESVPWQQSATQPAGSLSVVTTVWGVGNATQSQVLGNPMGPAGSPSGSSMMPGVAGGSSALTSPQCLGQQAFAEGGANKGYVQQGVYSRGGYPGAPGFTTGYAGGPGGLGLPSHAARPSTDFTQAAAAAAVAAAAATATATATATVAALQEKQSQELSQYGAMGAGQSFNSQFLQHGGPRGPSVPAGMNPTGIGGVMGPSGLSPLAMNPTRAAGMTPLYAGQRLPQHGYPGPPQAQPLPRQGVKRTYSEVYPGQQYLQGGQYAPSTAQFAPSPGQPPAPSPSYPGHRLPLQQGMTQSLSVPGPTGLHYKPTEQFNGQGASFNGGSVSYSQPGLSGPTRSIPGYPSSPLPGNPTPPMTPSSSVPYMSPNQEVKSPFLPDLKPNLNSLHSSPSGSGPCDELRLTFPVRDGVVLEPFRLQHNLAVSNHVFQLRDSVYKTLIMRPDLELQFKCYHHEDRQMNTNWPASVQVSVNATPLTIERGDNKTSHKPLYLKHVCARPQHHPSPSPPAAACVSCSHLFVLQLVHRPSVRSVLQGLLKKRLLPAEHCITKIKRNFSSGTIPGTPGPNGEDGVEQTAIKVSLKCPITFRRIQLPARGHDCRHIQCFDLESYLQLNCERGTWRCPVCNKTALLEGLEVDQYMLGILIYIQNSDYEEITIDPTCSWKPVPVKPDMHIKEEPDGPALKRCRTVSPAHVLMPSVMEMIAALGPGAAPFAPLQPPSVPAPSDYPGQGSSFLGPGTFPESFPPTTPSTPTLAEFTPGPPPISYQSDIPSSLLTSEKSTACLPSQMAPAGHLDPTHNPGTPGLHTSNLGAPPGPQLHHSNPPPASRQSLGQASLGPTGELAFSPATGVMGPPSMSGAGEAPEPALDLLPELTNPDELLSYLGPPDLPTNNNDDLLSLFENN

SEQ ID NO: 102163 - protein, 1142 aa, Homo sapiens
  Payload ID: 20361
  Gene Name: zinc finger, MYM-type 1
  Uniprot ID: Q5SVZ6
  ENSP ID: ENSP00000352920
MKEPLLGGECDKAVASQLGLLDEIKTEPDNAQEYCHRQQSRTQENELKINAVFSESASQLTAGIQLSLASSGVNKMLPSVSTTAIQVSCAGCKKILQKGQTAYQRKGSAQLFCSIPCITEYISSASSPVPSKRTCSNCSKDILNPKDVISVQLEDTTSCKTFCSLSCLSSYEEKRKPFVTICTNSILTKCSMCQKTAIIQYEVKYQNVKHNLCSNACLSKFHSANNFIMNCCENCGTYCYTSSSLSHILQMEGQSHYFNSSKSITAYKQKPAKPLISVPCKPLKPSDEMIETTSDLGKTELFCSINCFSAYSKAKMESSSVSVVSVVHDTSTELLSPKKDTTPVISNIVSLADTDVALPIMNTDVLQDTVSSVTATADVIVDLSKSSPSEPSNAVASSSTEQPSVSPSSSVFSQHAIGSSTEVQKDNMKSMKISDELCHPKCTSKVQKVKGKSRSIKKSCCADFECLENSKKDVAFCYSCQLFCQKYFSCGRESFATHGTSNWKKTLEKFRKHEKSEMHLKSLEFWREYQFCDGAVSDDLSIHSKQIEGNKKYLKLIIENILFLGKQCLPLRGNDQSVSSVNKGNFLELLEMRAKDKGEETFRLMNSQVDFYNSTQIQSDIIEIIKTEMLQDIVNEINDSSAFSIICDETINSAMKEQLSICVRYPQKSSKAILIKERFLGFVDTEEMTGTHLHRTIKTYLQQIGVDMDKIHGQAYDSTTNLKIKFNKIAAEFKKEEPRALYIHCYAHFLDLSIIRFCKEVKELRSALKTLSSLFNTICMSGEMLANFRNIYRLSQNKTCKKHISQSCWTVHDRTLLSVIDSLPEIIETLEVIASHSSNTSFADELSHLLTLVSKFEFVFCLKFLYRVLSVTGILSKELQNKTIDIFSLSSKIEAILECLSSERNDVYFKTIWDGTEEICQKITCKGFKVEKPSLQKRRKIQKSVDLGNSDNMFFPTSTEEQYKINIYYQGLDTILQNLKLCFSEFDYCKIKQISELLFKWNEPLNETTAKHVQEFYKLDEDIIPELRFYRHYAKLNFVIDDSCINFVSLGCLFIQHGLHSNIPCLSKLLYIALSWPITSASTENSFSTLPRLKTYLCNTMGQEKLTGPALMAVEQELVNKLMEPERLNEIVEKFISQMKEI

SEQ ID NO: 102164 - protein, 1142 aa, Homo sapiens; identical to SEQ ID NO: 102163
  Payload ID: 20361
  Gene Name: zinc finger, MYM-type 1
  Uniprot ID: Q5SVZ6
  ENSP ID: ENSP00000362427

SEQ ID NO: 102165 - protein, 461 aa, Homo sapiens
  Payload ID: 20361
  Gene Name: zinc finger, MYM-type 1
  ENSP ID: ENSP00000394233
MKEPLLGGECDKAVASQLGLLDEIKTEPDNAQEYCHRQQSRTQENELKINAVFSESASQLTAGIQLSLASSGVNKMLPSVSTTAIQVSCAGCKKILQKGQTAYQRKGSAQLFCSIPCITEYISSASSPVPSKRTCSNCSKDILNPKDVISVQLEDTTSCKTFCSLSCLSSYEEKRKPFVTICTNSILTKCSMCQKTAIIQYEVKYQNVKHNLCSNACLSKFHSANNFIMNCCENCGTYCYTSSSLSHILQMEGQSHYFNSSKSITAYKQKPAKPLISVPCKPLKPSDEMIETTSDLGKTELFCSINCFSAYSKAKMESSSVSVVSVVHDTSTELLSPKKDTTPVISNIVSLADTDVALPIMNTDVLQDTVSSVTATADVIVDLSKSSPSEPSNAVASSSTEQPSVSPSSSVFSQHAIGSSTEVQKDNMKSMKISDELCHPKCTSKVQKVKGKSRSIKKSCC

SEQ ID NO: 102166 - protein, 1142 aa, Homo sapiens; identical to SEQ ID NO: 102163
  Payload ID: 20361
  Gene Name: zinc finger, MYM-type 1
  Uniprot ID: Q5SVZ6
  ENSP ID: ENSP00000482579

SEQ ID NO: 102167 - protein, 1377 aa, Homo sapiens
  Payload ID: 20362
  Gene Name: zinc finger, MYM-type 2
  Uniprot ID: Q9UBW7
  ENSP ID: ENSP00000372324
MDTSSVGGLELTDQTPVLLGSTAMATSLTNVGNSFSGPANPLVSRSNKFQNSSVEDDDDVVFIEPVQPPPPSVPVVADQRTITFTSSKNEELQGNDSKITPSSKELASQKGSVSETIVIDDEEDMETNQGQEKNSSNFIERRPPETKNRTNDVDFSTSSFSRSKVNAGMGNSGITTEPDSEIQIANVTTLETGVSSVNDGQLENTDGRDMNLMITHVTSLQNTNLGDVSNGLQSSNFGVNIQTYTPSLTSQTKTGVGPFNPGRMNVAGDVFQNGESATHHNPDSWISQSASFPRNQKQPGVDSLSPVASLPKQIFQPSVQQQPTKPVKVTCANCKKPLQKGQTAYQRKGSAHLFCSTTCLSSFSHKPAPKKLCVMCKKDITTMKGTIVAQVDSSESFQEFCSTSCLSLYEDKQNPTKGALNKSRCTICGKLTEIRHEVSFKNMTHKLCSDHCFNRYRMANGLIMNCCEQCGEYLPSKGAGNNVLVIDGQQKRFCCQSCVSEYKQVGSHPSFLKEVRDHMQDSFLMQPEKYGKLTTCTGCRTQCRFFDMTQCIGPNGYMEPYCSTACMNSHKTKYAKSQSLGIICHFCKRNSLPQYQATMPDGKLYNFCNSSCVAKFQALSMQSSPNGQFVAPSDIQLKCNYCKNSFCSKPEILEWENKVHQFCSKTCSDDYKKLHCIVTYCEYCQEEKTLHETVNFSGVKRPFCSEGCKLLYKQDFARRLGLRCVTCNYCSQLCKKGATKELDGVVRDFCSEDCCKKFQDWYYKAARCDCCKSQGTLKERVQWRGEMKHFCDQHCLLRFYCQQNEPNMTTQKGPENLHYDQGCQTSRTKMTGSAPPPSPTPNKEMKNKAVLCKPLTMTKATYCKPHMQTKSCQTDDTWRTEYVPVPIPVPVYIPVPMHMYSQNIPVPTTVPVPVPVPVFLPAPLDSSEKIPAAIEELKSKVSSDALDTELLTMTDMMSEDEGKTETTNINSVIIETDIIGSDLLKNSDPETQSSMPDVPYEPDLDIEIDFPRAAEELDMENEFLLPPVFGEEYEEQPRPRSKKKGAKRKAVSGYQSHDDSSDNSECSFPFKYTYGVNAWKHWVKTRQLDEDLLVLDELKSSKSVKLKEDLLSHTTAELNYGLAHFVNEIRRPNGENYAPDSIYYLCLGIQEYLCGSNRKDNIFIDPGYQTFEQELNKILRSWQPSILPDGSIFSRVEEDYLWRIKQLGSHSPVALLNTLFYFNTKYFGLKTVEQHLRLSFGTVFRHWKKNPLTMENKACLRYQVSSLCGTDNEDKITTGKRKHEDDEPVFEQIENTANPSRCPVKMFECYLSKSPQNLNQRMDVFYLQPECSSSTDSPVWYTSTSLDRNTLENMLVRVLLVKDIYDKDNYELDEDTD

SEQ ID NO: 102168 - protein, 1377 aa, Homo sapiens; identical to SEQ ID NO: 102167
  Payload ID: 20362
  Gene Name: zinc finger, MYM-type 2
  Uniprot ID: Q9UBW7
  ENSP ID: ENSP00000372327

SEQ ID NO: 102169 - protein, 1377 aa, Homo sapiens; identical to SEQ ID NO: 102167
  Payload ID: 20362
  Gene Name: zinc finger, MYM-type 2
  Uniprot ID: Q9UBW7
  ENSP ID: ENSP00000479904

SEQ ID NO: 102170 - protein, 276 aa, Homo sapiens
  Payload ID: 20362
  Gene Name: zinc finger, MYM-type 2
  ENSP ID: ENSP00000483904
MDTSSVGGLELTDQTPVLLGSTAMATSLTNVGNSFSGPANPLVSRSNKFQNSSVEDDDDVVFIEPVQPPPPSVPVVADQRTITFTSSKNEELQGNDSKITPSSKELASQKGSVSETIVIDDEEDMETNQGQEKNSSNFIERRPPETKNRTNDVDFSTSSFSRSKTKTGVGPFNPGRMNVAGDVFQNGESATHHNPDSWISQSASFPRNQKQPGVDSLSPVASLPKQIFQPSVQQQPTKPVKVTCANCKKPLQKGQTAYQRKGSAHLFCSTTCLSSF

SEQ ID NO: 102171 - protein, 1370 aa, Homo sapiens
  Payload ID: 20363
  Gene Name: zinc finger, MYM-type 3
  Uniprot ID: Q14202
  ENSP ID: ENSP00000322845
MDPSDFPSPFDPLTLPEKPLAGDLPVDMEFGEDLLESQTAPTRGWAPPGPSPSSGALDLLDTPAGLEKDPGVLDGATELLGLGGLLYKAPSPPEVDHGPEGTLAWDAGDQTLEPGPGGQTPEVVPPDPGAGANSCSPEGLLEPLAPDSPITLQSPHIEEEETTSIATARRGSPGQEEELPQGQPQSPNAPPSPSVGETLGDGINSSQTKPGGSSPPAHPSLPGDGLTAKASEKPPERKRSERVRRAEPPKPEVVDSTESIPVSDEDSDAMVDDPNDEDFVPFRPRRSPRMSLRSSVSQRAGRSAVGTKMTCAHCRTPLQKGQTAYQRKGLPQLFCSSSCLTTFSKKPSGKKTCTFCKKEIWNTKDSVVAQTGSGGSFHEFCTSVCLSLYEAQQQRPIPQSGDPADATRCSICQKTGEVLHEVSNGSVVHRLCSDSCFSKFRANKGLKTNCCDQCGAYIYTKTGSPGPELLFHEGQQKRFCNTTCLGAYKKKNTRVYPCVWCKTLCKNFEMLSHVDRNGKTSLFCSLCCTTSYKVKQAGLTGPPRPCSFCRRSLSDPCYYNKVDRTVYQFCSPSCWTKFQRTSPEGGIHLSCHYCHSLFSGKPEVLDWQDQVFQFCCRDCCEDFKRLRGVVSQCEHCRQEKLLHEKLRFSGVEKSFCSEGCVLLYKQDFTKKLGLCCITCTYCSQTCQRGVTEQLDGSTWDFCSEDCKSKYLLWYCKAARCHACKRQGKLLETIHWRGQIRHFCNQQCLLRFYSQQNQPNLDTQSGPESLLNSQSPESKPQTPSQTKVENSNTVRTPEENGNLGKIPVKTRSAPTAPTPPPPPPPATPRKNKAAMCKPLMQNRGVSCKVEMKSKGSQTEEWKPQVIVLPIPVPIFVPVPMHLYCQKVPVPFSMPIPVPVPMFLPTTLESTDKIVETIEELKVKIPSNPLEADILAMAEMIAEAEELDKASSDLCDLVSNQSAEGLLEDCDLFGPARDDVLAMAVKMANVLDEPGQDLEADFPKNPLDINPSVDFLFDCGLVGPEDVSTEQDLPRTMRKGQKRLVLSESCSRDSMSSQPSCTGLNYSYGVNAWKCWVQSKYANGETSKGDELRFGPKPMRIKEDILACSAAELNYGLAQFVREITRPNGERYEPDSIYYLCLGIQQYLLENNRMVNIFTDLYYLTFVQELNKSLSTWQPTLLPNNTVFSRVEEEHLWECKQLGVYSPFVLLNTLMFFNTKFFGLQTAEEHMQLSFTNVVRQSRKCTTPRGTTKVVSIRYYAPVRQRKGRDTGPGKRKREDEAPILEQRENRMNPLRCPVKFYEFYLSKCPESLRTRNDVFYLQPERSCIAESPLWYSVIPMDRSMLESMLNRILAVREIYEELGRPGEEDLD

SEQ ID NO: 102172 - protein, 349 aa, Homo sapiens
  Payload ID: 20363
  Gene Name: zinc finger, MYM-type 3
  ENSP ID: ENSP00000363090
MDPSDFPSPFDPLTLPEKPLAGDLPVDMEFGEDLLESQTAPTRGWAPPGPSPSSGALDLLDTPAGLEKDPGVLDGATELLGLGGLLYKAPSPPEVDHGPEGTLAWDAGDQTLEPGPGGQTPEVVPPDPGAGANSCSPEGLLEPLAPDSPITLQSPHIEEEETTSIATARRGSPGQEEELPQGQPQSPNAPPSPSVGETLGDGINSSQTKPGGSSPPAHPSLPGDGLTAKASEKPPERVQKRSERVRRAEPPKPEVVDSTESRRSGTPRTRLWRRLVLEAPSMSSAHPSVSPCMRPSSSARSPSLGIPPTLLAAAYARRLERSCTRSAMAAWYTGSAAILASPNSGPTRD

SEQ ID NO: 102173 - protein, 495 aa, Homo sapiens
  Payload ID: 20363
  Gene Name: zinc finger, MYM-type 3
  Uniprot ID: Q14202
  ENSP ID: ENSP00000363093
MDPSDFPSPFDPLTLPEKPLAGDLPVDMEFGEDLLESQTAPTRGWAPPGPSPSSGALDLLDTPAGLEKDPGVLDGATELLGLGGLLYKAPSPPEVDHGPEGTLAWDAGDQTLEPGPGGQTPEVVPPDPGAGANSCSPEGLLEPLAPDSPITLQSPHIEEEETTSIATARRGSPGQEEELPQGQPQSPNAPPSPSVGETLGDGINSSQTKPGGSSPPAHPSLPGDGLTAKASEKPPERKRSERVRRAEPPKPEVVDSTESIPVSDEDSDAMVDDPNDEDFVPFRPRRSPRMSLRSSVSQRAGRSAVGTKMTCAHCRTPLQKGQTAYQRKGLPQLFCSSSCLTTFSKKPSGKKTCTFCKKEIWNTKDSVVAQTGSGGSFHEFCTSVCLSLYEAQQQRPIPQSGDPADATRCSICQKTGEVLHEVSNGSVVHRLCSDSCFSKFRANKGLKTNCCDQCGAYIYTKTGSPGPELLFHEGQQKRFCNTTCLGAYKKVGPRE

SEQ ID NO: 102174 - protein, 497 aa, Homo sapiens
  Payload ID: 20363
  Gene Name: zinc finger, MYM-type 3
  ENSP ID: ENSP00000363094
MDPSDFPSPFDPLTLPEKPLAGDLPVDMEFGEDLLESQTAPTRGWAPPGPSPSSGALDLLDTPAGLEKDPGVLDGATELLGLGGLLYKAPSPPEVDHGPEGTLAWDAGDQTLEPGPGGQTPEVVPPDPGAGANSCSPEGLLEPLAPDSPITLQSPHIEEEETTSIATARRGSPGQEEELPQGQPQSPNAPPSPSVGETLGDGINSSQTKPGGSSPPAHPSLPGDGLTAKASEKPPERVQKRSERVRRAEPPKPEVVDSTESIPVSDEDSDAMVDDPNDEDFVPFRPRRSPRMSLRSSVSQRAGRSAVGTKMTCAHCRTPLQKGQTAYQRKGLPQLFCSSSCLTTFSKKPSGKKTCTFCKKEIWNTKDSVVAQTGSGGSFHEFCTSVCLSLYEAQQQRPIPQSGDPADATRCSICQKTGEVLHEVSNGSVVHRLCSDSCFSKFRANKGLKTNCCDQCGAYIYTKTGSPGPELLFHEGQQKRFCNTTCLGAYKKVGPRE

SEQ ID NO: 102175 - protein, 1280 aa, Homo sapiens
  Payload ID: 20363
  Gene Name: zinc finger, MYM-type 3
  ENSP ID: ENSP00000363096
MDPSDFPSPFDPLTLPEKPLAGDLPVDMEFGEDLLESQTAPTRGWAPPGPSPSSGALDLLDTPAGLEKDPGVLDGATELLGLGGLLYKAPSPPEVDHGPEGTLAWDAGDQTLEPGPGGQTPEVVPPDPGAGANSCSPEGLLEPLAPDSPITLQSPHIEEEETTSIATARRGSPGQEEELPQGQPQSPNAPPSPSVGETLGDGINSSQTKPGGSSPPAHPSLPGDGLTAKASEKPPERVQKRSERVRRAEPPKPEVVDSTESIPVSDEDSDAMVDDPNDEDFVPFRPRRSPRMSLRSSVSQRAGRSAVGTKMTCAHCRTPLQKGQTAYQRKGLPQLFCSSSCLTTFSKKPSGKKTCTFCKKEIWNTKDSVVAQTGSGGSFHEFCTSVCLSLYEAQQQRPIPQSGDPADATRCSICQKTGEVLHEVSNGSVVHRLCSDSCFSKFRANKGLKTNCCDQCGAYIYTKTGSPGPELLFHEGQQKRFCNTTCLGAYKKKNTRVYPCVWCKTLCKNFEMLSHVDRNGKTSLFCSLCCTTSYKVKQAGLTGPPRPCSFCRRSLSDPCYYNKVDRTVYQFCSPSCWTKFQRTSPEGGIHLSCHYCHSLFSGKPEVLDWQDQVFQFCCRDCCEDFKRLRGVVSQCEHCRQEKLLHEKLRFSGVEKSFCSEGCVLLYKQDFTKKLGLCCITCTYCSQTCQRGVTEQLDGSTWDFCSEDCKSKYLLWYCKAARCHACKRQGKLLETIHWRGQIRHFCNQQCLLRFYSQQNQPNLDTQSGPESLLNSQSPESKPQTPSQTKVENSNTVRTPEENGNLGKIPVKTRSAPTAPTPPPPPPPATPRKNKAAMCKPLMQNRGVSCKVEMKSKGSQTEEWKPQVIVLPIPVPIFVPVPMHLYCQKVPVPFSMPIPVPVPMFLPTTLESTDKIVETIEELKVKIPSNPLEADILAMAEMIAEAEELDKASSDLCDLVSNQSAEGLLEDCDLFGPARDDVLAMAVKMANVLDEPGQDLEADFPKNPLDINPSVDFLFDCGLVGPEDVSTEQDLPRTMRKGQKRLVLSESCSRDSMSSQPSCTGLNYSYGVNAWKCWVQSKYANGETSKAKPMRIKEDILACSAAELNYGLAQFVREITRPNGERYEPDSIYYLCLGIQQYLLENNRMVNIFTDLYYLTFVQELNKSLSTWQPTLLPNNTGPGKRKREDEAPILEQRENRMNPLRCPVKFYEFYLSKCPESLRTRNDVFYLQPERSCIAESPLWYSVIPMDRSMLESMLNRILAVREIYEELGRPGEEDLD

SEQ ID NO: 102176 - protein, 1372 aa, Homo sapiens
  Payload ID: 20363
  Gene Name: zinc finger, MYM-type 3
  ENSP ID: ENSP00000363100
MDPSDFPSPFDPLTLPEKPLAGDLPVDMEFGEDLLESQTAPTRGWAPPGPSPSSGALDLLDTPAGLEKDPGVLDGATELLGLGGLLYKAPSPPEVDHGPEGTLAWDAGDQTLEPGPGGQTPEVVPPDPGAGANSCSPEGLLEPLAPDSPITLQSPHIEEEETTSIATARRGSPGQEEELPQGQPQSPNAPPSPSVGETLGDGINSSQTKPGGSSPPAHPSLPGDGLTAKASEKPPERVQKRSERVRRAEPPKPEVVDSTESIPVSDEDSDAMVDDPNDEDFVPFRPRRSPRMSLRSSVSQRAGRSAVGTKMTCAHCRTPLQKGQTAYQRKGLPQLFCSSSCLTTFSKKPSGKKTCTFCKKEIWNTKDSVVAQTGSGGSFHEFCTSVCLSLYEAQQQRPIPQSGDPADATRCSICQKTGEVLHEVSNGSVVHRLCSDSCFSKFRANKGLKTNCCDQCGAYIYTKTGSPGPELLFHEGQQKRFCNTTCLGAYKKKNTRVYPCVWCKTLCKNFEMLSHVDRNGKTSLFCSLCCTTSYKVKQAGLTGPPRPCSFCRRSLSDPCYYNKVDRTVYQFCSPSCWTKFQRTSPEGGIHLSCHYCHSLFSGKPEVLDWQDQVFQFCCRDCCEDFKRLRGVVSQCEHCRQEKLLHEKLRFSGVEKSFCSEGCVLLYKQDFTKKLGLCCITCTYCSQTCQRGVTEQLDGSTWDFCSEDCKSKYLLWYCKAARCHACKRQGKLLETIHWRGQIRHFCNQQCLLRFYSQQNQPNLDTQSGPESLLNSQSPESKPQTPSQTKVENSNTVRTPEENGNLGKIPVKTRSAPTAPTPPPPPPPATPRKNKAAMCKPLMQNRGVSCKVEMKSKGSQTEEWKPQVIVLPIPVPIFVPVPMHLYCQKVPVPFSMPIPVPVPMFLPTTLESTDKIVETIEELKVKIPSNPLEADILAMAEMIAEAEELDKASSDLCDLVSNQSAEGLLEDCDLFGPARDDVLAMAVKMANVLDEPGQDLEADFPKNPLDINPSVDFLFDCGLVGPEDVSTEQDLPRTMRKGQKRLVLSESCSRDSMSSQPSCTGLNYSYGVNAWKCWVQSKYANGETSKGDELRFGPKPMRIKEDILACSAAELNYGLAQFVREITRPNGERYEPDSIYYLCLGIQQYLLENNRMVNIFTDLYYLTFVQELNKSLSTWQPTLLPNNTVFSRVEEEHLWECKQLGVYSPFVLLNTLMFFNTKFFGLQTAEEHMQLSFTNVVRQSRKCTTPRGTTKVVSIRYYAPVRQRKGRDTGPGKRKREDEAPILEQRENRMNPLRCPVKFYEFYLSKCPESLRTRNDVFYLQPERSCIAESPLWYSVIPMDRSMLESMLNRILAVREIYEELGRPGEEDLD

SEQ ID NO: 102177 - protein, 1358 aa, Homo sapiens
  Payload ID: 20363
  Gene Name: zinc finger, MYM-type 3
  Uniprot ID: Q14202
  ENSP ID: ENSP00000363110
MDPSDFPSPFDPLTLPEKPLAGDLPVDMEFGEDLLESQTAPTRGWAPPGPSPSSGALDLLDTPAGLEKDPGVLDGATELLGLGGLLYKAPSPPEVDHGPEGTLAWDAGDQTLEPGPGGQTPEVVPPDPGAGANSCSPEGLLEPLAPDSPITLQSPHIEEEETTSIATARRGSPGQEEELPQGQPQSPNAPPSPSVGETLGDGINSSQTKPGGSSPPAHPSLPGDGLTAKASEKPPERKRSERVRRAEPPKPEVVDSTESIPVSDEDSDAMVDDPNDEDFVPFRPRRSPRMSLRSSVSQRAGRSAVGTKMTCAHCRTPLQKGQTAYQRKGLPQLFCSSSCLTTFSKKPSGKKTCTFCKKEIWNTKDSVVAQTGSGGSFHEFCTSVCLSLYEAQQQRPIPQSGDPADATRCSICQKTGEVLHEVSNGSVVHRLCSDSCFSKFRANKGLKTNCCDQCGAYIYTKTGSPGPELLFHEGQQKRFCNTTCLGAYKKKNTRVYPCVWCKTLCKNFEMLSHVDRNGKTSLFCSLCCTTSYKVKQAGLTGPPRPCSFCRRSLSDPCYYNKVDRTVYQFCSPSCWTKFQRTSPEGGIHLSCHYCHSLFSGKPEVLDWQDQVFQFCCRDCCEDFKRLRGVVSQCEHCRQEKLLHEKLRFSGVEKSFCSEGCVLLYKQDFTKKLGLCCITCTYCSQTCQRGVTEQLDGSTWDFCSEDCKSKYLLWYCKAARCHACKRQGKLLETIHWRGQIRHFCNQQCLLRFYSQQNQPNLDTQSGPESLLNSQSPESKPQTPSQTKVENSNTIPVKTRSAPTAPTPPPPPPPATPRKNKAAMCKPLMQNRGVSCKVEMKSKGSQTEEWKPQVIVLPIPVPIFVPVPMHLYCQKVPVPFSMPIPVPVPMFLPTTLESTDKIVETIEELKVKIPSNPLEADILAMAEMIAEAEELDKASSDLCDLVSNQSAEGLLEDCDLFGPARDDVLAMAVKMANVLDEPGQDLEADFPKNPLDINPSVDFLFDCGLVGPEDVSTEQDLPRTMRKGQKRLVLSESCSRDSMSSQPSCTGLNYSYGVNAWKCWVQSKYANGETSKGDELRFGPKPMRIKEDILACSAAELNYGLAQFVREITRPNGERYEPDSIYYLCLGIQQYLLENNRMVNIFTDLYYLTFVQELNKSLSTWQPTLLPNNTVFSRVEEEHLWECKQLGVYSPFVLLNTLMFFNTKFFGLQTAEEHMQLSFTNVVRQSRKCTTPRGTTKVVSIRYYAPVRQRKGRDTGPGKRKREDEAPILEQRENRMNPLRCPVKFYEFYLSKCPESLRTRNDVFYLQPERSCIAESPLWYSVIPMDRSMLESMLNRILAVREIYEELGRPGEEDLD

SEQ ID NO: 102178 - protein, 1548 aa, Homo sapiens
  Payload ID: 20364
  Gene Name: zinc finger, MYM-type 4
  Uniprot ID: Q5VZL5
  ENSP ID: ENSP00000322915
MAEREVESGPRKRFEQKSGAVFDEIVENCGGIMDTEMSEDIDHNLTPTLDSMSYGMPNQTGSENSLLDEDDYFLNSGDLAGIPVVGSDNEDEQDFSSKDNLVSSIHTDDSLEVERRVTQHESDNENEIQIQNKLKKDFPKQFDQVSVFKSIRKDFSLVRENSKETFSGKEKNRDLTYEREKRLDKPHKDLDSRLKSSFFDKAANQVEETLHTHLPQTPETNFRDSSYPFANKESIGSELGNSFASNIRIKEEPLDDEYDKAMAPQQGLLDKIKDEPDNAQEYSHGQQQKTQEGELKISAVFSVSGSPLAPQLTTGFQPSLASSGMNKMLPSVPATAVRVSCSGCKKILQKGQTAYQRKGSTQLFCSTLCLTGYTVPPARPPPPLTKKTCSSCSKDILNPKDVISAQFENTTTSKDFCSQSCLSTYELKKKPIVTINTNSISTKCSMCQKNAVIRHEVNYQNVVHKLCSDACFSKFRSANNLTMNCCENCGGYCYSGSGQCHMLQIEGQSKKFCSSSCITAYKQKSAKITPCALCKSLRSSAEMIENTNSLGKTELFCSVNCLSAYRVKMVTSAGVQVQCNSCKTSAIPQYHLAMSDGSIRNFCSYSCVVAFQNLFNKPTGMNSSVVPLSQGQVIVSIPTGSTVSAGGGSTSAVSPTSISSSAAAGLQRLAAQSQHVGFARSVVKLKCQHCNRLFATKPELLDYKGKMFQFCGKNCSDEYKKINNVMAMCEYCKIEKIVKETVRFSGADKSFCSEGCKLLYKHDLAKRWGNHCKMCSYCLQTSPKLVQNNLGGKVEEFCCEECMSKYTVLFYQMAKCDACKRQGKLSESLKWRGEMKHFCNLLCILMFCNQQSVCDPPSQNNAANISMVQAASAGPPSLRKDSTPVIANVVSLASAPAAQPTVNSNSVLQGAVPTVTAKIIGDASTQTDALKLPPSQPPRLLKNKALLCKPITQTKATSCKPHTQNKECQTEDTPSQPQIIVVPVPVPVFVPIPLHLYTQYAPVPFGIPVPMPVPMLIPSSMDSEDKVTESIEDIKEKLPTHPFEADLLEMAEMIAEDEEKKTLSQGESQTSEHELFLDTKIFEKDQGSTYSGDLESEAVSTPHSWEEELNHYALKSNAVQEADSELKQFSKGETEQDLEADFPSDSFDPLNKGQGIQARSRTRRRHRDGFPQPRRRGRKKSIVAVEPRSLIQGAFQGCSVSGMTLKYMYGVNAWKNWVQWKNAKEEQGDLKCGGVEQASSSPRSDPLGSTQDHALSQESSEPGCRVRSIKLKEDILSCTFAELSLGLCQFIQEVRRPNGEKYDPDSILYLCLGIQQYLFENGRIDNIFTEPYSRFMIELTKLLKIWEPTILPNGYMFSRIEEEHLWECKQLGAYSPIVLLNTLLFFNTKYFQLKNVTEHLKLSFAHVMRRTRTLKYSTKMTYLRFFPPLQKQESEPDKLTVGKRKRNEDDEVPVGVEMAENTDNPLRCPVRLYEFYLSKCSESVKQRNDVFYLQPERSCVPNSPMWYSTFPIDPGTLDTMLTRILMVREVHEELAKAKSEDSDVELSD

SEQ ID NO: 102179 - protein, 98 aa, Homo sapiens
  Payload ID: 20364
  Gene Name: zinc finger, MYM-type 4
  ENSP ID: ENSP00000397524
MDTEMSEDIDHNLTPTLDSMSYGMPNQTGSENSLLDEDDYFLNSGDLAGIPVVGSDNEDEQDFSSKDNLVSSIHTDDSLEVERRVTQHESDNENEIQI

SEQ ID NO: 102180 - protein, 1207 aa, Homo sapiens
  Payload ID: 20364
  Gene Name: zinc finger, MYM-type 4
  ENSP ID: ENSP00000400506
  MOD_RES (1)..(1): Any amino acid
XPLDDEYDKAMAPQQGLLDKIKDEPDNAQEYSHGQQQKTQEGELKISAVFSVSGSPLAPQLTTGFQPSLASSGMNKMLPSVPATAVRVSCSGCKKILQKGQTAYQRKGSTQLFCSTLCLTGYTVPPARPPPPLTKKTCSSCSKDILNPKDVISAQFENTTTSKDFCSQSCLSTYELKKKPIVTINTNSISTKCSMCQKNAVIRHEVNYQNVVHKLCSDACFSKFRSANNLTMNCCENCGGYCYSGSGQCHMLQIEGQSKKFCSSSCITAYKQNLFNKPTGMNSSVVPLSQGQVIVSIPTGSTVSAGGGSTSAVSPTSISSSAAAGLQRLAAQSQHVGFARSVVKLKCQHCNRLFATKPELLDYKGKMFQFCGKNCSDEYKKINNVMAMCEYCKIEKIVKETVRFSGADKSFCSEGCKLLYKHDLAKRWGNHCKMCSYCLQTSPKLVQNNLGGKVEEFCCEECMSKYTVLFYQMAKCDACKRQGKLSESLKWRGEMKHFCNLLCILMFCNQQSVCDPPSQNNAANISMVQAASAGPPSLRKDSTPVIANVVSLASAPAAQPTVNSNSVLQGAVPTVTAKIIGDASTQTDALKLPPSQPPRLLKNKALLCKPITQTKATSCKPHTQNKECQTDTPSQPQIIVVPVPVPVFVPIPLHLYTQYAPVPFGIPVPMPVPMLIPSSMDSEDKVTESIEDIKEKLPTHPFEADLLEMAEMIAEDEEKKTLSQGESQTSEHELFLDTKIFEKDQGSTYSGDLESEAVSTPHSWEEELNHYALKSNAVQEADSELKQFSKGETEQDLEADFPSDSFDPLNKGQGIQARSRTRRRHRDGFPQPRRRGRKKSIVAVEPRSLIQGAFQGCSVSGMTLKYMYGVNAWKNWVQWKNAKEEQGDLKCGGVEQASSSPRSDPLGSTQDHALSQESSEPGCRVRSIKLKEDILSCTFAELSLGLCQFIQEVRRPNGEKYDPDSILYLCLGIQQYLFENGRIDNIFTEPYSRFMIELTKLLKIWEPTILPNGYMFSRIEEEHLWECKQLGAYSPIVLLNTLLFFNTKYFQLKNVTEHLKLSFAHVMRRTRTLKYSTKMTYLRFFPPLQKQESEPDKLTVGKRKRNEDDEVPVGVEMAENTDNPLRCPVRLYEFYLSKCSESVKQRNDVFYLQPERSCVPNSPMWYSTFPIDPGTLDTMLTRILMVREVHEELAKAKSEDSDVELSD

SEQ ID NO: 102181 - protein, 669 aa, Homo sapiens
  Payload ID: 20365
  Gene Name: zinc finger, MYM-type 5
  Uniprot ID: Q9UJ78
  ENSP ID: ENSP00000337034
MEKCSVGGLELTEQTPALLGNMAMATSLMDIGDSFGHPACPLVSRSRNSPVEDDDDDDDVVFIESIQPPSISAPAIADQRNFIFASSKNEKPQGNYSVIPPSSRDLASQKGNISETIVIDDEEDIETNGGAEKKSSCFIEWGLPGTKNKTNDLDFSTSSLSRSKTKTGVRPFNPGRMNVAGDLFQNGEFATHHSPDSWISQSASFPSNQKQPGVDSLSPVALLRKQNFQPTAQQQLTKPAKITCANCKKPLQKGQTAYQRKGSAHLFCSTTCLSSFSHKRTQNTRSIICKKDASTKKANVILPVESSKSFQEFYSTSCLSPCENNWNLKKGVFNKSRCTICSKLAEIRHEVSVNNVTHKLCSNHCFNKYRLANGLIMNCCEHCGEYMPSKSTGNNILVIGGQQKRFCCQSCINEYKQMMETKSKKLTASENRKRNAFREENEKQLYGSSNTLLKKIEGIPEKKEKTSQLQLSVECGTDTLLIQENVNLPPSSTSTIADTFQEQLEEKNFEDSIVPVVLSADPGTWPRILNIKQRDTLVENVPPQVRNFNFPKDNTGRKFSETYYTRILPNGEKTTRSWLLYSTSKDSVFCLYCKLFGEGKNQLKNENGCKDWQHLSHILSKHEESEMHVNNSVKYSKLKSDLKKNKAIDAAEHRLYENEKNDGVLLLYT

SEQ ID NO: 102182 - protein, 382 aa, Homo sapiens
  Payload ID: 20365
  Gene Name: zinc finger, MYM-type 5
  Uniprot ID: Q9UJ78
  ENSP ID: ENSP00000372361
MEKCSVGGLELTEQTPALLGNMAMATSLMDIGDSFGHPACPLVSRSRNSPVEDDDDDDDVVFIESIQPPSISAPAIADQRNFIFASSKNEKPQGNYSVIPPSSRDLASQKGNISETIVIDDEEDIETNGGAEKKSSCFIEWGLPGTKNKTNDLDFSTSSLSRSKTKTGVRPFNPGRMNVAGDLFQNGEFATHHSPDSWISQSASFPSNQKQPGVDSLSPVALLRKQNFQPTAQQQLTKPAKITCANCKKPLQKGQTAYQRKGSAHLFCSTTCLSSFSHKRTQNTRSIICKKDASTKKANVILPVESSKSFQEFYSTSCLSPCENNWNLKKGVFNKSRCTICSKLAEVWIFIPKLLFRLTVIILTFKCYYVLFHLHNARVLDV

SEQ ID NO: 102183 - protein, 208 aa, Homo sapiens
  Payload ID: 20365
  Gene Name: zinc finger, MYM-type 5
  Uniprot ID: Q9UJ78
  ENSP ID: ENSP00000372364
MEKCSVGGLELTEQTPALLGNMAMATSLMDIGDSFGHPACPLVSRSRNSPVEDDDDDDDVVFIESIQPPSISAPAIADQRNFIFASSKNEKPQGNYSVIPPSSRDLASQKGNISETIVIDDEEDIETNGGAEKKSSCFIEWGLPGTKNKTNDLDFSTSSLSRSKTKTGVRPFNPGRMNVAGDLFQNGEFATHHSPEMHLQRRLMSFFQ

SEQ ID NO: 102184 - protein, 659 aa, Homo sapiens
  Payload ID: 20365
  Gene Name: zinc finger, MYM-type 5
  ENSP ID: ENSP00000445779
LTEQTPALLGNMAMATSLMDIGDSFGHPACPLVSRSRNSPVEDDDDDDDVVFIESIQPPSISAPAIADQRNFIFASSKNEKPQGNYSVIPPSSRDLASQKGNISETIVIDDEEDIETNGGAEKKSSCFIEWGLPGTKNKTNDLDFSTSSLSRSKTKTGVRPFNPGRMNVAGDLFQNGEFATHHSPDSWISQSASFPSNQKQPGVDSLSPVALLRKQNFQPTAQQQLTKPAKITCANCKKPLQKGQTAYQRKGSAHLFCSTTCLSSFSHKRTQNTRSIICKKDASTKKANVILPVESSKSFQEFYSTSCLSPCENNWNLKKGVFNKSRCTICSKLAEIRHEVSVNNVTHKLCSNHCFNKYRLANGLIMNCCEHCGEYMPSKSTGNNILVIGGQQKRFCCQSCINEYKQMMETKSKKLTASENRKRNAFREENEKQLYGSSNTLLKKIEGIPEKKEKTSQLQLSVECGTDTLLIQENVNLPPSSTSTIADTFQEQLEEKNFEDSIVPVVLSADPGTWPRILNIKQRDTLVENVPPQVRNFNFPKDNTGRKFSETYYTRILPNGEKTTRSWLLYSTSKDSVFCLYCKLFGEGKNQLKNENGCKDWQHLSHILSKHEESEMHVNNSVKYSKLKSDLKKNKAIDAAEHRLYENEKNDGVLLLYT

SEQ ID NO: 102185 - protein, 170 aa, Homo sapiens
  Payload ID: 20366
  Gene Name: zinc finger, MYM-type 6
  Uniprot ID: O95789
  ENSP ID: ENSP00000326695
MKEPLDGECGKAVVPQQELLDKIKEEPDNAQEYGCVQQPKTQESKLKIGGVSSVNERPIAQQLNPGFQLSFASSGPSVLLPSVPAVAIKVFCSGCKKMLYKGQTAYHKTGSTQLFCSTRCITRHSSPACLPPPPKKTCTNCSKYKILNIPFYFTFFLVCILFSSNILLIL

SEQ ID NO: 102186 - protein, 1325 aa, Homo sapiens
  Payload ID: 20366
  Gene Name: zinc finger, MYM-type 6
  Uniprot ID: O95789
  ENSP ID: ENSP00000349708
MKEPLDGECGKAVVPQQELLDKIKEEPDNAQEYGCVQQPKTQESKLKIGGVSSVNERPIAQQLNPGFQLSFASSGPSVLLPSVPAVAIKVFCSGCKKMLYKGQTAYHKTGSTQLFCSTRCITRHSSPACLPPPPKKTCTNCSKDILNPKDVITTRFENSYPSKDFCSQSCLSSYELKKKPVVTIYTKSISTKCSMCQKNADTRFEVKYQNVVHGLCSDACFSKFHSTNNLTMNCCENCGSYCYSSSGPCQSQKVFSSTSVTAYKQNSAQIPPYALGKSLRPSAEMIETTNDSGKTELFCSINCLSAYRVKTVTSSGVQVSCHSCKTSAIPQYHLAMSNGTIYSFCSSSCVVAFQNVFSKPKGTNSSAVPLSQGQVVVSPPSSRSAVSIGGGNTSAVSPSSIRGSAAASLQPLAEQSQQVALTHTVVKLKCQHCNHLFATKPELLFYKGKMFLFCGKNCSDEYKKKNKVVAMCDYCKLQKIIKETVRFSGVDKPFCSEVCKFLSARDFGERWGNYCKMCSYCSQTSPNLVENRLEGKLEEFCCEDCMSKFTVLFYQMAKCDGCKRQGKLSESIKWRGNIKHFCNLFCVLEFCHQQIMNDCLPQNKVNISKAKTAVTELPSARTDTTPVITSVMSLAKIPATLSTGNTNSVLKGAVTKEAAKIIQDESTQEDAMKFPSSQSSQPSRLLKNKGISCKPVTQTKATSCKPHTQHKECQTDLPMPNEKNDAELDSPPSKKKRLGFFQTYDTEYLKVGFIICPGSKESSPRPQCVICGEILSSENMKPANLSHHLKTKHSELENKPVDFFEQKSLEMECQNSSLKKCLLVEKSLVKASYLIAFQTAASKKPFSIAEELIKPYLVEMCSEVLGSSAGDKMKTIPLSNVTIQHRIDELSADIEDQLIQKVRESKWFALQIDESSEISNITLLLCYIRFIDYDCRDVKEELLFCIEMPTQITGFEIFELINKYIDSKSLNWKHCVGLCTDGAASMTGRYSGLKAKIQEVAMNTAAFTHCFIHRERLVAEKLSPCLHKILLQSAQILSFIKSNALNSRMLTILCEEMGSEHVSLPLHAEVRWISRGRMLKRLFELRHEIEIFLSQKHSDLAKYFHDEEWVGKLAYLSDIFSLINELNLSLQGTLTTFFNLCNKIDVFKRKLKMWLKRTQENDYDMFPSFSEFSNSSGLNMTDITRIIFEHLEGLSQVFSDCFPPEQDLRSGNLWIIHPFMNHQNNNLTDFEEEKLTELSSDLGLQALFKSVSVTQFWINAKTSYPELHERAMKFLLPFSTVYLCDAAFSALTESKQKNLLGSGPALRLAVTSLIPRIEKLVKEKE

SEQ ID NO: 102187 - protein, 170 aa, Homo sapiens; identical to SEQ ID NO: 102185
  Payload ID: 20366
  Gene Name: zinc finger, MYM-type 6
  Uniprot ID: O95789
  ENSP ID: ENSP00000362430

SEQ ID NO: 102188 - protein, 208 aa, Homo sapiens
  Payload ID: 20366
  Gene Name: zinc finger, MYM-type 6
  ENSP ID: ENSP00000391337
MKEPLDGECGKAVVPQQELLDKIKEEPDNAQEYGCVQQPKTQESKLKIGGVSSVNERPIAQQLNPGFQLSFASSGPSVLLPSVPAVAIKVFCSGCKKMLYKGQTAYHKTGSTQLFCSTRCITRHSSPACLPPPPKKTCTNCSKDILNPKDVITTRFENSYPSKDFCSQSCLSSYELKKKPVVTIYTKSISTKCSMCQKNADTRFEVKY

SEQ ID NO: 102189 - protein, 440 aa, Homo sapiens
  Payload ID: 20367
  Gene Name: zinc finger, MYND-type containing 10
  Uniprot ID: O75800
  ENSP ID: ENSP00000231749
MGDLELLLPGEAEVLVRGLRSFPLREMGSEGWNQQHENLEKLNMQAILDATVSQGEPIQELLVTHGKVPTLVEELIAVEMWKQKVFPVFCRVEDFKPQNTFPIYMVVHHEASIINLLETVFFHKEVCESAEDTVLDLVDYCHRKLTLLVAQSGCGGPPEGEGSQDSNPMQELQKQAELMEFEIALKALSVLRYITDCVDSLSLSTLSRMLSTHNLPCLLVELLEHSPWSRREGGKLQQFEGSRWHTVAPSEQQKLSKLDGQVWIALYNLLLSPEAQARYCLTSFAKGRLLKLRAFLTDTLLDQLPNLAHLQSFLAHLTLTETQPPKKDLVLEQIPEIWERLERENRGKWQAIAKHQLQHVFSPSEQDLRLQARRWAETYRLDVLEAVAPERPRCAYCSAEASKRCSRCQNEWYCCRECQVKHWEKHGKTCVLAAQGDRAK

SEQ ID NO: 102190 - protein, 435 aa, Homo sapiens
  Payload ID: 20367
  Gene Name: zinc finger, MYND-type containing 10
  Uniprot ID: O75800
  ENSP ID: ENSP00000353289
MGDLELLLPGEAEVLVRGLRSFPLREMGSEGWNQQHENLEKLNMQAILDATVSQGEPIQELLVTHGKVPTLVEELIAVEMWKQKVFPVFCRVEDFKPQNTFPIYMVVHHEASIINLLETVFFHKEVCESAEDTVLDLVDYCHRKLTLLVAQSGCGGPPEGEGSQDSNPMQELQKQAELMEFEIALKALSVLRYITDCVDRQWSVSQPPQLAHLKRIQRLHPVCWFLSPGKLQQFEGSRWHTVAPSEQQKLSKLDGQVWIALYNLLLSPEAQARYCLTSFAKGRLLKLRAFLTDTLLDQLPNLAHLQSFLAHLTLTETQPPKKDLVLEQIPEIWERLERENRGKWQAIAKHQLQHVFSPSEQDLRLQARRWAETYRLDVLEAVAPERPRCAYCSAEASKRCSRCQNEWYCCRECQVKHWEKHGKTCVLAAQGDRAK

SEQ ID NO: 102191 - protein, 37 aa, Homo sapiens
  Payload ID: 20367
  Gene Name: zinc finger, MYND-type containing 10
  ENSP ID: ENSP00000391545
MGDLELLLPGEAEVLVRGLRSFPLREMGSEGQVEPAA

SEQ ID NO: 102192 - protein, 282 aa, Homo sapiens
  Payload ID: 20367
  Gene Name: zinc finger, MYND-type containing 10
  ENSP ID: ENSP00000393687
MQAILDATVSQGEPIQELLVTHGKVPTLVEELIAVEMWKQKVFPVFCRVEDFKPQNTFPIYMVVHHEASIINLLETVFFHKEVCESAEDTVLDLVDYCHRKLTLLVAQSGCGGPPEGEGSQDSNPMQELQKQAELMEFEIALKALSVLRYITDCVDSLSLSTLSRMLSTHNLPCLLVELLEHSPWSRREGGKLQQFEGSRWHTVAPSEQQKLSKLDGQVWIALYNLLLSPEAQARYCLTSFAKGRLLKLRAFLTDTLLDQLPNLAHLQSFLAHLTLTETQPP

SEQ ID NO: 102193 - protein, 37 aa, Homo sapiens; identical to SEQ ID NO: 102191
  Payload ID: 20367
  Gene Name: zinc finger, MYND-type containing 10
  ENSP ID: ENSP00000415661

SEQ ID NO: 102194 - protein, 547 aa, Homo sapiens
  Payload ID: 20368
  Gene Name: zinc finger, MYND-type containing 11
  ENSP ID: ENSP00000309992
MARLTKRRQADTKAIQHLWAAIEIIRNQKQIANIDRITKYMSRVHGMHPKETTRQLSLAVKDGLIVETLTVGCKGSKAGIEQEGYWLPGDEISIKKKNTNKQEMGTYLRFIVSRMKERAIDLNKKGKDNKHPMYRRLVHSAVDVPTIQEKVNEGKYRSYEEFKADAQLLLHNTVIFYGDSEQADIARMLYKDTCHELDELQLCKNCFYLSNARPDNWFCYPCIPNHELVWAKMKGFGFWPAKVMQKEDNQVDVRFFGHHHQRAWIPSENIQDITVNIHRLHVKRSMGWKKACDELELHQRFLREGRFWKSKNEDRGEEEAESSISSTSNEQLKVTQEPRAKKGRRNQSVEPKKEEPEPETEAVSSSQEIPTMPQPIEKVSVSTQTKKLSASSPRMLHRSTQTTNDGVCQSMCHDKYTKIFNDFKDRMKSDHKRETERVVREALEKLRSEMEEEKRQAVNKAVANMQGEMDRKCKQVKEKCKEEFVEEIKKLATQHKQLISQTKKKQWCYNCEEEAMYHCCWNTSYCSIKCQQEHWHAEHKRTCRRKR

SEQ ID NO: 102195 - protein, 585 aa, Homo sapiens
  Payload ID: 20368
  Gene Name: zinc finger, MYND-type containing 11
  ENSP ID: ENSP00000370996
MVIFTSLHRYVIFISCIIVINWYMSRVHGMHPKETTRQLSLAVKDGLIVETLTVGCKGSKAGIEQEGYWLPGDEIDWETENHDWYCFECHLPGEVLICDLCFRVYHSKCLSDEFRLRDSSSPWQCPVCRSIKKKNTNKQEMGTYLRFIVSRMKERAIDLNKKGKDNKHPMYRRLVHSAVDVPTIQEKVNEGKYRSYEEFKADAQLLLHNTVIFYGADSEQADIARMLYKDTCHELDELQLCKNCFYLSNARPDNWFCYPCIPNHELVWAKMKGFGFWPAKVMQKEDNQVDVRFFGHHHQRAWIPSENIQDITVNIHRLHVKRSMGWKKACDELELHQRFLREGRFWKSKNEDRGEEEAESSISSTSNEQLKVTQEPRAKKGRRNQSVEPKKEEPEPETEAVSSSQEIPTMPQPIEKVSVSTQTKKLSASSPRMLHRSTQTTNDGVCQSMCHDKYTKIFNDFKDRMKSDHKRETERVVREALEKLRSEMEEEKRQAVNKAVANMQGEMDRKCKQVKEKCKEEFVEEIKKLATQHKQLISQTKKKQWCYNCEEEAMYHCCWNTSYCSIKCQQEHWHAEHKRTCRRKR

SEQ ID NO: 102196 - protein, 602 aa, Homo sapiens
  Payload ID: 20368
  Gene Name: zinc finger, MYND-type containing 11
  Uniprot ID: Q15326
  ENSP ID: ENSP00000371003
MARLTKRRQADTKAIQHLWAAIEIIRNQKQIANIDRITKYMSRVHGMHPKETTRQLSLAVKDGLIVETLTVGCKGSKAGIEQEGYWLPGDEIDWETENHDWYCFECHLPGEVLICDLCFRVYHSKCLSDEFRLRDSSSPWQCPVCRSIKKKNTNKQEMGTYLRFIVSRMKERAIDLNKKGKDNKHPMYRRLVHSAVDVPTIQEKVNEGKYRSYEEFKADAQLLLHNTVIFYGADSEQADIARMLYKDTCHELDELQLCKNCFYLSNARPDNWFCYPCIPNHELVWAKMKGFGFWPAKVMQKEDNQVDVRFFGHHHQRAWIPSENIQDITVNIHRLHVKRSMGWKKACDELELHQRFLREGRFWKSKNEDRGEEEAESSISSTSNEQLKVTQEPRAKKGRRNQSVEPKKEEPEPETEAVSSSQEIPTMPQPIEKVSVSTQTKKLSASSPRMLHRSTQTTNDGVCQSMCHDKYTKIFNDFKDRMKSDHKRETERVVREALEKLRSEMEEEKRQAVNKAVANMQGEMDRKCKQVKEKCKEEFVEEIKKLATQHKQLISQTKKKQWCYNCEEEAMYHCCWNTSYCSIKCQQEHWHAEHKRTCRRKR

SEQ ID NO: 102197 - protein, 482 aa, Homo sapiens
  Payload ID: 20368
  Gene Name: zinc finger, MYND-type containing 11
  ENSP ID: ENSP00000371017
MSRVHGMHPKETTRQLSLAVKDGLIVETLTVGCKGSKAGIEQEGYWLPGDEISIKKKNTNKQEMGTYLRFIVSRMKERAIDLNKKGKDNKHPMYRRLVHSAVDVPTIQEKVNEGKYRSYEEFKADAQLLLHNTVIFYGADSEQADIARMLYKDTCHEIPNHELVWAKMKGFGFWPAKVMQKEDNQVDVRFFGHHHQRAWIPSENIQDITVNIHRLHVKRSMGWKKACDELELHQRFLREGRFWKSKNEDRGEEEAESSISSTSNEQLKVTQEPRAKKGRRNQSVEPKKEEPEPETEAVSSSQEIPTMPQPIEKVSVSTQTKKLSASSPRMLHRSTQTTNDGVCQSMCHDKYTKIFNDFKDRMKSDHKRETERVVREALEKLRSEMEEEKRQAVNKAVANMQGEMDRKCKQVKEKCKEEFVEEIKKLATQHKQLISQTKKKQWCYNCEEEAMYHCCWNTSYCSIKCQQEHWHAEHKRTCRRKR

SEQ ID NO: 102198 - protein, 548 aa, Homo sapiens
  Payload ID: 20368
  Gene Name: zinc finger, MYND-type containing 11
  Uniprot ID: Q15326
  ENSP ID: ENSP00000371020
MARLTKRRQADTKAIQHLWAAIEIIRNQKQIANIDRITKYMSRVHGMHPKETTRQLSLAVKDGLIVETLTVGCKGSKAGIEQEGYWLPGDEISIKKKNTNKQEMGTYLRFIVSRMKERAIDLNKKGKDNKHPMYRRLVHSAVDVPTIQEKVNEGKYRSYEEFKADAQLLLHNTVIFYGADSEQADIARMLYKDTCHELDELQLCKNCFYLSNARPDNWFCYPCIPNHELVWAKMKGFGFWPAKVMQKEDNQVDVRFFGHHHQRAWIPSENIQDITVNIHRLHVKRSMGWKKACDELELHQRFLREGRFWKSKNEDRGEEEAESSISSTSNEQLKVTQEPRAKKGRRNQSVEPKKEEPEPETEAVSSSQEIPTMPQPIEKVSVSTQTKKLSASSPRMLHRSTQTTNDGVCQSMCHDKYTKIFNDFKDRMKSDHKRETERVVREALEKLRSEMEEEKRQAVNKAVANMQGEMDRKCKQVKEKCKEEFVEEIKKLATQHKQLISQTKKKQWCYNCEEEAMYHCCWNTSYCSIKCQQEHWHAEHKRTCRRKR

SEQ ID NO: 102199 - protein, 213 aa, Homo sapiens
  Payload ID: 20368
  Gene Name: zinc finger, MYND-type containing 11
  ENSP ID: ENSP00000381046
MARLTKRRQADTKAIQHLWAAIEIIRNQKQIANIDRITKYMSRVHGMHPKETTRQLSLAVKDGLIVETLTVGCKGSKAGIEQEGYWLPGDEIAYSMQPFSRTAAPNKDWETENHDWYCFECHLPGEVLICDLCFRVYHSKCLSDEFRLRDSSSPWQCPVCRSIKKKNTNKQEMGTYLRFIVSRMKERAIDLNKKGKDNKHPMYRRLVHSAVDV

SEQ ID NO: 102200 - protein, 517 aa, Homo sapiens
  Payload ID: 20368
  Gene Name: zinc finger, MYND-type containing 11
  Uniprot ID: Q15326
  ENSP ID: ENSP00000381050
MARLTKRRQADTKAIQHLWAAIEIIRNQKQIANIDRITKYMSRVHGMHPKETTRQLSLAVKDGLIVETLTVGCKGSKAGIEQEGYWLPGDEISIKKKNTNKQEMGTYLRFIVSRMKERKVNEGKYRSYEEFKADAQLLLHNTVIFYGADSEQADIARMLYKDTCHELDELQLCKNCFYLSNARPDNWFCYPCIPNHELVWAKMKGFGFWPAKVMQKEDNQVDVRFFGHHHQRAWIPSENIQDITVNIHRLHVKRSMGWKKACDELELHQRFLREGRFWKSKNEDRGEEEAESSISSTSNEQLKVTQEPRAKKGRRNQSVEPKKEEPEPETEAVSSSQEIPTMPQPIEKVSVSTQTKKLSASSPRMLHRSTQTTNDGVCQSMCHDKYTKIFNDFKDRMKSDHKRETERVVREALEKLRSEMEEEKRQAVNKAVANMQGEMDRKCKQVKEKCKEEFVEEIKKLATQHKQLISQTKKKQWCYNCEEEAMYHCCWNTSYCSIKCQQEHWHAEHKRTCRRKR

SEQ ID NO: 102201 - protein, 602 aa, Homo sapiens; identical to SEQ ID NO: 102196
  Payload ID: 20368
  Gene Name: zinc finger, MYND-type containing 11
  Uniprot ID: Q15326
  ENSP ID: ENSP00000381053

SEQ ID NO: 102202 - protein, 522 aa, Homo sapiens
  Payload ID: 20368
  Gene Name: zinc finger, MYND-type containing 11
  ENSP ID: ENSP00000385484
MARLTKRRQADTKAIQHLWAAIEIIRNQKQIANIDRITKYMSRVHGMHPKETTRQLSLAVKDGLIVETLTVGCKGSKAGIEQEGYWLPGDEISIKKKNTNKQEMGTYLRFIVSRMKERAIDLNKKGKDNKHPMYRRLVHSAVDVPTIQEKVNEGKYRSYEEFKADAQLLLHNTVIFYGADSEQADIARMLYKDTCHEIPNHELVWAKMKGFGFWPAKVMQKEDNQVDVRFFGHHHQRAWIPSENIQDITVNIHRLHVKRSMGWKKACDELELHQRFLREGRFWKSKNEDRGEEEAESSISSTSNEQLKVTQEPRAKKGRRNQSVEPKKEEPEPETEAVSSSQEIPTMPQPIEKVSVSTQTKKLSASSPRMLHRSTQTTNDGVCQSMCHDKYTKIFNDFKDRMKSDHKRETERVVREALEKLRSEMEEEKRQAVNKAVANMQGEMDRKCKQVKEKCKEEFVEEIKKLATQHKQLISQTKKKQWCYNCEEEAMYHCCWNTSYCSIKCQQEHWHAEHKRTCRRKR

SEQ ID NO: 102203 - protein, 571 aa, Homo sapiens
  Payload ID: 20368
  Gene Name: zinc finger, MYND-type containing 11
  ENSP ID: ENSP00000386010
MARLTKRRQADTKAIQHLWAAIEIIRNQKQIANIDRITKYMSRVHGMHPKETTRQLSLAVKDGLIVETLTVGCKGSKAGIEQEGYWLPGDEIDWETENHDWYCFECHLPGEVLICDLCFRVYHSKCLSDEFRLRDSSSPWQCPVCRSIKKKNTNKQEMGTYLRFIVSRMKERKVNEGKYRSYEEFKADAQLLLHNTVIFYGADSEQADIARMLYKDTCHELDELQLCKNCFYLSNARPDNWFCYPCIPNHELVWAKMKGFGFWPAKVMQKEDNQVDVRFFGHHHQRAWIPSENIQDITVNIHRLHVKRSMGWKKACDELELHQRFLREGRFWKSKNEDRGEEEAESSISSTSNEQLKVTQEPRAKKGRRNQSVEPKKEEPEPETEAVSSSQEIPTMPQPIEKVSVSTQTKKLSASSPRMLHRSTQTTNDGVCQSMCHDKYTKIFNDFKDRMKSDHKRETERVVREALEKLRSEMEEEKRQAVNKAVANMQGEMDRKCKQVKEKCKEEFVEEIKKLATQHKQLISQTKKKQWCYNCEEEAMYHCCWNTSYCSIKCQQEHWHAEHKRTCRRKR

SEQ ID NO: 102204 - protein, 140 aa, Homo sapiens
  Payload ID: 20368
  Gene Name: zinc finger, MYND-type containing 11
  ENSP ID: ENSP00000397072
MARLTKRRQADTKAIQHLWAAIEIIRNQKQIANIDRITKYMSRVHGMHPKETTRQLSLAVKDGLIVETLTVGCKGSKAGIEQEGYWLPGDEISIKKKNTNKQEMGTYLRFIVSRMKERAIDLNKKGKDNKHPMYRRLVHS

SEQ ID NO: 102205 - protein, 567 aa, Homo sapiens
  Payload ID: 20368
  Gene Name: zinc finger, MYND-type containing 11
  Uniprot ID: Q15326
  ENSP ID: ENSP00000424205
MARLTKRRQADTKAIQHLWAAIEIIRNQKQIANIDRITKYMSRVHGMHPKETTRQLSLAVKDGLIVETLTVGCKGSKAGIEQEGYWLPGDEIDWETENHDWYCFECHLPGEVLICDLCFRVYHSKCLSDEFRLRDSSSPWQCPVCRSIKKKNTNKQEMGTYLRFIVSRMKERAIDLNKKGKDNKHPMYRRLVHSAVDVPTIQEKVNEGKYRSYEEFKADAQLLLHNTVIFYGDSEQADIARMLYKDTCHELDELQLCKNCFYLSNARPDNWFCYPCIPNHELVWAKMKGFGFWPAKVMQKEDNQVDVRFFGHHHQRAWIPSENIQDITVNIHRLHVKRSMGWKKACDELELHQRFLREGRFWKSKNEDRGEEEAESSISSTSNEQLKVTQEPRAKKGRRNQSVEPKKEEPEPETEAVSSSQEIPTMPQPIEKVSVSTQTKKLSASSPRMLHRSTQTTNDGVCQSMCHDKYTKIFNDFKDRMKSDHKRETERVVREALEKLRSEMEEEKRQAVNKAVANMQGEMDRKCKQVKEKCKEEFVEEIKKLATQHKQLISQTKKKQWVNTSLF

SEQ ID NO: 102206 - protein, 568 aa, Homo sapiens
  Payload ID: 20368
  Gene Name: zinc finger, MYND-type containing 11
  Uniprot ID: Q15326
  ENSP ID: ENSP00000452959
MARLTKRRQADTKAIQHLWAAIEIIRNQKQIANIDRITKYMSRVHGMHPKETTRQLSLAVKDGLIVETLTVGCKGSKAGIEQEGYWLPGDEIDWETENHDWYCFECHLPGEVLICDLCFRVYHSKCLSDEFRLRDSSSPWQCPVCRSIKKKNTNKQEMGTYLRFIVSRMKERAIDLNKKGKDNKHPMYRRLVHSAVDVPTIQEKVNEGKYRSYEEFKADAQLLLHNTVIFYGADSEQADIARMLYKDTCHELDELQLCKNCFYLSNARPDNWFCYPCIPNHELVWAKMKGFGFWPAKVMQKEDNQVDVRFFGHHHQRAWIPSENIQDITVNIHRLHVKRSMGWKKACDELELHQRFLREGRFWKSKNEDRGEEEAESSISSTSNEQLKVTQEPRAKKGRRNQSVEPKKEEPEPETEAVSSSQEIPTMPQPIEKVSVSTQTKKLSASSPRMLHRSTQTTNDGVCQSMCHDKYTKIFNDFKDRMKSDHKRETERVVREALEKLRSEMEEEKRQAVNKAVANMQGEMDRKCKQVKEKCKEEFVEEIKKLATQHKQLISQTKKKQWVNTSLF

SEQ ID NO: 102207 - protein, 517 aa, Homo sapiens; identical to SEQ ID NO: 102200
  Payload ID: 20368
  Gene Name: zinc finger, MYND-type containing 11
  Uniprot ID: Q15326
  ENSP ID: ENSP00000473321

SEQ ID NO: 102208 - protein, 585 aa, Homo sapiens; identical to SEQ ID NO: 102195
  Payload ID: 20368
  Gene Name: zinc finger, MYND-type containing 11
  ENSP ID: ENSP00000487386

SEQ ID NO: 102209 - protein, 365 aa, Homo sapiens
  Payload ID: 20369
  Gene Name: zinc finger, MYND-type containing 12
  Uniprot ID: Q9H0C1
  ENSP ID: ENSP00000361646
MNVIYPLAVPKGRRLCCEVCEAPAERVCAACTVTYYCGVVHQKADWDSIHEKICQLLIPLRTSMPFYNSEEERQHGLQQLQQRQKYLIEFCYTIAQKYLFEGKHEDAVPAALQSLRFRVKLYGLSSVELVPAYLLLAEASLGLGRIVQAEEYLFQAQWTVLKSTDCSNATHSLLHRNLGLLYIAKKNYEEARYHLANDIYFASCAFGTEDIRTSGGYFHLANIFYDLKKLDLADTLYTKVSEIWHAYLNNHYQVLSQAHIQQMDLLGKLFENDTGLDEAQEAEAIRILTSILNIRESTSDKAPQKTIFVLKILVMFYYLMMNSSKAQEYGMRALSLAKEQQLDVHEQSTIQELLSLISTEDHPIT

SEQ ID NO: 102210 - protein, 125 aa, Homo sapiens
  Payload ID: 20369
  Gene Name: zinc finger, MYND-type containing 12
  ENSP ID: ENSP00000478789
MNVIYPLAVPKGRRLCCEVCEAPAERVCAACTVTYYCGVVHQKADWDSIHEKICQLLIPLRTSMPFYNSEEERQHGLQQLQQRQVWAESFRLKNIYSKPSGQSSNQLTVVMPPTLYCIGIWDFSI

SEQ ID NO: 102211 - protein, 44 aa, Homo sapiens
  Payload ID: 20369
  Gene Name: zinc finger, MYND-type containing 12
  ENSP ID: ENSP00000482602
MNVIYPLAVPKGRRLCCEVCEAPAERVCAACTVTYYWSGPNRSG

SEQ ID NO: 102212 - protein, 750 aa, Homo sapiens
  Payload ID: 20370
  Gene Name: zinc finger, MYND-type containing 15
  Uniprot ID: Q9H091
  ENSP ID: ENSP00000269289
MEFVSGYRDEFLDFTALLFGWFRKFVAERGAVGTSLEGRCRQLEAQIRRLPQDPALWVLHVLPNHSVGISLGQGAEPGPGPGLGTAWLLGDNPPLHLRDLSPYISFVSLEDGEEGEEEEEEDEEEEKREDGGAGSTEKVEPEEDRELAPTSRESPQETNPPGESEEAAREAGGGKDGCREDRVENETRPQKRKGQRSEAAPLHVSCLLLVTDEHGTILGIDLLVDGAQGTASWGSGTKDLAPWAYALLCHSMACPMGSGDPRKPRQLTVGDARLHRELESLVPRLGVKLAKTPMRTWGPRPGFTFASLRARTCHVCHRHSFEAKLTPCPQCSAVLYCGEACLRADWQRCPDDVSHRFWCPRLAAFMERAGELATLPFTYTAEVTSETFNKEAFLASRGLTRGYWTQLSMLIPGPGFSRHPRGNTPSLSLLRGGDPYQLLQGDGTALMPPVPPHPPRGVFGSWQDYYTWRGLSLDSPIAVLLTYPLTVYYVITHLVPQSFPELNIQNKQSLKIHVVEAGKEFDLVMVFWELLVLLPHVALELQFVGDGLPPESDEQHFTLQRDSLEVSVRPGSGISARPSSGTKEKGGRRDLQIKVSARPYHLFQGPKPDLVIASPSSLSAGFNSGFALKDTWLRSLPRLQSLRVPAFFTESSEYSCVMDGQTMAVATGGGTSPPQPNPFRSPFRLRAADNCMSWYCNAFIFHLVYKPAQGSGARPAPGPPPPSPTPSAPPAPTRRRRGEKKPGRGARRRK

SEQ ID NO: 102213 - protein, 742 aa, Homo sapiens
  Payload ID: 20370
  Gene Name: zinc finger, MYND-type containing 15
  Uniprot ID: Q9H091
  ENSP ID: ENSP00000391742
MEFVSGYRDEFLDFTALLFGWFRKFVAERGAVGTSLEGRCRQLEAQIRRLPQDPALWVLHVLPNHSVGISLGQGAEPGPGPGLGTAWLLGDNPPLHLRDLSPYISFVSLEDGEEGEEEEEEDEEEEKREDGGAGSTEKVEPEEDRELAPTSRESPQETNPPGESEEAAREAGGGKDGCREDRVENETRPQKRKGQRSEAAPLHVSCLLLVTDEHGTILGIDLLVDGAQGTASWGSGTKDLAPWAYALLCHSMACPMGSGDPRKPRQLTVGDARLHRELESLVPRLGVKLAKTPMRTWGPRPGFTFASLRARTCHVCHRHSFEAKLTPCPQCSAVLYCGEACLRADWQRCPDDVSHRFWCPRLAAFMERAGELATLPFTYTAEVTSETFNKEAFLASRGLTRGYWTQLSMLIPGPGFSRHPRGNTPSLSLLRGGDPYQLLQGDGTALMPPVPPHPPRGVFGSWQDYYTWRGLSLDSPIAVLLTYPLTVYYVITHLVPQSFPELNIQNKQSLKIHVVEAGKEFDLVMVFWELLVLLPHVALELQFVGDGLPPESDEQHFTLQRDSLEVSVRPGSGISARPSSGTKEKGGRRDLQIKVSARPYHLFQGPKPDLVIGFNSGFALKDTWLRSLPRLQSLRVPAFFTESSEYSCVMDGQTMAVATGGGTSPPQPNPFRSPFRLRAADNCMSWYCNAFIFHLVYKPAQGSGARPAPGPPPPSPTPSAPPAPTRRRRGEKKPGRGARRRK

SEQ ID NO: 102214 - protein, 750 aa, Homo sapiens; identical to SEQ ID NO: 102212
  Payload ID: 20370
  Gene Name: zinc finger, MYND-type containing 15
  Uniprot ID: Q9H091
  ENSP ID: ENSP00000459501

SEQ ID NO: 102215 - protein, 703 aa, Homo sapiens
  Payload ID: 20370
  Gene Name: zinc finger, MYND-type containing 15
  Uniprot ID: Q9H091
  ENSP ID: ENSP00000465435
MEFVSGYRDEFLDFTALLFGWFRKFVAERGAVGTSLEGRCRQLEAQIRRLPQDPALWVLHVLPNHSVGISLGQGAEPGPGPGLGTAWLLGDNPPLHLRDLSPYISFVSLEDGEEGEEEEEEDEEEEKREDGGAGSTEKVEPEEDRELAPTSRESPQETNPPGESEEAAREAGGGKDGCREDRVENETRPQKRKGQRSEAAPLHVSCLLLVTDEHGTILGIDLLVDGAQGTASWGSGTKDLAPWAYALLCHSMACPMGSGDPRKPRQLTVGDARLHRELESLVPRLGVKLAKTPMRTWGPRPGFTFASLRARTCHVCHRHSFEAKLTPCPQCSAVLYCGEACLRADWQRCPDDVSHRFWCPRLAAFMERAGELATLPFTYTAEVTSETFNKEAFLASRGLTRGYWTQLSMLIPGPGFSRHPRGNTPSLSLLRGGDPYQLLQGDGTALMPPVPPHPPRGVFVPELNIQNKQSLKIHVVEAGKEFDLVMVFWELLVLLPHVALELQFVGDGLPPESDEQHFTLQRDSLEVSVRPGSGISARPSSGTKEKGGRRDLQIKVSARPYHLFQGPKPDLVIGFNSGFALKDTWLRSLPRLQSLRVPAFFTESSEYSCVMDGQTMAVATGGGTSPPQPNPFRSPFRLRAADNCMSWYCNAFIFHLVYKPAQGSGARPAPGPPPPSPTPSAPPAPTRRRRGEKKPGRGARRRK

SEQ ID NO: 102216 - protein, 227 aa, Homo sapiens
  Payload ID: 20371
  Gene Name: zinc finger, MYND-type containing 19
  Uniprot ID: Q96E35
  ENSP ID: ENSP00000298585
MTDFKLGIVRLGRVAGKTKYTLIDEQDIPLVESYSFEARMEVDADGNGAKIFAYAFDKNRGRGSGRLLHELLWERHRGGVAPGFQVVHLNAVTVDNRLDNLQLVPWGWRPKAEETSSKQREQSLYWLAIQQLPTDPIEEQFPVLNVTRYYNANGDVVEEEENSCTYYECHYPPCTVIEKQLREFNICGRCQVARYCGSQCQQKDWPAHKKHCRERKRPFQHELEPER

SEQ ID NO: 102217 - protein, 1168 aa, Homo sapiens
  Payload ID: 20372
  Gene Name: zinc finger, MYND-type containing 8
  Uniprot ID: Q9ULU4
  ENSP ID: ENSP00000262975
MDISTRSKDPGSAERTAQKRKFPSPPHSSNGHSPQDTSTSPIKKKKKPGLLNSNNKEQSELRHGPFYYMKQPLTTDPVDVVPQDGRNDFYCWVCHREGQVLCCELCPRVYHAKCLRLTSEPEGDWFCPECEKITVAECIETQSKAMTMLTIEQLSYLLKFAIQKMKQPGTDAFQKPVPLEQHPDYAEYIFHPMDLCTLEKNAKKKMYGCTEAFLADAKWILHNCIIYNGGNHKLTQIAKVVIKICEHEMNEIEVCPECYLAACQKRDNWFCEPCSNPHPLVWAKLKGFPFWPAKALRDKDGQVDARFFGQHDRAWVPINNCYLMSKEIPFSVKKTKSIFNSAMQEMEVYVENIRRKFGVFNYSPFRTPYTPNSQYQMLLDPTNPSAGTAKIDKQEKVKLNFDMTASPKILMSKPVLSGGTGRRISLSDMPRSPMSTNSSVHTGSDVEQDAEKKATSSHFSASEESMDFLDKSTASPASTKTGQAGSLSGSPKPFSPQLSAPITTKTDKTSTTGSILNLNLDRSKAEMDLKELSESVQQQSTPVPLISPKRQIRSRFQLNLDKTIESCKAQLGINEISEDVYTAVEHSDSEDSEKSDSSDSEYISDDEQKSKNEPEDTEDKEGCQMDKEPSAVKKKPKPTNPVEIKEELKSTSPASEKADPGAVKDKASPEPEKDFSEKAKPSPHPIKDKLKGKDETDSPTVHLGLDSDSESELVIDLGEDHSGREGRKNKKEPKEPSPKQDVVGKTPPSTTVGSHSPPETPVLTRSSAQTSAAGATATTSTSSTVTVTAPAPAATGSPVKKQRPLLPKETAPAVQRVVWNSSTVQQKEITQSPSTSTITLVTSTQSSPLVTSSGSMSTLVSSVNADLPIATASADVAADIAKYTSKMMDAIKGTMTEIYNDLSKNTTGSTIAEIRRLRIEIEKLQWLHQQELSEMKHNLELTMAEMRQSLEQERDRLIAEVKKQLELEKQQAVDETKKKQWCANCKKEAIFYCCWNTSYCDYPCQQAHWPEHMKSCTQSATAPQQEADAEVNTETLNKSSQGSSSSTQSAPSETASASKEKETSAEKSKESGSTLDLSGSRETPSSILLGSNQGSVSKRCDKQPAYAPTTTDHQPHPNYPAQKYHSRSNKSSWSSSDEKRGSTRSDHNTSTSTKSLLPKESRLDTFWD

SEQ ID NO: 102218 - protein, 1186 aa, Homo sapiens
  Payload ID: 20372
  Gene Name: zinc finger, MYND-type containing 8
  Uniprot ID: Q9ULU4
  ENSP ID: ENSP00000312237
MDISTRSKDPGSAERTAQKRKFPSPPHSSNGHSPQDTSTSPIKKKKKPGLLNSNNKEQSELRHGPFYYMKQPLTTDPVDVVPQDGRNDFYCWVCHREGQVLCCELCPRVYHAKCLRLTSEPEGDWFCPECEKITVAECIETQSKAMTMLTIEQLSYLLKFAIQKMKQPGTDAFQKPVPLEQHPDYAEYIFHPMDLCTLEKNAKKKMYGCTEAFLADAKWILHNCIIYNGGNHKLTQIAKVVIKICEHEMNEIEVCPECYLAACQKRDNWFCEPCSNPHPLVWAKLKGFPFWPAKALRDKDGQVDARFFGQHDRAWVPINNCYLMSKEIPFSVKKTKSIFNSAMQEMEVYVENIRRKFGVFNYSPFRTPYTPNSQYQMLLDPTNPSAGTAKIDKQEKVKLNFDMTASPKILMSKPVLSGGTGRRISLSDMPRSPMSTNSSVHTGSDVEQDAEKKATSSHFSASEESMDFLDKSTASPASTKTGQAGSLSGSPKPFSPQLSAPITTKTDKTSTTGSILNLNLDRSKAEMDLKELSESVQQQSTPVPLISPKRQIRSRFQLNLDKTIESCKAQLGINEISEDVYTAVEHSDSEDSEKSDSSDSEYISDDEQKSKNEPEDTEDKEGCQMDKEPSAVKKKPKPTNPVEIKEELKSTSPASEKADPGAVKDKASPEPEKDFSEKAKPSPHPIKDKLKGKDETDSPTVHLGLDSDSESELVIDLGEDHSGREGRKNKKEPKEPSPKQDVVGKTPPSTTVGSHSPPETPVLTRSSAQTSAAGATATTSTSSTVTVTAPAPAATGSPVKKQRPLLPKETAPAVQRVVWNSSSKFQTSSQKWHMQKMQRQQQQQQQQNQQQQPQSSQGTRYQTRQAVKAVQQKEITQSPSTSTITLVTSTQSSPLVTSSGSMSTLVSSVNADLPIATASADVAADIAKYTSKMMDAIKGTMTEIYNDLSKNTTGSTIAEIRRLRIEIEKLQWLHQQELSEMKHNLELTMAEMRQSLEQERDRLIAEVKKQLELEKQQAVDETKKKQWCANCKKEAIFYCCWNTSYCDYPCQQAHWPEHMKSCTQSATAPQQEADAEVNTETLNKSSQGSSSSTQSAPSETASASKEKETSAEKSKESGSTLDLSGSRETPSSILLGSNQGSDHSRSNKSSWSSSDEKRGSTRSDHNTSTSTKSLLPKESRLDTFWD

SEQ ID NO: 102219 - protein, 1160 aa, Homo sapiens
  Payload ID: 20372
  Gene Name: zinc finger, MYND-type containing 8
  Uniprot ID: Q9ULU4
  ENSP ID: ENSP00000335537
MHPQSLAEEEIKTEQEVVEGMDISTRSKDPGSAERTAQKRKFPSPPHSSNGHSPQDTSTSPIKKKKKPGLLNSNNKEQSELRHGPFYYMKQPLTTDPVDVVPQDGRNDFYCWVCHREGQVLCCELCPRVYHAKCLRLTSEPEGDWFCPECEKITVAECIETQSKAMTMLTIEQLSYLLKFAIQKMKQPGTDAFQKPVPLEQHPDYAEYIFHPMDLCTLEKNAKKKMYGCTEAFLADAKWILHNCIIYNGGNHKLTQIAKVVIKICEHEMNEIEVCPECYLAACQKRDNWFCEPCSNPHPLVWAKLKGFPFWPAKALRDKDGQVDARFFGQHDRAWVPINNCYLMSKEIPFSVKKTKSIFNSAMQEMEVYVENIRRKFGVFNYSPFRTPYTPNSQYQMLLDPTNPSAGTAKIDKQEKVKLNFDMTASPKILMSKPVLSGGTGRRISLSDMPRSPMSTNSSVHTGSDVEQDAEKKATSSHFSASEESMDFLDKSTASPASTKTGQAGSLSGSPKPFSPQLSAPITTKTDKTSTTGSILNLNLDRSKAEMDLKELSESVQQQSTPVPLISPKRQIRSRFQLNLDKTIESCKAQLGINEISEDVYTAVEHSDSEDSEKSDSSDSEYISDDEQKSKNEPEDTEDKEGCQMDKEPSAVKKKPKPTNPVEIKEELKSTSPASEKADPGAVKDKASPEPEKDFSEKAKPSPHPIKDKLKGKDETDSPTVHLGLDSDSESELVIDLGEDHSGREGRKNKKEPKEPSPKQDVVGKTPPSTTVGSHSPPETPVLTRSSAQTSAAGATATTSTSSTVTVTAPAPAATGSPVKKQRPLLPKETAPAVQRVVWNSSTVQQKEITQSPSTSTITLVTSTQSSPLVTSSGSMSTLVSSVNADLPIATASADVAADIAKYTSKMMDAIKGTMTEIYNDLSKNTTGSTIAEIRRLRIEIEKLQWLHQQELSEMKHNLELTMAEMRQSLEQERDRLIAEVKKQLELEKQQAVDETKKKQWCANCKKEAIFYCCWNTSYCDYPCQQAHWPEHMKSCTQSATAPQQEADAEVNTETLNKSSQGSSSSTQSAPSETASASKEKETSAEKSKESGSTLDLSGSRETPSSILLGSNQGSDHSRSNKSSWSSSDEKRGSTRSDHNTSTSTKSLLPKESRLDTFWD

SEQ ID NO: 102220 - protein, 1214 aa, Homo sapiens
  Payload ID: 20372
  Gene Name: zinc finger, MYND-type containing 8
  Uniprot ID: Q9ULU4
  ENSP ID: ENSP00000348246
MDISTRSKDPGSAERTAQKRKFPSPPHSSNGHSPQDTSTSPIKKKKKPGLLNSNNKEQSELRHGPFYYMKQPLTTDPVDVVPQDGRNDFYCWVCHREGQVLCCELCPRVYHAKCLRLTSEPEGDWFCPECEKITVAECIETQSKAMTMLTIEQLSYLLKFAIQKMKQPGTDAFQKPVPLEQHPDYAEYIFHPMDLCTLEKNAKKKMYGCTEAFLADAKWILHNCIIYNGGNHKLTQIAKVVIKICEHEMNEIEVCPECYLAACQKRDNWFCEPCSNPHPLVWAKLKGFPFWPAKALRDKDGQVDARFFGQHDRAWVPINNCYLMSKEIPFSVKKTKSIFNSAMQEMEVYVENIRRKFGVFNYSPFRTPYTPNSQYQMLLDPTNPSAGTAKIDKQEKVKLNFDMTASPKILMSKPVLSGGTGRRISLSDMPRSPMSTNSSVHTGSDVEQDAEKKATSSHFSASEESMDFLDKSTASPASTKTGQAGSLSGSPKPFSPQLSAPITTKTDKTSTTGSILNLNLDRSKAEMDLKELSESVQQQSTPVPLISPKRQIRSRFQLNLDKTIESCKAQLGINEISEDVYTAVEHSDSEDSEKSDSSDSEYISDDEQKSKNEPEDTEDKEGCQMDKEPSAVKKKPKPTNPVEIKEELKSTSPASEKADPGAVKDKASPEPEKDFSEKAKPSPHPIKDKLKGKDETDSPTVHLGLDSDSESELVIDLGEDHSGREGRKNKKEPKEPSPKQDVVGKTPPSTTVGSHSPPETPVLTRSSAQTSAAGATATTSTSSTVTVTAPAPAATGSPVKKQRPLLPKETAPAVQRVVWNSSSKFQTSSQKWHMQKMQRQQQQQQQQNQQQQPQSSQGTRYQTRQAVKAVQQKEITQSPSTSTITLVTSTQSSPLVTSSGSMSTLVSSVNADLPIATASADVAADIAKYTSKMMDAIKGTMTEIYNDLSKNTTGSTIAEIRRLRIEIEKLQWLHQQELSEMKHNLELTMAEMRQSLEQERDRLIAEVKKQLELEKQQAVDETKKKQWCANCKKEAIFYCCWNTSYCDYPCQQAHWPEHMKSCTQSATAPQQEADAEVNTETLNKSSQGSSSSTQSAPSETASASKEKETSAEKSKESGSTLDLSGSRETPSSILLGSNQGSVSKRCDKQPAYAPTTTDHQPHPNYPAQKYHSRSNKSSWSSSDEKRGSTRSDHNTSTSTKSLLPKESRLDTFWD

SEQ ID NO: 102221 - protein, 1135 aa, Homo sapiens
  Payload ID: 20372
  Gene Name: zinc finger, MYND-type containing 8
  Uniprot ID: Q9ULU4
  ENSP ID: ENSP00000354166
MHPQSLAEEEIKTEQEVVEGMDISTRSKDPGSAERTAQKRKFPSPPHSSNGHSPQDTSTSPIKKKKKPGLLNSNNKEQDGRNDFYCWVCHREGQVLCCELCPRVYHAKCLRLTSEPEGDWFCPECEKITVAECIETQSKAMTMLTIEQLSYLLKFAIQKMKQPGTDAFQKPVPLEQHPDYAEYIFHPMDLCTLEKNAKKKMYGCTEAFLADAKWILHNCIIYNGGNHKLTQIAKVVIKICEHEMNEIEVCPECYLAACQKRDNWFCEPCSNPHPLVWAKLKGFPFWPAKALRDKDGQVDARFFGQHDRAWVPINNCYLMSKEIPFSVKKTKSIFNSAMQEMEVYVENIRRKFGVFNYSPFRTPYTPNSQYQMLLDPTNPSAGTAKIDKQEKVKLNFDMTASPKILMSKPVLSGGTGRRISLSDMPRSPMSTNSSVHTGSDVEQDAEKKATSSHFSASEESMDFLDKSTASPASTKTGQAGSLSGSPKPFSPQLSAPITTKTDKTSTTGSILNLNLDRSKAEMDLKELSESVQQQSTPVPLISPKRQIRSRFQLNLDKTIESCKAQLGINEISEDVYTAVEHSDSEDSEKSDSSDSEYISDDEQKSKNEPEDTEDKEGCQMDKEPSAVKKKPKPTNPVEIKEELKSTSPASEKADPGAVKDKASPEPEKDFSEKAKPSPHPIKDKLKGKDETDSPTVHLGLDSDSESELVIDLGEDHSGREGRKNKKEPKEPSPKQDVVGKTPPSTTVGSHSPPETPVLTRSSAQTSAAGATATTSTSSTVTVTAPAPAATGSPVKKQRPLLPKETAPAVQRVVWNSSTVQQKEITQSPSTSTITLVTSTQSSPLVTSSGSMSTLVSSVNADLPIATASADVAADIAKYTSKMMDAIKGTMTEIYNDLSKNTTGSTIAEIRRLRIEIEKLQWLHQQELSEMKHNLELTMAEMRQSLEQERDRLIAEVKKQLELEKQQAVDETKKKQWCANCKKEAIFYCCWNTSYCDYPCQQAHWPEHMKSCTQSATAPQQEADAEVNTETLNKSSQGSSSSTQSAPSETASASKEKETSAEKSKESGSTLDLSGSRETPSSILLGSNQGSDHSRSNKSSWSSSDEKRGSTRSDHNTSTSTKSLLPKESRLDTFWD

SEQ ID NO: 102222 - protein, 1105 aa, Homo sapiens
  Payload ID: 20372
  Gene Name: zinc finger, MYND-type containing 8
  Uniprot ID: Q9ULU4
  ENSP ID: ENSP00000361093
MDISTRSKDPGSAERTAQKRKFPSPPHSSNGHSPQDTSTSPIKKKKKPGLLNSNNKEQDGRNDFYCWVCHREGQVLCCELCPRVYHAKCLRLTSEPEGDWFCPECETDAFQKPVPLEQHPDYAEYIFHPMDLCTLEKNAKKKMYGCTEAFLADAKWILHNCIIYNGGNHKLTQIAKVVIKICEHEMNEIEVCPECYLAACQKRDNWFCEPCSNPHPLVWAKLKGFPFWPAKALRDKDGQVDARFFGQHDRAWVPINNCYLMSKEIPFSVKKTKSIFNSAMQEMEVYVENIRRKFGVFNYSPFRTPYTPNSQYQMLLDPTNPSAGTAKIDKQEKVKLNFDMTASPKILMSKPVLSGGTGRRISLSDMPRSPMSTNSSVHTGSDVEQDAEKKATSSHFSASEESMDFLDKSTASPASTKTGQAGSLSGSPKPFSPQLSAPITTKTDKTSTTGSILNLNLDRSKAEMDLKELSESVQQQSTPVPLISPKRQIRSRFQLNLDKTIESCKAQLGINEISEDVYTAVEHSDSEDSEKSDSSDSEYISDDEQKSKNEPEDTEDKEGCQMDKEPSAVKKKPKPTNPVEIKEELKSTSPASEKADPGAVKDKASPEPEKDFSEKAKPSPHPIKDKLKGKDETDSPTVHLGLDSDSESELVIDLGEDHSGREGRKNKKEPKEPSPKQDVVGKTPPSTTVGSHSPPETPVLTRSSAQTSAAGATATTSTSSTVTVTAPAPAATGSPVKKQRPLLPKETAPAVQRVVWNSSTVQQKEITQSPSTSTITLVTSTQSSPLVTSSGSMSTLVSSVNADLPIATASADVAADIAKYTSKMMDAIKGTMTEIYNDLSKNTTGSTIAEIRRLRIEIEKLQWLHQQELSEMKHNLELTMAEMRQSLEQERDRLIAEVKKQLELEKQQAVDETKKKQWCANCKKEAIFYCCWNTSYCDYPCQQAHWPEHMKSCTQSATAPQQEADAEVNTETLNKSSQGSSSSTQSAPSETASASKEKETSAEKSKESGSTLDLSGSRETPSSILLGSNQGSVSKRCDKQPAYAPTTTDHQPHPNYPAQKYHSRSNKSSWSSSDEKRGSTRSDHNTSTSTKSLLPKESRLDTFWD

SEQ ID NO: 102223 - protein, 1186 aa, Homo sapiens
  Payload ID: 20372
  Gene Name: zinc finger, MYND-type containing 8
  Uniprot ID: Q9ULU4
  ENSP ID: ENSP00000379577
MFSSLQKSFNLAEEEIKTEQEVVEGMDISTRSKDPGSAERTAQKRKFPSPPHSSNGHSPQDTSTSPIKKKKKPGLLNSNNKEQDGRNDFYCWVCHREGQVLCCELCPRVYHAKCLRLTSEPEGDWFCPECEKITVAECIETQSKAMTMLTIEQLSYLLKFAIQKMKQPGTDAFQKPVPLEQHPDYAEYIFHPMDLCTLEKNAKKKMYGCTEAFLADAKWILHNCIIYNGGNHKLTQIAKVVIKICEHEMNEIEVCPECYLAACQKRDNWFCEPCSNPHPLVWAKLKGFPFWPAKALRDKDGQVDARFFGQHDRAWVPINNCYLMSKEIPFSVKKTKSIFNSAMQEMEVYVENIRRKFGVFNYSPFRTPYTPNSQYQMLLDPTNPSAGTAKIDKQEKVKLNFDMTASPKILMSKPVLSGGTGRRISLSDMPRSPMSTNSSVHTGSDVEQDAEKKATSSHFSASEESMDFLDKSTASPASTKTGQAGSLSGSPKPFSPQLSAPITTKTDKTSTTGSILNLNLDRSKAEMDLKELSESVQQQSTPVPLISPKRQIRSRFQLNLDKTIESCKAQLGINEISEDVYTAVEHSDSEDSEKSDSSDSEYISDDEQKSKNEPEDTEDKEGCQMDKEPSAVKKKPKPTNPVEIKEELKSTSPASEKADPGAVKDKASPEPEKDFSEKAKPSPHPIKDKLKGKDETDSPTVHLGLDSDSESELVIDLGEDHSGREGRKNKKEPKEPSPKQDVVGKTPPSTTVGSHSPPETPVLTRSSAQTSAAGATATTSTSSTVTVTAPAPAATGSPVKKQRPLLPKETAPAVQRVVWNSSSKFQTSSQKWHMQKMQRQQQQQQQQNQQQQPQSSQGTRYQTRQAVKAVQQKEITQSPSTSTITLVTSTQSSPLVTSSGSMSTLVSSVNADLPIATASADVAADIAKYTSKMMDAIKGTMTEIYNDLSKNTTGSTIAEIRRLRIEIEKLQWLHQQELSEMKHNLELTMAEMRQSLEQERDRLIAEVKKQLELEKQQAVDETKKKQWCANCKKEAIFYCCWNTSYCDYPCQQAHWPEHMKSCTQSATAPQQEADAEVNTETLNKSSQGSSSSTQSAPSETASASKEKETSAEKSKESGSTLDLSGSRETPSSILLGSNQGSDHSRSNKSSWSSSDEKRGSTRSDHNTSTSTKSLLPKESRLDTFWD

SEQ ID NO: 102224 - protein, 1054 aa, Homo sapiens
  Payload ID: 20372
  Gene Name: zinc finger, MYND-type containing 8
  Uniprot ID: Q9ULU4
  ENSP ID: ENSP00000392964
MHPQSLAEEEIKTEQEVVEGMDISTRSKDPGSAERTAQKRKFPSPPHSSNGHSPQDTSTSPIKKKKKPGLLNSNNKEQDGRNDFYCWVCHREGQVLCCELCPRVYHAKCLRLTSEPEGDWFCPECEKITVAECIETQSKAMTMLTIEQLSYLLKFAIQKMKQPGTDAFQKPVPLEQHPDYAEYIFHPMDLCTLEKNAKKKMYGCTEAFLADAKWILHNCIIYNGGNHKLTQIAKVVIKICEHEMNEIEVCPECYLAACQKRDNWFCEPCSNPHPLVWAKLKGFPFWPAKALRDKDGQVDARFFGQHDRAWVPINNCYLMSKEIPFSVKKTKSIFNSAMQEMEVYVENIRRKFGVFNYSPFRTPYTPNSQYQMLLDPTNPSAGTAKIDKQEKVKLNFDMTASPKILMSKPVLSGGTGRRISLSDMPRSPMSTNSSVHTGSDVEQDAEKKATSSHFSASEESMDFLDKSTASPASTKTGQAGSLSGSPKPFSPQLSAPITTKTDKTSTTGSILNLNLDRSKAEMDLKELSESVQQQSTPVPLISPKRQIRSRFQLNLDKTIESCKAQLGINEISEDVYTAVEHSDSEDSEKSDSSDSEYISDDEQKSKNEPEDTEDKEGCQMDKEPSAVKKKPKPTNPVEIKEELKSTSPASEKADPGAVKDKASPEPEKDFSEKAKPSPHPIKDKLKGKDETDSPTVHLGLDSDSESELVIDLGEDHSGREGRKNKKEPKEPSPKQDAVQQKEITQSPSTSTITLVTSTQSSPLVTSSGSMSTLVSSVNADLPIATASADVAADIAKYTSKMMDAIKGTMTEIYNDLSKNTTGSTIAEIRRLRIEIEKLQWLHQQELSEMKHNLELTMAEMRQSLEQERDRLIAEVKKQLELEKQQAVDETKKKQWCANCKKEAIFYCCWNTSYCDYPCQQAHWPEHMKSCTQSATAPQQEADAEVNTETLNKSSQGSSSSTQSAPSETASASKEKETSAEKSKESGSTLDLSGSRETPSSILLGSNQGSDHSRSNKSSWSSSDEKRGSTRSDHNTSTSTKSLLPKESRLDTFWD

SEQ ID NO: 102225 - protein, 24 aa, Homo sapiens
  Payload ID: 20372
  Gene Name: zinc finger, MYND-type containing 8
  ENSP ID: ENSP00000393806
MDISTRSKDPGSAERTAQKRKFPS

SEQ ID NO: 102226 - protein, 42 aa, Homo sapiens
  Payload ID: 20372
  Gene Name: zinc finger, MYND-type containing 8
  ENSP ID: ENSP00000394379
MDISTRSKDPGSAERTAQKRKFPSPPHSSNGHSPQDTSTSPI

SEQ ID NO: 102227 - protein, 1214 aa, Homo sapiens; identical to SEQ ID NO: 102220
  Payload ID: 20372
  Gene Name: zinc finger, MYND-type containing 8
  Uniprot ID: Q9ULU4
  ENSP ID: ENSP00000396725

SEQ ID NO: 102228 - protein, 175 aa, Homo sapiens
  Payload ID: 20372
  Gene Name: zinc finger, MYND-type containing 8
  ENSP ID: ENSP00000413727
MDISTRSKDPGSAERTAQKRKFPSPPHSSNGHSPQDTSTSPIKKKKKPGLLNSNNKEQDGRNDFYCWVCHREGQVLCCELCPRVYHAKCLRLTSEPEGDWFCPECEKITVAECIETQSKAMTMLTIEQLSYLLKFAIQKMKQPGTDAFQKPVPLEQHPDYAEYIFHPMDLCTLEK

SEQ ID NO: 102229 - protein, 1188 aa, Homo sapiens
  Payload ID: 20372
  Gene Name: zinc finger, MYND-type containing 8
  Uniprot ID: Q9ULU4
  ENSP ID: ENSP00000418210
MHPQSLAEEEIKTEQEVVEGMDISTRSKDPGSAERTAQKRKFPSPPHSSNGHSPQDTSTSPIKKKKKPGLLNSNNKEQSELRHGPFYYMKQPLTTDPVDVVPQDGRNDFYCWVCHREGQVLCCELCPRVYHAKCLRLTSEPEGDWFCPECEKITVAECIETQSKAMTMLTIEQLSYLLKFAIQKMKQPGTDAFQKPVPLEQHPDYAEYIFHPMDLCTLEKNAKKKMYGCTEAFLADAKWILHNCIIYNGGNHKLTQIAKVVIKICEHEMNEIEVCPECYLAACQKRDNWFCEPCSNPHPLVWAKLKGFPFWPAKALRDKDGQVDARFFGQHDRAWVPINNCYLMSKEIPFSVKKTKSIFNSAMQEMEVYVENIRRKFGVFNYSPFRTPYTPNSQYQMLLDPTNPSAGTAKIDKQEKVKLNFDMTASPKILMSKPVLSGGTGRRISLSDMPRSPMSTNSSVHTGSDVEQDAEKKATSSHFSASEESMDFLDKSTASPASTKTGQAGSLSGSPKPFSPQLSAPITTKTDKTSTTGSILNLNLDRSKAEMDLKELSESVQQQSTPVPLISPKRQIRSRFQLNLDKTIESCKAQLGINEISEDVYTAVEHSDSEDSEKSDSSDSEYISDDEQKSKNEPEDTEDKEGCQMDKEPSAVKKKPKPTNPVEIKEELKSTSPASEKADPGAVKDKASPEPEKDFSEKAKPSPHPIKDKLKGKDETDSPTVHLGLDSDSESELVIDLGEDHSGREGRKNKKEPKEPSPKQDVVGKTPPSTTVGSHSPPETPVLTRSSAQTSAAGATATTSTSSTVTVTAPAPAATGSPVKKQRPLLPKETAPAVQRVVWNSSTVQQKEITQSPSTSTITLVTSTQSSPLVTSSGSMSTLVSSVNADLPIATASADVAADIAKYTSKMMDAIKGTMTEIYNDLSKNTTGSTIAEIRRLRIEIEKLQWLHQQELSEMKHNLELTMAEMRQSLEQERDRLIAEVKKQLELEKQQAVDETKKKQWCANCKKEAIFYCCWNTSYCDYPCQQAHWPEHMKSCTQSATAPQQEADAEVNTETLNKSSQGSSSSTQSAPSETASASKEKETSAEKSKESGSTLDLSGSRETPSSILLGSNQGSVSKRCDKQPAYAPTTTDHQPHPNYPAQKYHSRSNKSSWSSSDEKRGSTRSDHNTSTSTKSLLPKESRLDTFWD

SEQ ID NO: 102230 - protein, 1095 aa, Homo sapiens
  Payload ID: 20372
  Gene Name: zinc finger, MYND-type containing 8
  ENSP ID: ENSP00000418495
  MOD_RES (1)..(1): Any amino acid
XTDPVDVVPQDGRNDFYCWVCHREGQVLCCELCPRVYHAKCLRLTSEPEGDWFCPECEKITVAECIETQSKAMTMLTIEQLSYLLKFAIQKMKQPGTDAFQKPVPLEQHPDYAEYIFHPMDLCTLEKNAKKKMYGCTEAFLADAKWILHNCIIYNGGNHKLTQIAKVVIKICEHEMNEIEVCPECYLAACQKRDNWFCEPCSNPHPLVWAKLKGFPFWPAKALRDKDGQVDARFFGQHDRAWVPINNCYLMSKEIPFSVKKTKSIFNSAMQEMEVYVENIRRKFGVFNYSPFRTPYTPNSQYQMLLDPTNPSAGTAKIDKQEKVKLNFDMTASPKILMSKPVLSGGTGRRISLSDMPRSPMSTNSSVHTGSDVEQDAEKKATSSHFSASEESMDFLDKSTASPASTKTGQAGSLSGSPKPFSPQLSAPITTKTDKTSTTGSILNLNLDRSKAEMDLKELSESVQQQSTPVPLISPKRQIRSRFQLNLDKTIESCKAQLGINEISEDVYTAVEHSDSEDSEKSDSSDSEYISDDEQKSKNEPEDTEDKEGCQMDKEPSAVKKKPKPTNPVEIKEELKSTSPASEKADPGAVKDKASPEPEKDFSEKAKPSPHPIKDKLKGKDETDSPTVHLGLDSDSESELVIDLGEDHSGREGRKNKKEPKEPSPKQDVVGKTPPSTTVGSHSPPETPVLTRSSAQTSAAGATATTSTSSTVTVTAPAPAATGSPVKKQRPLLPKETAPAVQRVVWNSSTVQQKEITQSPSTSTITLVTSTQSSPLVTSSGSMSTLVSSVNADLPIATASADVAADIAKYTSKMMDAIKGTMTEIYNDLSKNTTGSTIAEIRRLRIEIEKLQWLHQQELSEMKHNLELTMAEMRQSLEQERDRLIAEVKKQLELEKQQAVDETKKKQWCANCKKEAIFYCCWNTSYCDYPCQQAHWPEHMKSCTQSATAPQQEADAEVNTETLNKSSQGSSSSTQSAPSETASASKEKETSAEKSKESGSTLDLSGSRETPSSILLGSNQGSVSKRCDKQPAYAPTTTDHQPHPNYPAQKYHSRSNKSSWSSSDEKRGSTRSDHNTSTSTKSLLPKESRLDTFWD

SEQ ID NO: 102231 - protein, 1234 aa, Homo sapiens
  Payload ID: 20372
  Gene Name: zinc finger, MYND-type containing 8
  Uniprot ID: Q9ULU4
  ENSP ID: ENSP00000420095
MHPQSLAEEEIKTEQEVVEGMDISTRSKDPGSAERTAQKRKFPSPPHSSNGHSPQDTSTSPIKKKKKPGLLNSNNKEQSELRHGPFYYMKQPLTTDPVDVVPQDGRNDFYCWVCHREGQVLCCELCPRVYHAKCLRLTSEPEGDWFCPECEKITVAECIETQSKAMTMLTIEQLSYLLKFAIQKMKQPGTDAFQKPVPLEQHPDYAEYIFHPMDLCTLEKNAKKKMYGCTEAFLADAKWILHNCIIYNGGNHKLTQIAKVVIKICEHEMNEIEVCPECYLAACQKRDNWFCEPCSNPHPLVWAKLKGFPFWPAKALRDKDGQVDARFFGQHDRAWVPINNCYLMSKEIPFSVKKTKSIFNSAMQEMEVYVENIRRKFGVFNYSPFRTPYTPNSQYQMLLDPTNPSAGTAKIDKQEKVKLNFDMTASPKILMSKPVLSGGTGRRISLSDMPRSPMSTNSSVHTGSDVEQDAEKKATSSHFSASEESMDFLDKSTASPASTKTGQAGSLSGSPKPFSPQLSAPITTKTDKTSTTGSILNLNLDRSKAEMDLKELSESVQQQSTPVPLISPKRQIRSRFQLNLDKTIESCKAQLGINEISEDVYTAVEHSDSEDSEKSDSSDSEYISDDEQKSKNEPEDTEDKEGCQMDKEPSAVKKKPKPTNPVEIKEELKSTSPASEKADPGAVKDKASPEPEKDFSEKAKPSPHPIKDKLKGKDETDSPTVHLGLDSDSESELVIDLGEDHSGREGRKNKKEPKEPSPKQDVVGKTPPSTTVGSHSPPETPVLTRSSAQTSAAGATATTSTSSTVTVTAPAPAATGSPVKKQRPLLPKETAPAVQRVVWNSSSKFQTSSQKWHMQKMQRQQQQQQQQNQQQQPQSSQGTRYQTRQAVKAVQQKEITQSPSTSTITLVTSTQSSPLVTSSGSMSTLVSSVNADLPIATASADVAADIAKYTSKMMDAIKGTMTEIYNDLSKNTTGSTIAEIRRLRIEIEKLQWLHQQELSEMKHNLELTMAEMRQSLEQERDRLIAEVKKQLELEKQQAVDETKKKQWCANCKKEAIFYCCWNTSYCDYPCQQAHWPEHMKSCTQSATAPQQEADAEVNTETLNKSSQGSSSSTQSAPSETASASKEKETSAEKSKESGSTLDLSGSRETPSSILLGSNQGSVSKRCDKQPAYAPTTTDHQPHPNYPAQKYHSRSNKSSWSSSDEKRGSTRSDHNTSTSTKSLLPKESRLDTFWD

SEQ ID NO: 102232 - protein, 1241 aa, Homo sapiens
  Payload ID: 20372
  Gene Name: zinc finger, MYND-type containing 8
  Uniprot ID: Q9ULU4
  ENSP ID: ENSP00000439800
MVFLEEFEARSCLAEEEIKTEQEVVEGMDISTRSKDPGSAERTAQKRKFPSPPHSSNGHSPQDTSTSPIKKKKKPGLLNSNNKEQSELRHGPFYYMKQPLTTDPVDVVPQDGRNDFYCWVCHREGQVLCCELCPRVYHAKCLRLTSEPEGDWFCPECEKITVAECIETQSKAMTMLTIEQLSYLLKFAIQKMKQPGTDAFQKPVPLEQHPDYAEYIFHPMDLCTLEKNAKKKMYGCTEAFLADAKWILHNCIIYNGGNHKLTQIAKVVIKICEHEMNEIEVCPECYLAACQKRDNWFCEPCSNPHPLVWAKLKGFPFWPAKALRDKDGQVDARFFGQHDRAWVPINNCYLMSKEIPFSVKKTKSIFNSAMQEMEVYVENIRRKFGVFNYSPFRTPYTPNSQYQMLLDPTNPSAGTAKIDKQEKVKLNFDMTASPKILMSKPVLSGGTGRRISLSDMPRSPMSTNSSVHTGSDVEQDAEKKATSSHFSASEESMDFLDKSTASPASTKTGQAGSLSGSPKPFSPQLSAPITTKTDKTSTTGSILNLNLDRSKAEMDLKELSESVQQQSTPVPLISPKRQIRSRFQLNLDKTIESCKAQLGINEISEDVYTAVEHSDSEDSEKSDSSDSEYISDDEQKSKNEPEDTEDKEGCQMDKEPSAVKKKPKPTNPVEIKEELKSTSPASEKADPGAVKDKASPEPEKDFSEKAKPSPHPIKDKLKGKDETDSPTVHLGLDSDSESELVIDLGEDHSGREGRKNKKEPKEPSPKQDVVGKTPPSTTVGSHSPPETPVLTRSSAQTSAAGATATTSTSSTVTVTAPAPAATGSPVKKQRPLLPKETAPAVQRVVWNSSSKFQTSSQKWHMQKMQRQQQQQQQQNQQQQPQSSQGTRYQTRQAVKAVQQKEITQSPSTSTITLVTSTQSSPLVTSSGSMSTLVSSVNADLPIATASADVAADIAKYTSKMMDAIKGTMTEIYNDLSKNTTGSTIAEIRRLRIEIEKLQWLHQQELSEMKHNLELTMAEMRQSLEQERDRLIAEVKKQLELEKQQAVDETKKKQWCANCKKEAIFYCCWNTSYCDYPCQQAHWPEHMKSCTQSATAPQQEADAEVNTETLNKSSQGSSSSTQSAPSETASASKEKETSAEKSKESGSTLDLSGSRETPSSILLGSNQGSVSKRCDKQPAYAPTTTDHQPHPNYPAQKYHSRSNKSSWSSSDEKRGSTRSDHNTSTSTKSLLPKESRLDTFWD

SEQ ID NO: 102233 - protein, 1134 aa, Homo sapiens
  Payload ID: 20372
  Gene Name: zinc finger, MYND-type containing 8
  Uniprot ID: Q9ULU4
  ENSP ID: ENSP00000443086
MHPQSLAEEEIKTEQEVVEGMDISTRSKDPGSAERTAQKRKFPSPPHSSNGHSPQDTSTSPIKKKKKPGLLNSNNKEQDGRNDFYCWVCHREGQVLCCELCPRVYHAKCLRLTSEPEGDWFCPECEKITVAECIETQSKAMTMLTIEQLSYLLKFAIQKMKQPGTDAFQKPVPLEQHPDYAEYIFHPMDLCTLEKNAKKKMYGCTEAFLADAKWILHNCIIYNGGNHKLTQIAKVVIKICEHEMNEIEVCPECYLAACQKRDNWFCEPCSNPHPLVWAKLKGFPFWPAKALRDKDGQVDARFFGQHDRAWVPINNCYLMSKEIPFSVKKTKSIFNSAMQEMEVYVENIRRKFGVFNYSPFRTPYTPNSQYQMLLDPTNPSAGTAKIDKQEKVKLNFDMTASPKILMSKPVLSGGTGRRISLSDMPRSPMSTNSSVHTGSDVEQDAEKKATSSHFSASEESMDFLDKSTDRSKAEMDLKELSESVQQQSTPVPLISPKRQIRSRFQLNLDKTIESCKAQLGINEISEDVYTAVEHSDSEDSEKSDSSDSEYISDDEQKSKNEPEDTEDKEGCQMDKEPSAVKKKPKPTNPVEIKEELKSTSPASEKADPGAVKDKASPEPEKDFSEKAKPSPHPIKDKLKGKDETDSPTVHLGLDSDSESELVIDLGEDHSGREGRKNKKEPKEPSPKQDVVGKTPPSTTVGSHSPPETPVLTRSSAQTSAAGATATTSTSSTVTVTAPAPAATGSPVKKQRPLLPKETAPAVQRVVWNSSSKFQTSSQKWHMQKMQRQQQQQQQQNQQQQPQSSQGTRYQTRQAVKAVQQKEITQSPSTSTITLVTSTQSSPLVTSSGSMSTLVSSVNADLPIATASADVAADIAKYTSKMMDAIKGTMTEIYNDLSKNTTGSTIAEIRRLRIEIEKLQWLHQQELSEMKHNLELTMAEMRQSLEQERDRLIAEVKKQLELEKQQAVDETKKKQWCANCKKEAIFYCCWNTSYCDYPCQQAHWPEHMKSCTQSATAPQQEADAEVNTETLNKSSQGSSSSTQSAPSETASASKEKETSAEKSKESGSTLDLSGSRETPSSILLGSNQGSDHSRSNKSSWSSSDEKRGSTRSDHNTSTSTKSLLPKESRLDTFWD

SEQ ID NO: 102234 - protein, 767 aa, Homo sapiens
  Payload ID: 20372
  Gene Name: zinc finger, MYND-type containing 8
  ENSP ID: ENSP00000479197
MDISTRSKDPGSAERTAQKRKFPSPPHSSNGHSPQDTSTSPIKKKKKPGLLNSNNKEQDGRNDFYCWVCHREGQVLCCELCPRVYHAKCLRLTSEPEGDWFCPECEKITVAECIETQSKAMTMLTIEQLSYLLKFAIQKMKQPGTDAFQKPVPLEQHPDYAEYIFHPMDLCTLEKNAKKKMYGCTEAFLADAKWILHNCIIYNGGNHKLTQIAKVVIKICEHEMNEIEVCPECYLAACQKRDNWFCEPCSNPHPLVWAKLKGFPFWPAKALRDKDGQVDARFFGQHDRAWVPINNCYLMSKEIPFSVKKTKSIFNSAMQEMEVYVENIRRKFGVFNYSPFRTPYTPNSQYQMLLDPTNPSAGTAKIDKQEKVKLNFDMTASPKILMSKPVLSGGTGRRISLSDMPRSPMSTNSSVHTGSDVEQDAEKKATSSHFSASEESMDFLDKSTASPASTKTGQAGSLSGSPKPFSPQLSAPITTKTDKTSTTGSILNLNLDRSKAEMDLKELSESVQQQSTPVPLISPKRQIRSRFQLNLDKTIESCKAQLGINEISEDVYTAVEHSDSEDSEKSDSSDSEYISDDEQKSKNEPEDTEDKEGCQMDKEPSAVKKKPKPTNPVEIKEELKSTSPASEKADPGAVKDKASPEPEKDFSEKAKPSPHPIKDKLKGKDETDSPTVHLGLDSDSESELTIPGVINPVGAAVMRRGDRHVPITTPVPARRASSRKSLGWTPSGTSSESGHKPPTPLGEKPRRQEKKKQQRQENSHFQT

SEQ ID NO: 102235 - protein, 1136 aa, Homo sapiens
  Payload ID: 20372
  Gene Name: zinc finger, MYND-type containing 8
  ENSP ID: ENSP00000479806
MHPQSLAEEEIKTEQEVVEGMDISTRSKDPGSAERTAQKRKFPSPPHSSNGHSPQDTSTSPIKKKKKPGLLNSNNKEQDGRNDFYCWVCHREGQVLCCELCPRVYHAKCLRLTSEPEGDWFCPECEKITVAECIETQSKAMTMLTIEQLSYLLKFAIQKMKQPGTDAFQKPVPLEQHPDYAEYIFHPMDLCTLEKNAKKKMYGCTEAFLADAKWILHNCIIYNGGNHKLTQIAKVVIKICEHEMNEIEVCPECYLAACQKRDNWFCEPCSNPHPLVWAKLKGFPFWPAKALRDKDGQVDARFFGQHDRAWVPINNCYLMSKEIPFSVKKTKSIFNSAMQEMEVYVENIRRKFGVFNYSPFRTPYTPNSQYQMLLDPTNPSAGTAKIDKQEKVKLNFDMTASPKILMSKPVLSGGTGRRISLSDMPRSPMSTNSSVHTGSDVEQDAEKKATSSHFSASEESMDFLDKSTASPASTKTGQAGSLSGSPKPFSPQLSAPITTKTDKTSTTGSILNLNLDRSKAEMDLKELSESVQQQSTPVPLISPKRQIRSRFQLNLDKTIESCKAQLGINEISEDVYTAVEHSDSEDSEKSDSSDSEYISDDEQKSKNEPEDTEDKEGCQMDKEPSAVKKKPKPTNPVEIKEELKSTSPASEKADPGAVKDKASPEPEKDFSEKAKPSPHPIKDKLKGKDETDSPTVHLGLDSDSESELVIDLGEDHSGREGRKNKKEPKEPSPKQDVVGKTPPSTTVGSHSPPETPVLTRSSAQTSAAGATATTSTSSTVTVTAPAPAATGSPVKKQRPLLPKETAPAVQRVVWNSSTVQQKEITQSPSTSTITLVTSTQSSPLVTSSGSMSTLVSSVNADLPIATASADVAADIAKYTSKIRRLRIEIEKLQWLHQQELSEMKHNLELTMAEMRQSLEQERDRLIAEVKKQLELEKQQAVDETKKKQWCANCKKEAIFYCCWNTSYCDYPCQQAHWPEHMKSCTQSATAPQQEADAEVNTETLNKSSQGSSSSTQSAPSETASASKEKETSAEKSKESGSTLDLSGSRETPSSILLGSNQGSVSKRCDKQPAYAPTTTDHQPHPNYPAQKYHSRSNKSSWSSSDEKRGSTRSDHNTSTSTKSLLPKESRLDTFWD

SEQ ID NO: 102236 - protein, 1087 aa, Homo sapiens
  Payload ID: 20372
  Gene Name: zinc finger, MYND-type containing 8
  ENSP ID: ENSP00000482048
MDISTRSKDPGSAERTAQKRKFPSPPHSSNGHSPQDTSTSPIKKKKKPGLLNSNNKEQSELRHGPFYYMKQPLTTDPVDVVPQDGRNDFYCWVCHREGQVLCCELCPRVYHAKCLRLTSEPEGDWFCPECEKITVAECIETQSKAMTMLTIEQLSYLLKFAIQKMKQPGTDAFQKPVPLEQHPDYAEYIFHPMDLCTLEKNAKKKMYGCTEAFLADAKWILHNCIIYNGGNHKLTQIAKVVIKICEHEMNEIEVCPECYLAACQKRDNWFCEPCSNPHPLVWAKLKGFPFWPAKALRDKDGQVDARFFGQHDRAWVPINNCYLMSKEIPFSVKKTKSIFNSAMQEMEVYVENIRRKFGVFNYSPFRTPYTPNSQYQMLLDPTNPSAGTAKIDKQEKVKLNFDMTASPKILMSKPVLSGGTGRRISLSDMPRSPMSTNSSVHTGSDVEQDAEKKATSSHFSASEESMDFLDKSTASPASTKTGQAGSLSGSPKPFSPQLSAPITTKTDKTSTTGSILNLNLDRSKAEMDLKELSESVQQQSTPVPLISPKRQIRSRFQLNLDKTIESCKAQLGINEISEDVYTAVEHSDSEDSEKSDSSDSEYISDDEQKSKNEPEDTEDKEGCQMDKEPSAVKKKPKPTNPVEIKEELKSTSPASEKADPGAVKDKASPEPEKDFSEKAKPSPHPIKDKLKGKDETDSPTVHLGLDSDSESELVIDLGEDHSGREGRKNKKEPKEPSPKQDAVQQKEITQSPSTSTITLVTSTQSSPLVTSSGSMSTLVSSVNADLPIATASADVAADIAKYTSKMMDAIKGTMTEIYNDLSKNTTGSTIAEIRRLRIEIEKLQWLHQQELSEMKHNLELTMAEMRQSLEQERDRLIAEVKKQLELEKQQAVDETKKKQWCANCKKEAIFYCCWNTSYCDYPCQQAHWPEHMKSCTQSATAPQQEADAEVNTETLNKSSQGSSSSTQSAPSETASASKEKETSAEKSKESGSTLDLSGSRETPSSILLGSNQGSVSKRCDKQPAYAPTTTDHQPHPNYPAQKYHSRSNKSSWSSSDEKRGSTRSDHNTSTSTKSLLPKESRLDTFWD

SEQ ID NO: 102237 - protein, 934 aa, Homo sapiens
  Payload ID: 20373
  Gene Name: zinc finger, NFX1-type containing 1
  ENSP ID: ENSP00000360809
MEERRPHLDARPRNSHTNHRGPVDGELPPRARNQANNPPANALRGGASHPGRHPRANNHPAAYWQREERFRAMGRNPHQGRRNQEGHASDEARDQRHDQENDTRWRNGNQDCRNRRPPWSNDNFQQWRTPHQKPTEQPQQAKKLGYKFLESLLQKDPSEVVITLATSLGLKELLSHSSMKSNFLELICQVLRKACSSKMDRQSVLHVLGILKNSKFLKVCLPAYVVGMITEPIPDIRNQYPEHISNIISLLQDLVSVFPASSVQETSMLVSLLPTSLNALRASGVDIEEETEKNLEKVQTIIEHLQEKRREGTLRVDTYTLVQPEAEDHVESYRTMPIYPTYNEVHLDERPFLRPNIISGKYDSTAIYLDTHFRLLREDFVRPLREGILELLQSFEDQGLRKRKFDDIRIYFDTRIITPMCSSSGIVYKVQFDTKPLKFVRWQNSKRLLYGSLVCMSKDNFETFLFATVSNREQEDLCRGIVQLCFNEQSQQLLAEVQPSDSFLMVETTAYFEAYRHVLEGLQEVQEEDVPFQRNIVECNSHVKEPRYLLMGGRYDFTPLIENPSATGEFLRNVEGLRHPRINVLDPGQWPSKEALKLDDSQMEALQFALTRELAIIQGPPGTGKTYVGLKIVQALLTNESVWQISLQKFPILVVCYTNHALDQFLEGIYNCQKTSIVRVGGRSNSEILKQFTLRELRNKREFRRNLPMHLRRAYMSIMTQMKESEQELHEGAKTLECTMRGVLREQYLQKYISPQHWESLMNGPVQDSEWICFQHWKHSMMLEWLGLGVGSFTQSVSPAGPENTAQAEGDEEEEGEEESSLIEIAEEADLIQADRVIEEEEVVRPQRRKKEESGADQELAKMLLAMRLDHCGTGTAAGQEQATGEWQTQRNQKKKMKKRVKDELRKLNTMTAAEANEIEDVWQLDLSSRWQLY

SEQ ID NO: 102238 - protein, 1918 aa, Homo sapiens
  Payload ID: 20373
  Gene Name: zinc finger, NFX1-type containing 1
  Uniprot ID: Q9P2E3
  ENSP ID: ENSP00000360817
MEERRPHLDARPRNSHTNHRGPVDGELPPRARNQANNPPANALRGGASHPGRHPRANNHPAAYWQREERFRAMGRNPHQGRRNQEGHASDEARDQRHDQENDTRWRNGNQDCRNRRPPWSNDNFQQWRTPHQKPTEQPQQAKKLGYKFLESLLQKDPSEVVITLATSLGLKELLSHSSMKSNFLELICQVLRKACSSKMDRQSVLHVLGILKNSKFLKVCLPAYVVGMITEPIPDIRNQYPEHISNIISLLQDLVSVFPASSVQETSMLVSLLPTSLNALRASGVDIEEETEKNLEKVQTIIEHLQEKRREGTLRVDTYTLVQPEAEDHVESYRTMPIYPTYNEVHLDERPFLRPNIISGKYDSTAIYLDTHFRLLREDFVRPLREGILELLQSFEDQGLRKRKFDDIRIYFDTRIITPMCSSSGIVYKVQFDTKPLKFVRWQNSKRLLYGSLVCMSKDNFETFLFATVSNREQEDLCRGIVQLCFNEQSQQLLAEVQPSDSFLMVETTAYFEAYRHVLEGLQEVQEEDVPFQRNIVECNSHVKEPRYLLMGGRYDFTPLIENPSATGEFLRNVEGLRHPRINVLDPGQWPSKEALKLDDSQMEALQFALTRELAIIQGPPGTGKTYVGLKIVQALLTNESVWQISLQKFPILVVCYTNHALDQFLEGIYNCQKTSIVRVGGRSNSEILKQFTLRELRNKREFRRNLPMHLRRAYMSIMTQMKESEQELHEGAKTLECTMRGVLREQYLQKYISPQHWESLMNGPVQDSEWICFQHWKHSMMLEWLGLGVGSFTQSVSPAGPENTAQAEGDEEEEGEEESSLIEIAEEADLIQADRVIEEEEVVRPQRRKKEESGADQELAKMLLAMRLDHCGTGTAAGQEQATGEWQTQRNQKKKMKKRVKDELRKLNTMTAAEANEIEDVWQLDLSSRWQLYRLWLQLYQADTRRKILSYERQYRTSAERMAELRLQEDLHILKDAQVVGMTTTGAAKYRQILQKVEPRIVIVEEAAEVLEAHTIATLSKACQHLILIGDHQQLRPSANVYDLAKNFNLEVSLFERLVKVNIPFVRLNYQHRMCPEIARLLTPHIYQDLENHPSVLKYEKIKGVSSNLFFVEHNFPEQEIQEGKSHQNQHEAHFVVELCKYFLCQEYLPSQITILTTYTGQLFCLRKLMPAKTFAGVRVHVVDKYQGEENDIILLSLVRSNQEGKVGFLQISNRICVALSRAKKGMYCIGNMQMLAKVPLWSKIIHTLRENNQIGPMLRLCCQNHPETHTLVSKASDFQKVPEGGCSLPCEFRLGCGHVCTRACHPYDSSHKEFQCMKPCQKVICQEGHRCPLVCFQECQPCQVKVPKTIPRCGHEQMVPCSVPESDFCCQEPCSKSLRCGHRCSHPCGEDCVQLCSEMVTIKLKCGHSQPVKCGHVEGLLYGGLLVKCTTKCGTILDCGHPCPGSCHSCFEGRFHERCQQPCKRLLICSHKCQEPCIGECPPCQRTCQNRCVHSQCKKKCGELCSPCVEPCVWRCQHYQCTKLCSEPCNRPPCYVPCTKLLVCGHPCIGLCGEPCPKKCRICHMDEVTQIFFGFEDEPDARFVQLEDCSHIFEVQALDRYMNEQKDDEVAIRLKVCPICQVPIRKNLRYGTSIKQRLEEIEIIKEKIQGSAGEIATSQERLKALLERKSLLHQLLPEDFLMLKEKLAQKNLSVKDLGLVENYISFYDHLASLWDSLKKMHVLEEKRVRTRLEQVHEWLAKKRLSFTSQELSDLRSEIQRLTYLVNLLTRYKIAEKKVKDSIAVEVYSVQNILEKTCKFTQEDEQLVQEKMEALKATLPCSGLGISEEERVQIVSAIGYPRGHWFKCRNGHIYVIGDCGGAMERGTCPDCKEVIGGTNHTLERSNQLASEMDGAQHAAWSDTANNLMNFEEIQGMM

SEQ ID NO: 102239 - protein, 1270 aa, Homo sapiens
  Payload ID: 20373
  Gene Name: zinc finger, NFX1-type containing 1
  ENSP ID: ENSP00000360819
MEERRPHLDARPRNSHTNHRGPVDGELPPRARNQANNPPANALRGGASHPGRHPRANNHPAAYWQREERFRAMGRNPHQGRRNQEGHASDEARDQRHDQENDTRWRNGNQDCRNRRPPWSNDNFQQWRTPHQKPTEQPQQAKKLGYKFLESLLQKDPSEVVITLATSLGLKELLSHSSMKSNFLELICQVLRKACSSKMDRQSVLHVLGILKNSKFLKVCLPAYVVGMITEPIPDIRNQYPEHISNIISLLQDLVSVFPASSVQETSMLVSLLPTSLNALRASGVDIEEETEKNLEKVQTIIEHLQEKRREGTLRVDTYTLVQPEAEDHVESYRTMPIYPTYNEVHLDERPFLRPNIISGKYDSTAIYLDTHFRLLREDFVRPLREGILELLQSFEDQGLRKRKFDDIRIYFDTRIITPMCSSSGIVYKVQFDTKPLKFVRWQNSKRLLYGSLVCMSKDNFETFLFATVSNREQEDLCRGIVQLCFNEQSQQLLAEVQPSDSFLMVETTAYFEAYRHVLEGLQEVQEEDVPFQRNIVECNSHVKEPRYLLMGGRYDFTPLIENPSATGEFLRNVEGLRHPRINVLDPGQWPSKEALKLDDSQMEALQFALTRELAIIQGPPGTGKTYVGLKIVQALLTNESVWQISLQKFPILVVCYTNHALDQFLEGIYNCQKTSIVRVGGRSNSEILKQFTLRELRNKREFRRNLPMHLRRAYMSIMTQMKESEQELHEGAKTLECTMRGVLREQYLQKYISPQHWESLMNGPVQDSEWICFQHWKHSMMLEWLGLGVGSFTQSVSPAGPENTAQAEGDEEEEGEEESSLIEIAEEADLIQADRVIEEEEVVRPQRRKKEESGADQELAKMLLAMRLDHCGTGTAAGQEQATGEWQTQRNQKKKMKKRVKDELRKLNTMTAAEANEIEDVWQLDLSSRWQLYRLWLQLYQADTRRKILSYERQYRTSAERMAELRLQEDLHILKDAQVVGMTTTGAAKYRQILQKVEPRIVIVEEAAEVLEAHTIATLSKACQHLILIGDHQQLRPSANVYDLAKNFNLEVSLFERLVKVNIPFVRLNYQHRMCPEIARLLTPHIYQDLENHPSVLKYEKIKAKSNSCRALATGMRRKHKISGMILSFFKLTIRSARFQLLLSGSWTTASFPFSRSRFAVLICRDNKRMPAVKPVSTNTGSHGLQMPGALMGETFQKGSTSRDAAACLLSSLVNKIPPRSLTWASDCCISFSSASSCRTAYTSFSIFSILSRNLRMTSQWEKIKRIYK

SEQ ID NO: 102240 - protein, 1918 aa, Homo sapiens; identical to SEQ ID NO: 102238
  Payload ID: 20373
  Gene Name: zinc finger, NFX1-type containing 1
  Uniprot ID: Q9P2E3
  ENSP ID: ENSP00000379412

SEQ ID NO: 102241 - protein, 707 aa, Homo sapiens
  Payload ID: 20373
  Gene Name: zinc finger, NFX1-type containing 1
  ENSP ID: ENSP00000413800
SKMDRQSVLHVLGILKNSKFLKVCLPAYVVGMITEPIPDIRNQYPEHISNIISLLQDLVSVFPASSVQETSMLVSLLPTSLNALRASGVDIEEETEKNLEKVQTIIEHLQEKRREGTLRVDTYTLVQPEAEDHVESYRTMPIYPTYNEVHLDERPFLRPNIISGKYDSTAIYLDTHFRLLREDFVRPLREGILELLQSFEDQGLRKRKFDDIRIYFDTRIITPMCSSSGIVYKVQFDTKPLKFVRWQNSKRLLYGSLVCMSKDNFETFLFATVSNREQEDLCRGIVQLCFNEQSQQLLAEVQPSDSFLMVETTAYFEAYRHVLEGLQEVQEEDVPFQRNIVECNSHVKEPRYLLMGGRYDFTPLIENPSATGEFLRNVEGLRHPRINVLDPGQWPSKEALKLDDSQMEALQFALTRELAIIQGPPGTGKTYVGLKIVQALLTNESVWQISLQKFPILVVCYTNHALDQFLEGIYNCQKTSIVRVGGRSNSEILKQFTLRELRNKREFRRNLPMHLRRAYMSIMTQMKESEQELHEGAKTLECTMRGVLREQYLQKYISPQHWESLMNGPVQDSEWICFQHWKHSMMLEWLGLGVGSFTQSVSPAGPENTAQAEGDEEEEGEEESSLIEIAEEADLIQADRVIEEEEVVRPQRRKKEESGADQELAKMLLAMRLDHCGTGTAAGQEQATGEWQTVPCLVLMSADPAQP

SEQ ID NO: 102242 - protein, 708 aa, Homo sapiens
  Payload ID: 20374
  Gene Name: zinc finger, RAN-binding domain containing 1
  Uniprot ID: Q9UGI0
  ENSP ID: ENSP00000352676
MSERGIKWACEYCTYENWPSAIKCTMCRAQRPSGTIITEDPFKSGSSDVGRDWDPSSTEGGSSPLICPDSSARPRVKSSYSMENANKWSCHMCTYLNWPRAIRCTQCLSQRRTRSPTESPQSSGSGSRPVAFSVDPCEEYNDRNKLNTRTQHWTCSVCTYENWAKAKRCVVCDHPRPNNIEAIELAETEEASSIINEQDRARWRGSCSSGNSQRRSPPATKRDSEVKMDFQRIELAGAVGSKEELEVDFKKLKQIKNRMKKTDWLFLNACVGVVEGDLAAIEAYKSSGGDIARQLTADEVRLLNRPSAFDVGYTLVHLAIRFQRQDMLAILLTEVSQQAAKCIPAMVCPELTEQIRREIAASLHQRKGDFACYFLTDLVTFTLPADIEDLPPTVQEKLFDEVLDRDVQKELEEESPIINWSLELATRLDSRLYALWNRTAGDCLLDSVLQATWGIYDKDSVLRKALHDSLHDCSHWFYTRWKDWESWYSQSFGLHFSLREEQWQEDWAFILSLASQPGASLEQTHIFVLAHILRRPIIVYGVKYYKSFRGETLGYTRFQGVYLPLLWEQSFCWKSPIALGYTRGHFSALVAMENDGYGNRGAGANLNTDDDVTITFLPLVDSERKLLHVHFLSAQELGNEEQQEKLLREWLDCCVTEGGVLVAMQKSSRRRNHPLVTQMVEKWLDRYRQIRPCTSLSDGEEDEDDEDE

SEQ ID NO: 102243 - protein, 320 aa, Homo sapiens
  Payload ID: 20375
  Gene Name: zinc finger, RAN-binding domain containing 2
  Uniprot ID: O95218
  ENSP ID: ENSP00000254821
MSTKNFRVSDGDWICPDKKCGNVNFARRTSCNRCGREKTTEAKMMKAGGTEIGKTLAEKSRGLFSANDWQCKTCSNVNWARRSECNMCNTPKYAKLEERTGYGGGFNERENVEYIEREESDGEYDEFGRKKKKYRGKAVGPASILKEVEDKESEGEEEDEDEDLSKYKLDEDEDEDDADLSKYNLDASEEEDSNKKKSNRRSRSKSRSSHSRSSSRSSSPSSSRSRSRSRSRSSSSSQSRSRSSSRERSRSRGSKSRSSSRSHRGSSSPRKRSYSSSSSSPERNRKRSRSRSSSSGDRKKRRTRSRSPESQVIGENTKQP

SEQ ID NO: 102244 - protein, 330 aa, Homo sapiens
  Payload ID: 20375
  Gene Name: zinc finger, RAN-binding domain containing 2
  Uniprot ID: O95218
  ENSP ID: ENSP00000359958
MSTKNFRVSDGDWICPDKKCGNVNFARRTSCNRCGREKTTEAKMMKAGGTEIGKTLAEKSRGLFSANDWQCKTCSNVNWARRSECNMCNTPKYAKLEERTGYGGGFNERENVEYIEREESDGEYDEFGRKKKKYRGKAVGPASILKEVEDKESEGEEEDEDEDLSKYKLDEDEDEDDADLSKYNLDASEEEDSNKKKSNRRSRSKSRSSHSRSSSRSSSPSSSRSRSRSRSRSSSSSQSRSRSSSRERSRSRGSKSRSSSRSHRGSSSPRKRSYSSSSSSPERNRKRSRSRSSSSGDRKKRRTRSRSPERRHRSSSGSSHSGSRSSSKKK

SEQ ID NO: 102245 - protein, 337 aa, Homo sapiens
  Payload ID: 20375
  Gene Name: zinc finger, RAN-binding domain containing 2
  ENSP ID: ENSP00000480576
MSTKNFRVSDGDWICPDKKCGNVNFARRTSCNRCGREKTTEAKMMKAGGTEIGKTLAEKSRGLFSANDWQCKTCSNVNWARRSECNMCNTPKYAKLEERTGYGGGFNERENVEYIEREESDGEYDEFGRKKKKYRGKAVGPASILKEVEDKESEGEEEDEDEDLSKYKLDEDEDEDDADLSKYNLDASEEEDSNKKKSNRRSRSKSRSSHSRSSSRSSSPSSSRSRSRSRSRSSSSSQSRSRSSSRERSRSRGSKSRSSSRSTGALLPHEKDLIQVHHLLLRGTEREVVLDLLHLVIAKKDEQDHGHPKDATGHHLDHPILVPVQVQKRNNVLKFTS

SEQ ID NO: 102246 - protein, 320 aa, Homo sapiens; identical to SEQ ID NO: 102243
  Payload ID: 20375
  Gene Name: zinc finger, RAN-binding domain containing 2
  Uniprot ID: O95218
  ENSP ID: ENSP00000482026

SEQ ID NO: 102247 - protein, 1079 aa, Homo sapiens
  Payload ID: 20376
  Gene Name: zinc finger, RAN-binding domain containing 3
  Uniprot ID: Q5FWF4
  ENSP ID: ENSP00000264159
MPRVHNIKKSLTPHISCVTNESDNLLDFLPDRLRAKLLPFQKDGIIFALKRNGRCMVADEMGLGKTIQAIGITYFYKEEWPLLIVVPSSLRYPWTEEIEKWIPELSPEEINVIQNKTDVRRMSTSKVTVLGYGLLTADAKTLIDALNNQNFKVVIVDESHYMKSRNATRSRILLPIVQKARRAILLTGTPALGRPEELFMQIEALFPQKFGRWTDYAKRYCNAHIRYFGKRPQWDCRGASNLNELHQLLSDIMIRRLKTEVLTQLPPKVRQRIPFDLPSAAAKELNTSFEEWEKIMRTPNSGAMETVMGLITRMFKQTAIAKAGAVKDYIKMMLQNDSLKFLVFAHHLSMLQACTEAVIENKTRYIRIDGSVSSSERIHLVNQFQKDPDTRVAILSIQAAGQGLTFTAASHVVFAELYWDPGHIKQAEDRAHRIGQCSSVNIHYLIANGTLDTLMWGMLNRKAQVTGSTLNGRKEKIQAEEGDKEKWDFLQFAEAWTPNDSSEELRKEALFTHFEKEKQHDIRSFFVPQPKKRQLMTSCDESKRFREENTVVSSDPTKTAARDIIDYESDVEPETKRLKLAASEDHCSPSEETPSQSKQIRTPLVESVQEAKAQLTTPAFPVEGWQCSLCTYINNSELPYCEMCETPQGSAVMQIDSLNHIQDKNEKDDSQKDTSKKVQTISDCEKQALAQSEPGQLADSKEETPKIEKEDGLTSQPGNEQWKSSDTLPVYDTLMFCASRNTDRIHIYTKDGKQMSCNFIPLDIKLDLWEDLPASFQLKQYRSLILRFVREWSSLTAMKQRIIRKSGQLFCSPILALEEITKQQTKQNCTKRYITKEDVAVASMDKVKNVGGHVRLITKESRPRDPFTKKLLEDGACVPFLNPYTVQADLTVKPSTSKGYLQAVDNEGNPLCLRCQQPTCQTKQACKANSWDSRFCSLKCQEEFWIRSNNSYLRAKVFETEHGVCQLCNVNAQELFLRLRDAPKSQRKNLLYATWTSKLPLEQLNEMIRNPGEGHFWQVDHIKPVYGGGGQCSLDNLQTLCTVCHKERTARQAKERSQVRRQSLASKHGSDITRFLVKK

SEQ ID NO: 102248 - protein, 1077 aa, Homo sapiens
  Payload ID: 20376
  Gene Name: zinc finger, RAN-binding domain containing 3
  Uniprot ID: Q5FWF4
  ENSP ID: ENSP00000383979
MPRVHNIKKSLTPHISCVTNESDNLLDFLPDRLRAKLLPFQKDGIIFALKRNGRCMVADEMGLGKTIQAIGITYFYKEEWPLLIVVPSSLRYPWTEEIEKWIPELSPEEINVIQNKTDVRRMSTSKVTVLGYGLLTADAKTLIDALNNQNFKVVIVDESHYMKSRNATRSRILLPIVQKARRAILLTGTPALGRPEELFMQIEALFPQKFGRWTDYAKRYCNAHIRYFGKRPQWDCRGASNLNELHQLLSDIMIRRLKTEVLTQLPPKVRQRIPFDLPSAAAKELNTSFEEWEKIMRTPNSGAMETVMGLITRMFKQTAIAKAGAVKDYIKMMLQNDSLKFLVFAHHLSMLQACTEAVIENKTRYIRIDGSVSSSERIHLVNQFQKDPDTRVAILSIQAAGQGLTFTAASHVVFAELYWDPGHIKQAEDRAHRIGQCSSVNIHYLIANGTLDTLMWGMLNRKAQVTGSTLNGRKEKIQAEEGDKEKWDFLQFAEAWTPNDSSEELRKEALFTHFEKEKQHDIRSFFVPQPKKRQLMTSCDESKRFREENTVVSSDPTKTAARDIIDYESDVEPETKRLKLAASEDHCSPSEETPSQSKQIRTPLVESVQEAKAQLTTPAFPVEGWQCSLCTYINNSELPYCEMCETPQGSAVMQIDSLNHIQDKNEKDDSQKDTSKKVQTISDCEKQALAQSEPGQLADSKEETPKIEKEDGLTSQPEQWKSSDTLPVYDTLMFCASRNTDRIHIYTKDGKQMSCNFIPLDIKLDLWEDLPASFQLKQYRSLILRFVREWSSLTAMKQRIIRKSGQLFCSPILALEEITKQQTKQNCTKRYITKEDVAVASMDKVKNVGGHVRLITKESRPRDPFTKKLLEDGACVPFLNPYTVQADLTVKPSTSKGYLQAVDNEGNPLCLRCQQPTCQTKQACKANSWDSRFCSLKCQEEFWIRSNNSYLRAKVFETEHGVCQLCNVNAQELFLRLRDAPKSQRKNLLYATWTSKLPLEQLNEMIRNPGEGHFWQVDHIKPVYGGGGQCSLDNLQTLCTVCHKERTARQAKERSQVRRQSLASKHGSDITRFLVKK

SEQ ID NO: 102249 - protein, 428 aa, Homo sapiens
  Payload ID: 20376
  Gene Name: zinc finger, RAN-binding domain containing 3
  ENSP ID: ENSP00000384245
MPRVHNIKKSLTPHISCVTNESDNLLDFLPDRLRAKLLPFQKDGIIFALKRNGRCMVADEMGLGKTIQAIGITYFYKEEWPLLIVVPSSLRYPWTEEIEKWIPELSPEEINVIQNKTDVRRMSTSKVTVLGYGLLTADAKTLIDALNNQNFKVVIVDESHYMKSRNATRSRILLPIVQKARRAILLTGTPALGRPEELFMQIEALFPQKFGRWTDYAKRYCNAHIRYFGKRPQWDCRGASNLNELHQLLSDIMIRRLKTEVLTQLPPKVRQRIPFDLPSAAAKELNTSFEEWEKIMRTPNSGAMETVMGLITRMFKQTAIAKAGAVKDYIKMMLQNDSLKFLVFAHHLSMLQACTEAVIENKTRYIRIDGSVSSSERIHLVNQFQKDPDTRVAILSIQAAGQDLYDKVAWGKRTLVSGLFMECFCFVP

SEQ ID NO: 102250 - protein, 625 aa, Homo sapiens
  Payload ID: 20376
  Gene Name: zinc finger, RAN-binding domain containing 3
  ENSP ID: ENSP00000441320
MWGMLNRKAQVTGSTLNGRKEKIQAEEGDKEKWDFLQFAEAWTPNDSSEELRKEALFTHFEKEKQHDIRSFFVPQPKKRQLMTSCDESKRFREENTVVSSDPTKTAARDIIDYESDVEPETKRLKLAASEDHCSPSEETPSQSKQIRTPLVESVQEAKAQLTTPAFPVEGWQCSLCTYINNSELPYCEMCETPQGSAVMQIDSLNHIQDKNEKDDSQKDTSKKVQTISDCEKQALAQSEPGQLADSKEETPKIEKEDGLTSQPGNEQWKSSDTLPVYDTLMFCASRNTDRIHIYTKDGKQMSCNFIPLDIKLDLWEDLPASFQLKQYRSLILRFVREWSSLTAMKQRIIRKSGQLFCSPILALEEITKQQTKQNCTKRYITKEDVAVASMDKVKNVGGHVRLITKESRPRDPFTKKLLEDGACVPFLNPYTVQADLTVKPSTSKGYLQAVDNEGNPLCLRCQQPTCQTKQACKANSWDSRFCSLKCQEEFWIRSNNSYLRAKVFETEHGVCQLCNVNAQELFLRLRDAPKSQRKNLLYATWTSKLPLEQLNEMIRNPGEGHFWQVDHIKPVYGGGGQCSLDNLQTLCTVCHKERTARQAKERSQVRRQSLASKHGSDITRFLVKK

SEQ ID NO: 102251 - protein, 598 aa, Homo sapiens
  Payload ID: 20376
  Gene Name: zinc finger, RAN-binding domain containing 3
  Uniprot ID: Q5FWF4
  ENSP ID: ENSP00000480120
MTSCDESKRFREENTVVSSDPTKTAARDIIDYESDVEPETKRLKLAASEDHCSPSEETPSQSKQIRTPLVESVQEAKAQLTTPAFPVEGWQCSLCTYINNSELPYCEMCETPQGSAVMQIDSLNHIQDKNEKDDSQKDTSKKVQTISDCEKQALAQSEPGQLADSKEETPKIEKEDGLTSQPEQWKSSDTLPVYDTLMFCASRNTDRIHIYTKDGKQMSCNFIPLDIKLDLWEDLPASFQLKQYRSLILRFVREWSSLTAMKQRIIRKSGQLFCSPILALEEITKQQTKQNCTKRYITKEDVAVASMDKVKNVGGHVRLITKESRPRDPFTKKLLEDGACVPFLNPYTVQADLTVKPSTSKGYLQAVDNEGNPLCLRCQQPTCQTKQACKANSWDSRFCSLKCQEEFWIRSNNSYLRAKVFETEHGVCQLCNVNAQELFLRLRDAPKSQRKNLLYATWTSKLPLEQLNEMIRNPGEGHFWQVDHIKPVYGGGGQCSLDNLQTLCTVCHKERTARQAKERSQVRRQSLASKHGSDITRFLETSKLHESHKVTGAEQGLQVSGLPDSAAPEGGAAHTNDQRRCQRMKQPLTEVQILSHSS

SEQ ID NO: 102252 - protein, 485 aa, Homo sapiens
  Payload ID: 20377
  Gene Name: zinc finger, SWIM-type containing 1
  Uniprot ID: Q9BR11
  ENSP ID: ENSP00000361598
MLERLKAPWSAALQRKYFDLGIWTAPISPMALTMLNGLLIKDSSPPMLLHQVNKTAQLDTFNYQSCFMQSVFDHFPEILFIHRTYNPRGKVLYTFLVDGPRVQLEGHLARAVYFAIPAKEDTEGLAQMFQVFKKFNPAWERVCTILVDPHFLPLPILAMEFPTAEVLLSAFHICKFLQAKFYQLSLERPVERLLLTSLQSTMCSATAGNLRKLYTLLSNCIPPAKLPELHSHWLLNDRIWLAHRWRSRAESSHYFQSLEVTTHILSQFFGTTPSEKQGMASLFRYMQQNSADKANFNQGLCAQNNHAPSDTIPESPKLEQLVESHIQHSLNAICTGPAAQLCLGELAVVQKSTHLIGSGSEKMNIQILEDTHKVQPQPPASCSCYFNQAFHLPCRHILAMLSARRQVLQPDMLPAQWTAGCATSLDSILGSKWSETLDKHLAVTHLTEEVGQLLQHCTKEEFERRYSTLRELADSWIGPYEQVQL

SEQ ID NO: 102253 - protein, 485 aa, Homo sapiens; identical to SEQ ID NO: 102252
  Payload ID: 20377
  Gene Name: zinc finger, SWIM-type containing 1
  Uniprot ID: Q9BR11
  ENSP ID: ENSP00000361601

SEQ ID NO: 102254 - protein, 633 aa, Homo sapiens
  Payload ID: 20378
  Gene Name: zinc finger, SWIM-type containing 2
  Uniprot ID: Q8NEG5
  ENSP ID: ENSP00000295131
MLRRGYKASERRRHLSERLSWHQDQALSSSIYLLREMGPTGFLLREEEPEYMDFRVFLGNPHVCNCSTFPKGGELCKHICWVLLKKFKLPRNHESALQLGLGEREISDLLRGIHRVQTPQPGTNDENEHVEEDGYIKQKEIDSEDICSICQELLLEKKLPVTFCRFGCGNSIHIKCMKILANYQSTSNTSMLKCPLCRKEFAPLKLILEEFKNSSKLVAAAEKERLDKHLGIPCNNCKQFPIEGKCYKCTECIEYHLCQECFDSCCHLSHTFTFREKRNQKWRSLEKRADEVVKYIDTKNEIEEKMSHFQEKQGQVYTPKHIVRSLPLQLITKNSKLLAPGYQCLLCLKAFHLGQHTRLLPCTHKFHRKCIDNWLFHKCNSCPIDGQVIYNPLTWKNSAVNGQAHQSVSNRDIIHLSKQKEPDLFIPGTGLVLKQNRLGILPSIPQCNFDELNTPQSPKDAYENTTIDNLCSIKLDNSNSKKLTYDYKISQHFPRYLQDLPTVSFGKIPSQTLLPPIVHKNIVCPTAMESPCISGKFHTSLSRMTKGCKCNNHNLKKTPATKIREDNKRSTLLPEDFNLIVNWSTAKLSLSKRYSNCMGEITRKCSHLSRQPVSHSVNTKSTELSLIIEGVQL

SEQ ID NO: 102255 - protein, 81 aa, Homo sapiens
  Payload ID: 20378
  Gene Name: zinc finger, SWIM-type containing 2
  ENSP ID: ENSP00000400595
MLRRGYKASERRRHLSERLSWHQDQALSSSIYLLREMGPTGFLLREEEPEYMDFRVTTAPTAPSWPSSPPTRFPHWHTQCA

SEQ ID NO: 102256 - protein, 696 aa, Homo sapiens
  Payload ID: 20379
  Gene Name: zinc finger, SWIM-type containing 3
  Uniprot ID: Q96MP5
  ENSP ID: ENSP00000255152
MELGSCFKTYEDFKECFSAYKRENRCSFILRDCVSVRFHNLNHGTSIREDILYVQVKFVCIRTQSNRKRTREADMCPAYLLLRYNERLDRLFISELNTQHIHGDSKVASPGGDTTGKSQKTMCLQRLQPVQPTTKKDLDTAEKSLVEPSFCLDKVQVSSKPEQEGITPSDLAKIAKVMKNFLKVDEGSMASFSVGDSQHLDRLSFQSSKMTDLFIRFPENLLLHRVENTQGHILYAFLVENKERESRVVHFAVLKAETVTSVAKMLSIFTEFNSDWPKVKVVFVDPSFHYRAILQEIFPAARILLSIYHTTRLLEKKLHRSSANPSFKRLMKEALREAVFVTSEASLKNLCQMSQAVLDEDLFNFLQAHWFTCELLWYMHVRKGLLACNTYMDSLDIVTSKVSSLFREQQSLLDCILCFVDYIDFFNTKGLKNLPTPPPKLKRARPASMPLKSKKAFGICGESLTSLPAEETKPDAQQVQVQQQSQVPPSQVGMLDTLHQSGSELAYKLCHNEWEVVQNSTHLVDMAGSSVDVQLLEDSHQVSKDGCSCSCSFQQWYHLPCRHILALLHTSQQPVGEAMVCRRWQKKYQYLLGPNGELQDRGMVPNTGQPEKQGRNDMIQDLSRELANLLMQTEGPELEERYSTLRKIVDIWAGPSQPSELFQQPGDFKDVGRLPFLWGKQEEGEGFPPATAVMHY

SEQ ID NO: 102257 - protein, 989 aa, Homo sapiens
  Payload ID: 20380
  Gene Name: zinc finger, SWIM-type containing 4
  Uniprot ID: Q9H7M6
  ENSP ID: ENSP00000254323
MEPPAAKRSRGCPAGPEERDAGAGAARGRGRPEALLDLSAKRVAESWAFEQVEERFSRVPEPVQKRIVFWSFPRSEREICMYSSLGYPPPEGEHDARVPFTRGLHLLQSGAVDRVLQVGFHLSGNIREPGSPGEPERLYHVSISFDRCKITSVSCGCDNRDLFYCAHVVALSLYRIRHAHQVELRLPISETLSQMNRDQLQKFVQYLISAHHTEVLPTAQRLADEILLLGSEINLVNGAPDPTAGAGIEDANCWHLDEEQIQEQVKQLLSNGGYYGASQQLRSMFSKVREMLRMRDSNGARMLILMTEQFLQDTRLALWRQQGAGMTDKCRQLWDELGALWVCVVLSPHCKPEERAGWLQLLSRWDKLDVCPLEEGNYSFDGPSLQPTMAPAPELLQKGSTCITNTEGWVGHPLDPIGCLCRALLEACRLEEETLTLYPDSGPEKRKVAYQHVPVPGSPGESYLVLALEVALLGLGQQRALPEGLYAQDKVVRNEEQLLALLEEVELDERLVQVLRKQAGLLLEGGPFSGFGEVLFRESVPMHTCARYLFTALLPHDPDLAYRLALRAMRLPILETAFPAGEPHPSPLDSIMSNRFPRWFILGHLETRQCELASTMLTAAKGDPKWLHTVLGSIQQNIHSPALLFKLAQDACKTATPVSAPPDTTLLGIALELGLQVMRMTLNVMTWRRREMVRWLVSCATEIGPQALMNIMQNWYSLFTPVEAATIVAVTGTTHATLLRLQLDTSRREELWACARTLALQCAMKDPQNCALPALTLCEKNHSAFEAAYQIVLDAAAGGLGHAHLFTVARYMEHRGLPLRAYKLATLALAQLSIAFNQDSHPAVNDVLWACSLSHSLGRHELSAIVPLIIRSIHCAPMLSDILRRWTLSAPGLGPLGARRAAKPLGADRAPLCQLLDAAVTAYITTSHSRLTHISPRHYGDFIEFLGKARETFLLAPDGHLQFSQFLENLKQTYKGKKKLMLLVRERFG

SEQ ID NO: 102258 - protein, 240 aa, Homo sapiens
  Payload ID: 20380
  Gene Name: zinc finger, SWIM-type containing 4
  ENSP ID: ENSP00000465180
  MOD_RES (1)..(1): Any amino acid
XALALSPPDSGPEKRKVAYQHVPVPGSPGESYLVLALEVALLGLGQQRALPEGLYAQDKVVRNEEQLLTRQCELASTMLTAAKGDPKWLHTVLGSIQQNIHSPALLFKLAQDACKTATPVSAPPDTTLLGIALELGLQVMRMTLNVMTWRRREMVRWLVSCATEIGPQALMNIMQNWYSLFTPVEAATIVAVTGTTHATLLRLQLDTSRREELWACARTLALQCAMKDPQNCALPALTLC

SEQ ID NO: 102259 - protein, 898 aa, Homo sapiens
  Payload ID: 20380
  Gene Name: zinc finger, SWIM-type containing 4
  ENSP ID: ENSP00000468285
SAHHTEVLPTAQRLADEILLLGSEINLVNGAPDPTAGAGIEDANCWHLDEEQIQEQVKQLLSNGGYYGASQQLRSMFSKVREMLRMRDSNGARMLILMTEQFLQDTRLALWRQQGAGMTDKCRQLWDELGALWVCVVLSPHCKPEERAGWLQLLSRWDKLDVCPLEEGNYSFDGPSLQPTMAPAPGSEEEEEVAATSPRHTVFGRALLAGELHWNDAYLQRILASDSYGPSLTGSVGGDKPTFDPQGRPLWLGEPFPTACARVDTLRAHGYPRQALRLASAIINTLRLQQRHQLESYKQQKKELLQKGSTCITNTEGWVGHPLDPIGCLCRALLEACRLEEETLTLYPDSGPEKRKVAYQHVPVPGSPGESYLVLALEVALLGLGQQRALPEGLYAQDKVVRNEEQLLALLEEVELDERLVQVLRKQAGLLLEGGPFSGFGEVLFRESVPMHTCARYLFTALLPHDPDLAYRLALRAMRLPILETAFPAGEPHPSPLDSIMSNRFPRWFILGHLETRQCELASTMLTAAKGDPKWLHTVLGSIQQNIHSPALLFKLAQDACKTATPVSAPPDTTLLGIALELGLQVMRMTLNVMTWRRREMVRWLVSCATEIGPQALMNIMQNWYSLFTPVEAATIVAVTGTTHATLLRLQLDTSRREELWACARTLALQCAMKDPQNCALPALTLCEKNHSAFEAAYQIVLDAAAGGLGHAHLFTVARYMEHRGLPLRAYKLATLALAQLSIAFNQDSHPAVNDVLWACSLSHSLGRHELSAIVPLIIRSIHCAPMLSDILRRWTLSAPGLGPLGARRAAKPLGADRAPLCQLLDAAVTAYITTSHSRLTHISPRHYGDFIEFLGKARETFLLAPDGHLQFSQFLENLKQTYKGKKKLMLLVRERFG

SEQ ID NO: 102260 - protein, 1185 aa, Homo sapiens
  Payload ID: 20381
  Gene Name: zinc finger, SWIM-type containing 5
  Uniprot ID: Q9P217
  ENSP ID: ENSP00000352614
MADGGEREELLSPSPVSPAKRQCSWPSPQAHHPRGSPGAAGGGAGGVGSSCLVLGARPHLQPDSLLDCAAKTVAEKWAYERVEERFERIPEPVQRRIVYWSFPRNEREICMYSSFQYRGGPGAGAAGGAAGASPAEEGPQPPPGAAAPAGSAPGGVAAGASPGLGAGAGAAGCGGEGLPFRRGIRLLDSGSVENVLQVGFHLSGTVTELATASEPAVTYKVAISFDRCKITSVTCGCGNKDIFYCAHVVALSLYRIRKPDQVKLRLPISETLFQMNRDQLQKFIQYLITAHHTEVLPTAQKLADEILSSNSEINQVNGAPDPTAGASIDDENCWHLDEEQVKEQVKLFLSQGGYCGSGKQLNSMFAKVREMLRMRDSNGARMLTLITEQFVADPRLTLWRQQGTNMTDKCRQLWDELGALWVCIILNPHCKLEEKSCWLQQLQKWSDLDVCPLEDGNYGHELPNITNALPQSAIHSPDSLSRPRRTVFTRAIEGRELHWQDSHLQRIISSDVYTAPACQRESERLLFNSQGQPLWLEHVPTACARVDALRSHGYPKEALRLTVAIINTLRLQQQRQLEIYKHQKKELLQRGTTTITNLEGWVGHPLDPIDCLFLTLTEACRLNDDGYLEMSDMNESRPPVYQHVPVAAGSPNSSESYLSLALEVALMGLGQQRLMPEGLYAQDKVCRNEEQLLSQLQELQLDDELVQTLQKQCILLLEGGPFSGLGEVIHRESVPMHTFAKYLFSALLPHDPDLSYKLALRAMRLPVLENSASAGDTSHPHHMVSVVPSRYPRWFTLGHLESQQCELASTMLTAAKGDTLRLRTILEAIQKHIHSSSLIFKLAQDAFKIATPTDSSTDSTLLNVALELGLQVMRMTLSTLNWRRREMVRWLVTCATEVGVRALVSILQSWYTLFTPTEATSIVAATAVSHTTILRLSLDYPQREELASCARTLALQCAMKDPQSCALSALTLCEKDHIAFEAAYQIAIDAAAGGMTHSQLFTIARYMELRGYPLRAFKLASLAMSHLNLAYNQDTHPAINDVLWACALSHSLGKNELAALIPLVVKSVHCATVLSDILRRCTVTAPGLAGIPGRRSSGKLMSTDKAPLRQLLDATINAYINTTHSRLTHISPRHYGEFIEFLSKARETFLLPQDGHLQFAQFIDNLKQIYKGKKKLMLLVRERFG

SEQ ID NO: 102261 - protein, 1215 aa, Homo sapiens
  Payload ID: 20382
  Gene Name: zinc finger, SWIM-type containing 6
  Uniprot ID: Q9HCJ5
  ENSP ID: ENSP00000252744
MAERGQQPPPAKRLCCRPGGGGGGGGSSGGGGGAGGGYSSACRPGPRAGGAAAAAACGGGAALGLLPPGKTQSPESLLDIAARRVAEKWPFQRVEERFERIPEPVQRRIVYWSFPRSEREICMYSSFNTGGGAAGGPGDDSGGGGGAGGGGGGGSSSSPAATSAAATSAAAAAAAAAAAAAAAAGAGAPSVGAAGAADGGDETRLPFRRGIALLESGCVDNVLQVGFHLSGTVTEPAIQSEPETVCNVAISFDRCKITSVTCSCGNKDIFYCAHVVALSLYRIRKPDQVKLHLPISETLFQMNRDQLQKFVQYLITVHHTEVLPTAQKLADEILSQNSEINQVHGAPDPTAGASIDDENCWHLDEEQVQEQVKLFLSQGGYHGSGKQLNLLFAKVREMLKMRDSNGARMLTLITEQFMADPRLSLWRQQGTAMTDKYRQLWDELGALWMCIVLNPHCKLEQKASWLKQLKKWNSVDVCPWEDGNHGSELPNLTNALPQGANANQDSSNRPHRTVFTRAIEACDLHWQDSHLQHIISSDLYTNYCYHDDTENSLFDSRGWPLWHEHVPTACARVDALRSHGYPREALRLAIAIVNTLRRQQQKQLEMFRTQKKELPHKNITSITNLEGWVGHPLDPVGTLFSSLMEACRIDDENLSGFSDFTENMGQCKSLEYQHLPAHKFLEEGESYLTLAVEVALIGLGQQRIMPDGLYTQEKVCRNEEQLISKLQEIELDDTLVKIFRKQAVFLLEAGPYSGLGEIIHRESVPMHTFAKYLFTSLLPHDAELAYKIALRAMRLLVLESTAPSGDLTRPHHIASVVPNRYPRWFTLSHIESQQCELASTMLTAAKGDVRRLETVLESIQKNIHSSSHIFKLAQDAFKIATLMDSLPDITLLKVSLELGLQVMRMTLSTLNWRRREMVRWLVTCATEVGVYALDSIMQTWFTLFTPTEATSIVATTVMSNSTIVRLHLDCHQQEKLASSARTLALQCAMKDPQNCALSALTLCEKDHIAFETAYQIVLDAATTGMSYTQLFTIARYMEHRGYPMRAYKLATLAMTHLNLSYNQDTHPAINDVLWACALSHSLGKNELAAIIPLVVKSVKCATVLSDILRRCTLTTPGMVGLHGRRNSGKLMSLDKAPLRQLLDATIGAYINTTHSRLTHISPRHYSEFIEFLSKARETFLMAHDGHIQFTQFIDNLKQIYKGKKKLMMLVRERFG

SEQ ID NO: 102262 - protein, 140 aa, Homo sapiens
  Payload ID: 20383
  Gene Name: zinc finger, SWIM-type containing 7
  Uniprot ID: Q19AV6
  ENSP ID: ENSP00000382218
MAVVLPAVVEELLSEMAAAVQESARIPDEYLLSLKFLFGSSATQALDLVDRQSITLISSPSGRRVYQVLGSSSKTYTCLASCHYCSCPAFAFSVLRKSDSILCKHLLAVYLSQVMRTCQQLSVSDKQLTDILLMEKKQEA

SEQ ID NO: 102263 - protein, 140 aa, Homo sapiens; identical to SEQ ID NO: 102262
  Payload ID: 20383
  Gene Name: zinc finger, SWIM-type containing 7
  Uniprot ID: Q19AV6
  ENSP ID: ENSP00000419138

SEQ ID NO: 102264 - protein, 30 aa, Homo sapiens
  Payload ID: 20383
  Gene Name: zinc finger, SWIM-type containing 7
  ENSP ID: ENSP00000462208
VVLPAVVEELLSEMAAAVQESARSTGPRSS

SEQ ID NO: 102265 - protein, 32 aa, Homo sapiens
  Payload ID: 20383
  Gene Name: zinc finger, SWIM-type containing 7
  ENSP ID: ENSP00000462590
MAVVLPAVVEELLSEMAAAVQESARSTGPRSS

SEQ ID NO: 102266 - protein, 31 aa, Homo sapiens
  Payload ID: 20383
  Gene Name: zinc finger, SWIM-type containing 7
  ENSP ID: ENSP00000462598
MAVVLPAVVEELLSEMAAAVQESARSTGPSS

SEQ ID NO: 102267 - protein, 31 aa, Homo sapiens; identical to SEQ ID NO: 102266
  Payload ID: 20383
  Gene Name: zinc finger, SWIM-type containing 7
  ENSP ID: ENSP00000463327

SEQ ID NO: 102268 - protein, 78 aa, Homo sapiens
  Payload ID: 20383
  Gene Name: zinc finger, SWIM-type containing 7
  ENSP ID: ENSP00000463444
MAVVLPAVVEELLSEMAAAVQESARSTGPRLKFLFGSSATQALDLVDRQSITLISSPSGRRVYQRQGLTMLPRLVSNS

SEQ ID NO: 102269 - protein, 26 aa, Homo sapiens
  Payload ID: 20383
  Gene Name: zinc finger, SWIM-type containing 7
  ENSP ID: ENSP00000463592
MAVVLPAVVEELLSEMAAAVQESARS

SEQ ID NO: 102270 - protein, 31 aa, Homo sapiens; identical to SEQ ID NO: 102266
  Payload ID: 20383
  Gene Name: zinc finger, SWIM-type containing 7
  ENSP ID: ENSP00000464227

SEQ ID NO: 102271 - protein, 66 aa, Homo sapiens
  Payload ID: 20383
  Gene Name: zinc finger, SWIM-type containing 7
  ENSP ID: ENSP00000464371
MAAAVQESARIPDEYLLSLKFLFGSSATQALDLVDRQSITLISSPSGRRVYQRQGLTMLPRLVSNS

SEQ ID NO: 102272 - protein, 32 aa, Homo sapiens; identical to SEQ ID NO: 102265
  Payload ID: 20383
  Gene Name: zinc finger, SWIM-type containing 7
  ENSP ID: ENSP00000464463

SEQ ID NO: 102273 - protein, 31 aa, Homo sapiens; identical to SEQ ID NO: 102266
  Payload ID: 20383
  Gene Name: zinc finger, SWIM-type containing 7
  ENSP ID: ENSP00000464500

SEQ ID NO: 102274 - protein, 31 aa, Homo sapiens; identical to SEQ ID NO: 102266
  Payload ID: 20383
  Gene Name: zinc finger, SWIM-type containing 7
  ENSP ID: ENSP00000464605

SEQ ID NO: 102275 - protein, 1842 aa, Homo sapiens
  Payload ID: 20384
  Gene Name: zinc finger, SWIM-type containing 8
  Uniprot ID: A7E2V4
  ENSP ID: ENSP00000381693
MELMFAEWEDGERFSFEDSDRFEEDSLCSFISEAESLCQNWRGWRKQSAGPNSPTGGGGGGGSGGTRMRDGLVIPLVELSAKQVAFHIPFEVVEKVYPPVPEQLQLRIAFWSFPENEEDIRLYSCLANGSADEFQRGDQLFRMRAVKDPLQIGFHLSATVVPPQMVPPKGAYNVAVMFDRCRVTSCSCTCGAGAKWCTHVVALCLFRIHNASAVCLRAPVSESLSRLQRDQLQKFAQYLISELPQQILPTAQRLLDELLSSQSTAINTVCGAPDPTAGPSASDQSTWYLDESTLTDNIKKTLHKFCGPSPVVFSDVNSMYLSSTEPPAAAEWACLLRPLRGREPEGVWNLLSIVREMFKRRDSNAAPLLEILTDQCLTYEQITGWWYSVRTSASHSSASGHTGRSNGQSEVAAHACASMCDEMVTLWRLAVLDPALSPQRRRELCTQLRQWQLKVIENVKRGQHKKTLERLFPGFRPAVEACYFNWEEAYPLPGVTYSGTDRKLALCWARALPSRPGASRSGGLEESRDRPRPLPTEPAVRPKEPGTKRKGLGEGVPSSQRGPRRLSAEGGDKALHKMGPGGGKAKALGGAGSGSKGSAGGGSKRRLSSEDSSLEPDLAEMSLDDSSLALGAEASTFGGFPESPPPCPLHGGSRGPSTFLPEPPDTYEEDGGVYFSEGPEPPTASVGPPGLLPGDVCTQDDLPSTDESGNGLPKTKEAAPAVGEEDDDYQAYYLNAQDGAGGEEEKAEGGAGEEHDLFAGLKPLEQESRMEVLFACAEALHAHGYSSEASRLTVELAQDLLANPPDLKVEPPPAKGKKNKVSTSRQTWVATNTLSKAAFLLTVLSERPEHHNLAFRVGMFALELQRPPASTKALEVKLAYQESEVAALLKKIPLGPSEMSTMRCRAEELREGTLCDYRPVLPLMLASFIFDVLCAPVVSPTGSRPPSRNWNSETPGDEELGFEAAVAALGMKTTVSEAEHPLLCEGTRREKGDLALALMITYKDDQAKLKKILDKLLDRESQTHKPQTLSSFYSSSRPTTASQRSPSKHGGPSAPGALQPLTSGSAGPAQPGSVAGAGPGPTEGFTEKNVPESSPHSPCEGLPSEAALTPRPEGKVPSRLALGSRGGYNGRGWGSPGRPKKKHTGMASIDSSAPETTSDSSPTLSRRPLRGGWAPTSWGRGQDSDSISSSSSDSLGSSSSSGSRRASASGGARAKTVEVGRYKGRRPESHAPHVPNQPSEAAAHFYFELAKTVLIKAGGNSSTSIFTHPSSSGGHQGPHRNLHLCAFEIGLYALGLHNFVSPNWLSRTYSSHVSWITGQAMEIGSAALTILVECWDGHLTPPEVASLADRASRARDSNMVRAAAELALSCLPHAHALNPNEIQRALVQCKEQDNLMLEKACMAVEEAAKGGGVYPEVLFEVAHQWFWLYEQTAGGSSTAREGATSCSASGIRAGGEAGRGMPEGRGGPGTEPVTVAAAAVTAAATVVPVISVGSSLYPGPGLGHGHSPGLHPYTALQPHLPCSPQYLTHPAHPAHPMPHMPRPAVFPVPSSAYPQGVHPAFLGAQYPYSVTPPSLAATAVSFPVPSMAPITVHPYHTEPGLPLPTSVACELWGQGTVSSVHPASTFPAIQGASLPALTTQPSPLVSGGFPPPEEETHSQPVNPHSLHHLHAAYRVGMLALEMLGRRAHNDHPNNFSRSPPYTDDVKWLLGLAAKLGVNYVHQFCVGAAKGVLSPFVLQEIVMETLQRLSPAHAHNHLRAPAFHQLVQRCQQAYMQYIHHRLIHLTPADYDDFVNAIRSARSAFCLTPMGMMQFNDILQNLKRSKQTKELWQRVSLEMATFSP

SEQ ID NO: 102276 - protein, 1336 aa, Homo sapiens
  Payload ID: 20384
  Gene Name: zinc finger, SWIM-type containing 8
  ENSP ID: ENSP00000387828
MELMFAEWEDGERFSFEDSDRFEEDSLCSFISEAESLCQNWRGWRKQSAGPNSPTGGGGGGGSGGTRMRDGLVIPLVELSAKQVAFHIPFEVVEKVYPPVPEQLQLRIAFWSFPENEEDIRLYSCLANGSADEFQRGDQLFRMRAVKDPLQIGFHLSATVVPPQMVPPKGAYNVAVMFDRCRVTSCSCTCGAGAKWCTHVVALCLFRIHNASAVCLRAPVSESLSRLQRDQLQKFAQYLISELPQQILPTAQRLLDELLSSQSTAINTVCGAPDPTAGPSASDQSTWYLDESTLTDNIKKTLHKFCGPSPVVFSDVNSMYLSSTEPPAAAEWACLLRPLRGREPEGVWNLLSIVREMFKRRDSNAAPLLEILTDQCLTYEQITGWWYSVRTSASHSSASGHTGRSNGQSEVAAHACASMCDEMVTLWRLAVLDPALSPQRRRELCTQLRQWQLKVIENVKRGQHKKTLERLFPGFRPAVEACYFNWEEAYPLPGVTYSGTDRKLALCWARALPSRPGASRSGGLEESRDRPRPLPTEPAVRPKEPGTKRKGLGEGVPSSQRGPRRLSAEGGDKALHKMGPGGGKAKALGGAGSGSKGSAGGGSKRRLSSEDSSLEPDLAEMSLDDSSLALGAEASTFGGFPESPPPCPLHGGSRGPSTFLPEPPDTYEEDGGVYFSEGPEPPTASVGPPGLLPGDVCTQDDLPSTDESGNGLPKTKEAAPAVGEEDDDYQAYYLNAQDGAGGEEEKAEGGAGEEHDLFAGLKPLEQESRMEVLFACAEALHAHGYSSEASRLTVELAQDLLANPPDLKGKKNKVSTSRQTWVATNTLSKAAFLLTVLSERPEHHNLAFRVGMFALELQRPPASTKALEVKLAYQESEVAALLKKIPLGPSEMSTMRCRAEELREGTLCDYRPVLPLMLASFIFDVLCAPVVSPTGSRPPSRNWNSETPGDEELGFEAAVAALGMKTTVSEAEHPLLCEGTRREKGDLALALMITYKDDQAKLKKILDKLLDRESQTHKPQTLSSFYSSSRPTTASQRSPSKHGGPSAPGALQPLTSGSAGPAQPGSVAGAGPGPTEGFTEKNVPESSPHSPCEGLPSEAALTPRPEGKVPSRLALGSRGGYNGRGWGSPGRPKKKHTGMASIDSSAPETTSDSSPTLSRRPLRGGWAPTSWGRGQDSDSISSSSSDSLGSSSSSGSRRASASGGARAKTVEVGRSVQGPPPRESCPSCTQSAIRGSCTLLLRAGEDSADQGRGQQQHFHFHTSIFLRGPPGSSPQPAPLRLRDWALCPWPAQLCFSQLALTYLFFPRFLDYRPGHGDRQRSPDYTGRMLGWAPDTP

SEQ ID NO: 102277 - protein, 1112 aa, Homo sapiens
  Payload ID: 20384
  Gene Name: zinc finger, SWIM-type containing 8
  ENSP ID: ENSP00000415612
  MOD_RES (1)..(1): Any amino acid
XYYLNAQDGAGGEEEKAEGGAGEEHDLFAGLKPLEQESRMEVLFACAEALHAHGYSSEASRLTVELAQDLLANPPDLKVEPPPAKGKKNKVSTSRQTWVATNTLSKAAFLLTVLSERPEHHNLAFRVGMFALELQRPPASTKALEVKLAYQESEVAALLKKIPLGPSEMSTMRCRAEELREGTLCDYRPVLPLMLASFIFDVLCAPVVSPTGSRPPSRNWNSETPGDEELGFEAAVAALGMKTTVSEAEHPLLCEGTRREKGDLALALMITYKDDQAKLKKILDKLLDRESQTHKPQTLSSFYSSSRPTTASQRSPSKHGGPSAPGALQPLTSGSAGPAQPGSVAGAGPGPTEGFTEKNVPESSPHSPCEGLPSEAALTPRPEGKVPSRLALGSRGGYNGRGWGSPGRPKKKHTGMASIDSSAPETTSDSSPTLSRRPLRGGWAPTSWGRGQDSDSISSSSSDSLGSSSSSGSRRASASGGARAKTVEVGRYKGRRPESHAPHVPNQPSEAAAHFYFELAKTVLIKAGGNSSTSIFTHPSSSGGHQGPHRNLHLCAFEIGLYALGLHNFVSPNWLSRTYSSHVSWITGQAMEIGSAALTILVECWDGHLTPPEVASLADRASRARDSNMVRAAAELALSCLPHAHALNPNEIQRALVQCKEQDNLMLEKACMAVEEAAKGGGVYPEVLFEVAHQWFWLYEQTAGGSSTAREGATSCSASGIRAGGEAGRGMPEGRGGPGTEPVTVAAAAVTAAATVVPVISVGSSLYPGPGLGHGHSPGLHPYTALQPHLPCSPQYLTHPAHPAHPMPHMPRPAVFPVPSSAYPQGVHPAFLGAQYPYSVTPPSLAATAVSFPVPSMAPITVHPYHTEPGLPLPTSVACELWGQGTVSSVHPASTFPAIQGASLPALTTQPSPLVSGGFPPPEEETHSQPVNPHSLHHLHAAYRVGMLALEMLGRRAHNDHPNNFSRSPPYTDDVKWLLGLAAKLGVNYVHQFCVGAAKGVLSPFVLQEIVMETLQRLSPAHAHNHLRAPAFHQLVQRCQQAYMQYIHHRLIHLTPADYDDFVNAIRSARSAFCLTPMGMMQFNDILQNLKRSKQTKELWQRVSLEMATFSP

SEQ ID NO: 102278 - protein, 904 aa, Homo sapiens
  Payload ID: 20384
  Gene Name: zinc finger, SWIM-type containing 8
  ENSP ID: ENSP00000432423
ITGWWYSVRTSASHSSASGHTGRSNGQSEVAAHACASMCDEMVTLWRLAVLDPALSPQRRRELCTQLRQWQLKVIENVKRGQHKKTLERLFPGFRPAVEACYFNWEEAYPLPGVTYSGTDRKLALCWARALPSRPGASRSGGLEESRDRPRPLPTEPAVRPKEPGTKRKGLGEGVPSSQRGPRRLSAEGGDKALHKMGPGGGKAKALGGAGSGSKGSAGGGSKRRLSSEDSSLEPDLAEMSLDDSSLALGAEASTFGGFPESPPPCPLHGGSRGPSTFLPEPPDTYEEDGGVYFSEGPEPPTASVGPPGLLPGDVCTQDDLPSTDESGNGLPKTKEAAPAVGEEDDDYQAYYLNAQDGAGGEEEKAEGGAGEEHDLFAGLKPLEQESRMEVLFACAEALHAHGYSSEASRLTVELAQDLLANPPDLKVEPPPAKGKKNKVSTSRQTWVATNTLSKAAFLLTVLSERPEHHNLAFRVGMFALELQRPPASTKALEVKLAYQESEVAALLKKIPLGPSEMSTMRCRAEELREGTLCDYRPVLPLMLASFIFDVLCAPGSRPPSRNWNSETPGDEELGFEAAVAALGMKTTVSEAEHPLLCEGTRREKGDLALALMITYKDDQAKLKKILDKLLDRESQTHKPQTLSSFYSSSRPTTASQRSPSKHGGPSAPGALQPLTSGSAGPAQPGSVAGAGPGPTEGFTEKNVPESSPHSPCEGLPSEAALTPRPEGKVPSRLALGSRGGYNGRGWGSPGRPKKKHTGMASIDSSAPETTSDSSPTLSRRPLRGGWAPTSWGRGQDSDSISSSSSDSLGSSSSSGSRRASASGGARAKTVEVGRGPPGSSPQPAPLRLRDWALCPWPAQLCFSQLALTYLFFPRFLDYRPGHGDRQRSPDYTGRMLGWAPDTP

SEQ ID NO: 102279 - protein, 1796 aa, Homo sapiens
  Payload ID: 20384
  Gene Name: zinc finger, SWIM-type containing 8
  ENSP ID: ENSP00000474043
MELMFAEWEDGERFSFEDSDRFEEDSLCSFISEAESLCQNWRGWRKQSAGPNSPTGGGGGGGSGGTRMRDGLVIPLVELSAKQVAFHIPFEVVEKVYPPVPEQLQLRIAFWSFPENEEDIRLYSCLANGSADEFQRGDQLFRMRAVKDPLQIGFHLSATVVPPQMVPPKGAYNVAVMFDRCRVTSCSCTCGAGAKWCTHVVALCLFRIHNASAVCLRAPVSESLSRLQRDQLQKFAQYLISELPQQILPTAQRLLDELLSSQSTAINTVCGAPDPTAGPSASDQSTWYLDESTLTDNIKKTLHKFCGPSPVVFSDVNSMYLSSTEPPAAAEWACLLRPLRGREPEGVWNLLSIVREMFKRRDSNAAPLLEILTDQCLTYEQITGWWYSVRTSASHSSASGHTGRSNGQSEVAAHACASMCDEMVTLWRLAVLDPALSPQRRRELCTQLRQWQLKVIENVKRGQHKKTLERLFPGFRPAVEACYFNWEEAYPLPGVTYSGTDRKLALCWARALPSRPGASRSGGLEESRDRPRPLPTEPAVRPKEPGTKRKGLGEGVPSSQRGPRRLSAEGGDKALHKMGPGGGKAKALGGAGSGSKGSAGGGSKRRLSSEDSSLEPDLAEMSLDDSSLALGAEASTFGGFPESPPPCPLHASVGPPGLLPGDVCTQDDLPSTDESGNGLPKTKEAAPAVGEEDDDYQAYYLNAQDGAGGEEEKAEGGAGEEHDLFAGLKPLEQESRMEVLFACAEALHAHGYSSEASRLTVELAQDLLANPPDLKVEPPPAKGKKNKVSTSRQTWVATNTLSKAAFLLTVLSERPEHHNLAFRVGMFALELQRPPASTKALEVKLAYQESEVAALLKKIPLGPSEMSTMRCRAEELREGTLCDYRPVLPLMLASFIFDVLCAPGSRPPSRNWNSETPGDEELGFEAAVAALGMKTTVSEAEHPLLCEGTRREKGDLALALMITYKDDQAKLKKILDKLLDRESQTHKPQTLSSFYSSSRPTTASQRSPSKHGGPSAPGALQPLTSGSAGPAQPGSVAGAGPGPTEGFTEKNVPESSPHSPCEGLPSEAALTPRPEGKVPSRLALGSRGGYNGRGWGSPGRPKKKHTGMASIDSSAPETTSDSSPTLSRRPLRGGWAPTSWGRGQDSDSISSSSSDSLGSSSSSGSRRASASGGARAKTVEVGRYKGRRPESHAPHVPNQPSEAAAHFYFELAKTVLIKAGGNSSTSIFTHPSSSGGHQGPHRNLHLCAFEIGLYALGLHNFVSPNWLSRTYSSHVSWITGQAMEIGSAALTILVECWDGHLTPPEVASLADRASRARDSNMVRAAAELALSCLPHAHALNPNEIQRALVQCKEQDNLMLEKACMAVEEAAKGGGVYPEVLFEVAHQWFWLYEQTAGGSSTAREGATSCSASGIRAGGEAGRGMPEGRGGPGTEPVTVAAAAVTAAATVVPVISVGSSLYPGPGLGHGHSPGLHPYTALQPHLPCSPQYLTHPAHPAHPMPHMPRPAVFPVPSSAYPQGVHPAFLGAQYPYSVTPPSLAATAVSFPVPSMAPITVHPYHTEPGLPLPTSVALSSVHPASTFPAIQGASLPALTTQPSPLVSGGFPPPEEETHSQPVNPHSLHHLHAAYRVGMLALEMLGRRAHNDHPNNFSRSPPYTDDVKWLLGLAAKLGVNYVHQFCVGAAKGVLSPFVLQEIVMETLQRLSPAHAHNHLRAPAFHQLVQRCQQAYMQYIHHRLIHLTPADYDDFVNAIRSARSAFCLTPMGMMQFNDILQNLKRSKQTKELWQRVSLEMATFSP

SEQ ID NO: 102280 - protein, 1102 aa, Homo sapiens
  Payload ID: 20384
  Gene Name: zinc finger, SWIM-type containing 8
  ENSP ID: ENSP00000474118
  MOD_RES (1)..(1): Any amino acid
XGGEEEKAEGGAGEEHDLFAGLKPLEQESRMEVLFACAEALHAHGYSSEASRLTVELAQDLLANPPDLKVEPPPAKGKKNKVSTSRQTWVATNTLSKAAFLLTVLSERPEHHNLAFRVGMFALELQRPPASTKALEVKLAYQESEVAALLKKIPLGPSEMSTMRCRAEELREGTLCDYRPVLPLMLASFIFDVLCAPVVSPTGSRPPSRNWNSETPGDEELGFEAAVAALGMKTTVSEAEHPLLCEGTRREKGDLALALMITYKDDQAKLKKVTASVFQILDKLLDRESQTHKPQTLSSFYSSSRPTTASQRSPSKHGGPSAPGALQPLTSGSAGPAQPGSVAGAGPGPTEGFTEKNVPESSPHSPCEGLPSEAALTPRPEGKVPSRLALGSRGGYNGRGWGSPGRPKKKHTGMASIDSSAPETTSDSSPTLSRRPLRGGWAPTSWGRGQDSDSISSSSSDSLGSSSSSGSRRASASGGARAKTVEVGRYKGRRPESHAPHVPNQPSEAAAHFYFELAKTVLIKAGGNSSTSIFTHPSSSGGHQGPHRNLHLCAFEIGLYALGLHNFVSPNWLSRTYSSHVSWITGQAMEIGSAALTILVECWDGHLTPPEVASLADRASRARDSNMVRAAAELALSCLPHAHALNPNEIQRALVQCKEQDNLMLEKACMAVEEAAKGGGVYPEVLFEVAHQWFWLYEQTAGGSSTAREGATSCSASGIRAGGEAGRGMPEGRGGPGTEPVTVAAAAVTAAATVVPVISVGSSLYPGPGLGHGHSPGLHPYTALQPHLPCSPQYLTHPAHPAHPMPHMPRPAVFPVPSSAYPQGVHPAFLGAQYPYSVTPPSLAATAVSFPVPSMAPITVHPYHTEPGLPLPTSVALSSVHPASTFPAIQGASLPALTTQPSPLVSGGFPPPEEETHSQPVNPHSLHHLHAAYRVGMLALEMLGRRAHNDHPNNFSRSPPYTDDVKWLLGLAAKLGVNYVHQFCVGAAKGVLSPFVLQEIVMETLQRLSPAHAHNHLRAPAFHQLVQRCQQAYMQYIHHRLIHLTPADYDDFVNAIRSARSAFCLTPMGMMQFNDILQNLKRSKQTKELWQRVSLEMATFSP

SEQ ID NO: 102281 - protein, 1655 aa, Homo sapiens
  Payload ID: 20384
  Gene Name: zinc finger, SWIM-type containing 8
  ENSP ID: ENSP00000474348
MELMFAEWEDGERFSFEDSDRFEEDSLCSFISEAESLCQNWRGWRKQSAGPNSPTGGGGGGGSGGTRMRDGLVIPLVELSAKQVAFHIPFEVVEKVYPPVPEQLQLRIAFWSFPENEEDIRLYSCLANGSADEFQRGDQLFRMRAVKDPLQIGFHLSATVVPPQMVPPKGAYNVAVMFDRCRVTSCSCTCGAGAKWCTHVVALCLFRIHNASAVCLRAPVSESLSRLQRDQLQKFAQYLISELPQQILPTAQRLLDELLSSQSTAINTVCGAPDPTAGPSASDQSTWYLDESTLTDNIKKTLHKFCGPSPVVFSDVNSMYLSSTEPPAAAEWACLLRPLRGREPEGVWNLLSIVREMFKRRDSNAAPLLEILTDQCLTYEQITGWWYSVRTSASHSSASGHTGRSNGQSEVAAHACASMCDEMVTLWRLAVLDPALSPQRRRELCTQLRQWQLKVIENVKRGQHKKTLERLFPGFRPAVEACYFNWEEAYPLPGVTYSGTDRKLALCWARALPSRPGASRSGGLEESRDRPRPLPTEPAVRPKEPGTKRKGLGEGVPSSQRGPRRLSAEGGDKALHKMGPGGGKAKALGGAGSGSKGSAGGGSKRRLSSEDSSLEPDLAEMSLDDSSLALGAEASTFGGFPESPPPCPLHGGSRGPSTFLPEPPDTYEEDGGVYFSEGPEPPTASVGPPGLLPGDVCTQDDLPSTDESGNGLPKTKEAAPAVGEEDDDYQAYYLNAQDGAGGEEEKAEGGAGEEHDLFAGLKPLEQESRMEVLFACAEALHAHGYSSEASRLTVELAQDLLANPPDLKVEPPPAKGKKNKVSTSRQTWVATNTLSKAAFLLTVLSERPEHHNLAFRVGMFALELQRPPASTKALEVKLAYQESEVAALLKKIPLGPSEMSTMRCRAEELREGTLCDYRPVLPLMLASFIFDVLCAPGSRPPSRNWNSETPGDEELGFEAAVAALGMKTTVSEAEHPLLCEGTRREKGDLALALMITYKDDQAKLKKILDKLLDRESQTHKPQTLSSFYSSSRPTTASQRSPSKHGGPSAPGALQPLTSGSAGPAQPGSVAGAGPGPTEGFTEKNVPESSPHSPCEGLPSEAALTPRPEGKVPSRLALGSRGGYNGRGWGSPGRPKKKHTGMASIDSSAPETTSDSSPTLSRRPLRGGWAPTSWGRGQDSDSISSSSSDSLGSSSSSGSRRASASGGARAKTVEVGRYKGRRPESHAPHVPNQPSEAAAHFYFELAKTVLIKAGGNSSTSIFTHPSSSGGHQGPHRNLHLCAFEIGLYALGLHNFVSPNWLSRTYSSHVSWITGQAMEIGSAALTILVECWDGHLTPPEVASLADRASRARDSNMVRAAAELALSCLPHAHALNPNEIQRALVQCKEQDNLMLEKACMAVEEAAKVHPYHTEPGLPLPTSVACELWGQGTVSSVHPASTFPAIQGASLPALTTQPSPLVSGGFPPPEEETHSQPVNPHSLHHLHAAYRVGMLALEMLGRRAHNDHPNNFSRSPPYTDDVKWLLGLAAKLGVNYVHQFCVGAAKGVLSPFVLQEIVMETLQRLSPAHAHNHLRAPAFHQLVQRCQQAYMQYIHHRLIHLTPADYDDFVNAIRSARSAFCLTPMGMMQFNDILQNLKRSKQTKELWQRVSLEMATFSP

SEQ ID NO: 102282 - protein, 204 aa, Homo sapiens
  Payload ID: 20384
  Gene Name: zinc finger, SWIM-type containing 8
  ENSP ID: ENSP00000474677
  MOD_RES (1)..(1): Any amino acid
XDDVKWLLGLAAKLGDRHGDAAAAESRSCPQPPACPGLPPTGAALPAGIHAVHPPPLDSPDSCGLRRLCECDPECPQRLLPDAHGHDAVQRHPTEPQAQQTDQGAVAAGLTRDGHLLPLSLSPLGSYTGTQACGYGGPSHRGSETWLDRSSSLSSLVAQTDSCSWAIAWGQDVSHPRSLGLGETALSGRGRWVASGIYLAFINI

SEQ ID NO: 102283 - protein, 1837 aa, Homo sapiens
  Payload ID: 20384
  Gene Name: zinc finger, SWIM-type containing 8
  Uniprot ID: A7E2V4
  ENSP ID: ENSP00000474748
MELMFAEWEDGERFSFEDSDRFEEDSLCSFISEAESLCQNWRGWRKQSAGPNSPTGGGGGGGSGGTRMRDGLVIPLVELSAKQVAFHIPFEVVEKVYPPVPEQLQLRIAFWSFPENEEDIRLYSCLANGSADEFQRGDQLFRMRAVKDPLQIGFHLSATVVPPQMVPPKGAYNVAVMFDRCRVTSCSCTCGAGAKWCTHVVALCLFRIHNASAVCLRAPVSESLSRLQRDQLQKFAQYLISELPQQILPTAQRLLDELLSSQSTAINTVCGAPDPTAGPSASDQSTWYLDESTLTDNIKKTLHKFCGPSPVVFSDVNSMYLSSTEPPAAAEWACLLRPLRGREPEGVWNLLSIVREMFKRRDSNAAPLLEILTDQCLTYEQITGWWYSVRTSASHSSASGHTGRSNGQSEVAAHACASMCDEMVTLWRLAVLDPALSPQRRRELCTQLRQWQLKVIENVKRGQHKKTLERLFPGFRPAVEACYFNWEEAYPLPGVTYSGTDRKLALCWARALPSRPGASRSGGLEESRDRPRPLPTEPAVRPKEPGTKRKGLGEGVPSSQRGPRRLSAEGGDKALHKMGPGGGKAKALGGAGSGSKGSAGGGSKRRLSSEDSSLEPDLAEMSLDDSSLALGAEASTFGGFPESPPPCPLHGGSRGPSTFLPEPPDTYEEDGGVYFSEGPEPPTASVGPPGLLPGDVCTQDDLPSTDESGNGLPKTKEAAPAVGEEDDDYQAYYLNAQDGAGGEEEKAEGGAGEEHDLFAGLKPLEQESRMEVLFACAEALHAHGYSSEASRLTVELAQDLLANPPDLKVEPPPAKGKKNKVSTSRQTWVATNTLSKAAFLLTVLSERPEHHNLAFRVGMFALELQRPPASTKALEVKLAYQESEVAALLKKIPLGPSEMSTMRCRAEELREGTLCDYRPVLPLMLASFIFDVLCAPGSRPPSRNWNSETPGDEELGFEAAVAALGMKTTVSEAEHPLLCEGTRREKGDLALALMITYKDDQAKLKKILDKLLDRESQTHKPQTLSSFYSSSRPTTASQRSPSKHGGPSAPGALQPLTSGSAGPAQPGSVAGAGPGPTEGFTEKNVPESSPHSPCEGLPSEAALTPRPEGKVPSRLALGSRGGYNGRGWGSPGRPKKKHTGMASIDSSAPETTSDSSPTLSRRPLRGGWAPTSWGRGQDSDSISSSSSDSLGSSSSSGSRRASASGGARAKTVEVGRYKGRRPESHAPHVPNQPSEAAAHFYFELAKTVLIKAGGNSSTSIFTHPSSSGGHQGPHRNLHLCAFEIGLYALGLHNFVSPNWLSRTYSSHVSWITGQAMEIGSAALTILVECWDGHLTPPEVASLADRASRARDSNMVRAAAELALSCLPHAHALNPNEIQRALVQCKEQDNLMLEKACMAVEEAAKGGGVYPEVLFEVAHQWFWLYEQTAGGSSTAREGATSCSASGIRAGGEAGRGMPEGRGGPGTEPVTVAAAAVTAAATVVPVISVGSSLYPGPGLGHGHSPGLHPYTALQPHLPCSPQYLTHPAHPAHPMPHMPRPAVFPVPSSAYPQGVHPAFLGAQYPYSVTPPSLAATAVSFPVPSMAPITVHPYHTEPGLPLPTSVACELWGQGTVSSVHPASTFPAIQGASLPALTTQPSPLVSGGFPPPEEETHSQPVNPHSLHHLHAAYRVGMLALEMLGRRAHNDHPNNFSRSPPYTDDVKWLLGLAAKLGVNYVHQFCVGAAKGVLSPFVLQEIVMETLQRLSPAHAHNHLRAPAFHQLVQRCQQAYMQYIHHRLIHLTPADYDDFVNAIRSARSAFCLTPMGMMQFNDILQNLKRSKQTKELWQRVSLEMATFSP

SEQ ID NO: 102284 - protein, 1232 aa, Homo sapiens
  Payload ID: 20384
  Gene Name: zinc finger, SWIM-type containing 8
  ENSP ID: ENSP00000474766
  MOD_RES (1)..(1): Any amino acid
XEPPDTYEEDGGVYFSEGPEPPTASVGPPGLLPGDVCTQDDLPSTDESGNGLPKTKEAAPAVGEEDDDYQAYYLNAQDGAGGEEEKAEGGAGEEHDLFAGLKPLEQESRMEVLFACAEALHAHGYSSEASRLTVELAQDLLANPPDLKVEPPPAKGKKNKVSTSRQTWVATNTLSKAAFLLTVLSERPEHHNLAFRVGMFALELQRPPASTKALEVKLAYQESEVAALLKKIPLGPSEMSTMRCRAEELREGTLCDYRPVLPLMLASFIFDVLCAPGSRPPSRNWNSETPGDEELGFEAAVAALGMKTTVSEAEHPLLCEGTRREKGDLALALMITYKDDQAKLKKILDKLLDRESQTHKPQTLSSFYSSSRPTTASQRSPSKHGGPSAPGALQPLTSGSAGPAQPGSVAGAGPGPTEGFTEKNVPESSPHSPCEGLPSEAALTPRPEGKVPSRLALGSRGGYNGRGWGSPGRPKKKHTGMASIDSSAPETTSDSSPTLSRRPLRGGWAPTSWGRGQDSDSISSSSSDSLGSSSSSGSRRASASGGARAKTVEVGRYKGRRPESHAPHVPNQPSEAAAHFYFELAKTVLIKAGGNSSTSIFTHPSSSGGHQGPHRNLHLCAFEIGLYALGLHNFVSPNWLSRTYSSHVSWITGQAMEIGSAALTILVECWDGHLTPPEVASLADRASRARDSNMVRAAAELALSCLPHAHALNPNEIQRALVQCKEQDNLMLEKACMAVEEAAKGGGVYPEVLFEVAHQWFWLYEQTAGGSSTAREGATSCSASGIRAGGEAGRGMPEGRGGPGTEPVTVAAAAVTAAATVVPVISVGSSLYPGPGLGHGHSPGLHPYTALQPHLPCSPQYLTHPAHPAHPMPHMPRPAVFPVPSSAYPQGVHPAFLGAQYPYSVTPPSLAATAVSFPVPSMAPITVHPYHTEPGLPLPTSVALSSVHPASTFPAIQGASLPALTTQPSPLVSGGFPPPEEETHSQPVNPHSLHHLHAAYRVGMLALEMLGRRAHNDHPNNFSRSPPYTDDVKWLLGLAAKLGDRHGDAAAAESRSCPQPPACPGLPPTGAALPAGIHAVHPPPLDSPDSCGLRRLCECDPECPQRLLPDAHGHDAVQRHPTEPQAQQTDQGAVAAGLTRDGHLLPLSLSPLGSYTGTQACGYGGPSHRGSETWLDRSSSLSSLVAQTDSCSWAIAWGQDVSHPRSLGLGETALSGRGRWVASGIYLAFINI

SEQ ID NO: 102285 - protein, 1834 aa, Homo sapiens
  Payload ID: 20384
  Gene Name: zinc finger, SWIM-type containing 8
  ENSP ID: ENSP00000474944
MELMFAEWEDGERFSFEDSDRFEEDSLCSFISEAESLCQNWRGWRKQSAGPNSPTGGGGGGGSGGTRMRDGLVIPLVELSAKQVAFHIPFEVVEKVYPPVPEQLQLRIAFWSFPENEEDIRLYSCLANGSADEFQRGDQLFRMRAVKDPLQIGFHLSATVVPPQMVPPKGAYNVAVMFDRCRVTSCSCTCGAGAKWCTHVVALCLFRIHNASAVCLRAPVSESLSRLQRDQLQKFAQYLISELPQQILPTAQRLLDELLSSQSTAINTVCGAPDPTAGPSASDQSTWYLDESTLTDNIKKTLHKFCGPSPVVFSDVNSMYLSSTEPPAAAEWACLLRPLRGREPEGVWNLLSIVREMFKRRDSNAAPLLEILTDQCLTYEQITGWWYSVRTSASHSSASGHTGRSNGQSEVAAHACASMCDEMVTLWRLAVLDPALSPQRRRELCTQLRQWQLKVIENVKRGQHKKTLERLFPGFRPAVEACYFNWEEAYPLPGVTYSGTDRKLALCWARALPSRPGASRSGGLEESRDRPRPLPTEPAVRPKEPGTKRKGLGEGVPSSQRGPRRLSAEGGDKALHKMGPGGGKAKALGGAGSGSKGSAGGGSKRRLSSEDSSLEPDLAEMSLDDSSLALGAEASTFGGFPESPPPCPLHGGSRGPSTFLPEPPDTYEEDGGVYFSEGPEPPTASVGPPGLLPGDVCTQDDLPSTDESGNGLPKTKEAAPAVGEEDDDYQAYYLNAQDGAGGEEEKAEGGAGEEHDLFAGLKPLEQESRMEVLFACAEALHAHGYSSEASRLTVELAQDLLANPPDLKVEPPPAKGKKNKVSTSRQTWVATNTLSKAAFLLTVLSERPEHHNLAFRVGMFALELQRPPASTKALEVKLAYQESEVAALLKKIPLGPSEMSTMRCRAEELREGTLCDYRPVLPLMLASFIFDVLCAPVVSPTGSRPPSRNWNSETPGDEELGFEAAVAALGMKTTVSEAEHPLLCEGTRREKGDLALALMITYKDDQAKLKKILDKLLDRESQTHKPQTLSSFYSSSRPTTASQRSPSKHGGPSAPGALQPLTSGSAGPAQPGSVAGAGPGPTEGFTEKNVPESSPHSPCEGLPSEAALTPRPEGKVPSRLALGSRGGYNGRGWGSPGRPKKKHTGMASIDSSAPETTSDSSPTLSRRPLRGGWAPTSWGRGQDSDSISSSSSDSLGSSSSSGSRRASASGGARAKTVEVGRYKGRRPESHAPHVPNQPSEAAAHFYFELAKTVLIKAGGNSSTSIFTHPSSSGGHQGPHRNLHLCAFEIGLYALGLHNFVSPNWLSRTYSSHVSWITGQAMEIGSAALTILVECWDGHLTPPEVASLADRASRARDSNMVRAAAELALSCLPHAHALNPNEIQRALVQCKEQDNLMLEKACMAVEEAAKGGGVYPEVLFEVAHQWFWLYEQTAGGSSTAREGATSCSASGIRAGGEAGRGMPEGRGGPGTEPVTVAAAAVTAAATVVPVISVGSSLYPGPGLGHGHSPGLHPYTALQPHLPCSPQYLTHPAHPAHPMPHMPRPAVFPVPSSAYPQGVHPAFLGAQYPYSVTPPSLAATAVSFPVPSMAPITVHPYHTEPGLPLPTSVALSSVHPASTFPAIQGASLPALTTQPSPLVSGGFPPPEEETHSQPVNPHSLHHLHAAYRVGMLALEMLGRRAHNDHPNNFSRSPPYTDDVKWLLGLAAKLGVNYVHQFCVGAAKGVLSPFVLQEIVMETLQRLSPAHAHNHLRAPAFHQLVQRCQQAYMQYIHHRLIHLTPADYDDFVNAIRSARSAFCLTPMGMMQFNDILQNLKRSKQTKELWQRVSLEMATFSP

SEQ ID NO: 102286 - protein, 799 aa, Homo sapiens
  Payload ID: 20385
  Gene Name: zinc finger, X-linked, duplicated A
  Uniprot ID: P98168
  ENSP ID: ENSP00000351530
MEIPKLLPARGTLQGGGGGGIPAGGGRVHRGPDSPAGQVPTRRLLLPRGPQDGGPGRRREEASTASRGPGPSLFAPRPHQPSGGGDDFFLVLLDPVGGDVETAGSGQAAGPVLREEAKAGPGLQGDESGANPAGCSAQGPHCLSAVPTPAPISAPGPAAAFAGTVTIHNQDLLLRFENGVLTLATPPPHAWEPGAAPAQQPRCLIAPQAGFPQAAHPGDCPELRSDLLLAEPAEPAPAPAPQEEAEGLAAALGPRGLLGSGPGVVLYLCPEALCGQTFAKKHQLKMHLLTHSSSQGQRPFKCPLGGCGWTFTTSYKLKRHLQSHDKLRPFGCPAEGCGKSFTTVYNLKAHMKGHEQENSFKCEVCEESFPTQAKLGAHQRSHFEPERPYQCAFSGCKKTFITVSALFSHNRAHFREQELFSCSFPGCSKQYDKACRLKIHLRSHTGERPFLCDFDGCGWNFTSMSKLLRHKRKHDDDRRFMCPVEGCGKSFTRAEHLKGHSITHLGTKPFVCPVAGCCARFSARSSLYIHSKKHLQDVDTWKSRCPISSCNKLFTSKHSMKTHMVKRHKVGQDLLAQLEAANSLTPSSELTSQRQNDLSDAEIVSLFSDVPDSTSAALLDTALVNSGILTIDVASVSSTLAGHLPANNNNSVGQAVDPPSLMATSDPPQSLDTSLFFGTAATGFQQSSLNMDEVSSVSVGPLGSLDSLAMKNSSPEPQALTPSSKLTVDTDTLTPSSTLCENSVSELLTPAKAEWSVHPNSDFFGQEGETQFGFPNAAGNHGSQKERNLITVTGSSFLV

SEQ ID NO: 102287 - protein, 803 aa, Homo sapiens
  Payload ID: 20386
  Gene Name: zinc finger, X-linked, duplicated B
  Uniprot ID: P98169
  ENSP ID: ENSP00000364023
MEIPKLLPARGTLQGGGGGGIPAGGGRVHRGPDSPAGQVPTRRLLLLRGPQDGGPGRRREEASTASRGPGPSLLAPRTDQPSGGGGGGGDDFFLVLLDPVGGDVETAGSGQAAGPVLREEAEEGPGLQGGESGANPAGPTALGPRCLSAVPTPAPISAPGPAAAFAGTVTIHNQDLLLRFENGVLTLATPPPHAWEPGAAPAQQPGCLIAPQAGFPHAAHPGDCPELPPDLLLAEPAEPAPAPAPEEEAEGPAAALGPRGPLGSGPGVVLYLCPEAQCGQTFAKKHQLKVHLLTHSSSQGQRPFKCPLGGCGWTFTTSYKLKRHLQSHDKLRPFGCPAEGCGKSFTTVYNLKAHMKGHEQENSFKCEVCEESFPTQAKLSAHQRSHFEPERPYQCAFSGCKKTFITVSALFSHNRAHFREQELFSCSFPGCSKQYDKACRLKIHLRSHTGERPFLCDFDGCGWNFTSMSKLLRHKRKHDDDRRFMCPVEGCGKSFTRAEHLKGHSITHLGTKPFVCPVAGCCARFSARSSLYIHSKKHLQDVDTWKSRCPISSCNKLFTSKHSMKTHMVKRHKVGQDLLAQLEAANSLTPSSELTSQRQNDLSDAEIVSLFSDVPDSTSAALLDTALVNSGILTIDVASVSSTLAGHLPANNNNSVGQAVDPPSLMATSDPPQSLDTSLFFGTAATGFQQSSLNMDEVSSVSVGPLGSLDSLAMKNSSPEPQALTPSSKLTVDTDALTPSSTLCENSVSELLTPTKAEWNVHPDSDFFGQEGETQFGFPNAAGNHGSQKETDLITVTGSSFLV

SEQ ID NO: 102288 - protein, 409 aa, Homo sapiens
  Payload ID: 20387
  Gene Name: zinc finger, ZZ-type containing 3
  Uniprot ID: Q8IYH5
  ENSP ID: ENSP00000359834
MIDLWLYSYQRLLQTIAVLEAQRSQAVQDLESLGRHQREALKNPIGFVEKLQKKADIGLPYPQRVVQLPEIVWDQYTHSLGNFEREFKNRKRHTRRVKLVFDKVGLPARPKSPLDPKKDGESLSYSMLPLSDGPEGSSSRPQMIRGRLCDDTKPETFNQLWTVEEQKKLEQLLIKYPPEEVESRRWQKIADELGNRTAKQVASRVQKYFIKLTKAGIPVPGRTPNLYIYSKKSSTSRRQHPLNKHLFKPSTFMTSHEPPVYMDEDDDRSCFHSHMNTAVEDASDDESIPIMYRNLPEYKELLQFKKLKKQKLQQMQAESGFVQHVGFKCDNCGIEPIQGVRWHCQDCPPEMSLDFCDSCSDCLHETDIHKEDHQLEPIYRSETFLDRDYCVSQGTSYNYLDPNYFPANR

SEQ ID NO: 102289 - protein, 903 aa, Homo sapiens
  Payload ID: 20387
  Gene Name: zinc finger, ZZ-type containing 3
  Uniprot ID: Q8IYH5
  ENSP ID: ENSP00000359837
MAASRSTRVTRSTVGLNGLDESFCGRTLRNRSIAHPEEISSNSQVRSRSPKKRPEPVPIQKGNNNGRTTDLKQQSTRESWVSPRKRGLSSSEKDNIERQAIENCERRQTEPVSPVLKRIKRCLRSEAPNSSEEDSPIKSDKESVEQRSTVVDNDADFQGTKRACRCLILDDCEKREIKKVNVSEEGPLNSAVVEEITGYLAVNGVDDSDSAVINCDDCQPDGNTKQNSIGSYVLQEKSVAENGDTDTQTSMFLDSRKEDSYIDHKVPCTDSQVQVKLEDHKIVTACLPVEHVNQLTTEPATGPFSETQSSLRDSEEEVDVVGDSSASKEQCKENTNNELDTSLESMPASGEPEPSPVLDCVSAQMMSLSEPQEHRYTLRTSPRRAAPTRGSPTKNSSPYRENGQFEENNLSPNETNATVSDNVSQSPTNPGEISQNEKGICCDSQNNGSEGVSKPPSEARLNIGHLPSAKESASQHITEEEDDDPDVYYFESDHVALKHNKDYQRLLQTIAVLEAQRSQAVQDLESLGRHQREALKNPIGFVEKLQKKADIGLPYPQRVVQLPEIVWDQYTHSLGNFEREFKNRKRHTRRVKLVFDKVGLPARPKSPLDPKKDGESLSYSMLPLSDGPEGSSSRPQMIRGRLCDDTKPETFNQLWTVEEQKKLEQLLIKYPPEEVESRRWQKIADELGNRTAKQVASRVQKYFIKLTKAGIPVPGRTPNLYIYSKKSSTSRRQHPLNKHLFKPSTFMTSHEPPVYMDEDDDRSCFHSHMNTAVEDASDDESIPIMYRNLPEYKELLQFKKLKKQKLQQMQAESGFVQHVGFKCDNCGIEPIQGVRWHCQDCPPEMSLDFCDSCSDCLHETDIHKEDHQLEPIYRSETFLDRDYCVSQGTSYNYLDPNYFPANR

SEQ ID NO: 102290 - protein, 36 aa, Homo sapiens
  Payload ID: 20387
  Gene Name: zinc finger, ZZ-type containing 3
  ENSP ID: ENSP00000392408
MAASRSTRVTRSTVGLNGLDESFCGRTLRNRSIAHP

SEQ ID NO: 102291 - protein, 57 aa, Homo sapiens
  Payload ID: 20387
  Gene Name: zinc finger, ZZ-type containing 3
  ENSP ID: ENSP00000393779
MAASRSTRVTRSTVGLNGLDESFCGRTLRNRSIAHPEEISSNSQVRSRSPKKRPEPV

SEQ ID NO: 102292 - protein, 2961 aa, Homo sapiens
  Payload ID: 20388
  Gene Name: zinc finger, ZZ-type with EF-hand domain 1
  Uniprot ID: O43149
  ENSP ID: ENSP00000371051
MGNAPSHSSEDEAAAAGGEGWGPHQDWAAVSGTTPGPGVAAPALPPAAALLEPARLREAAAALLPTPPCESLVSRHRGALFRWLEERLGRGEESVTLEQFRELLEARGAGCSSEQFEEAFAQFDAEGDGTVDAENMLEALKNSSGANLQGELSHIIRQLQACSLVPGFTDIFSESKEGLDIHSSMILRFLHRNRLSSAVMPYPMLEHCNNMCTMRSSVLKESLDQLVQKEKESPGDLTRSPEMDKLKSVAKCYAYIETSSNSADIDKMTNGETSSYWQSDGSACSHWIRLKMKPDVVLRHLSIAVAATDQSYMPQQVTVAVGRNASDLQEVRDVHIPSNVTGYVTLLENANVSQLYVQINIKRCLSDGCDTRIHGLRAVGFQRVKKSGVSVSDASAIWYWSLLTSLVTASMETNPAFVQTVLHNTQKALRHMPPLSLSPGSTDFSTFLSPNVLEEVDSFLIRITSCCSTPEVELTLLAFALARGSVAKVMSSLCTITDHLDTQYDASSLILSMASVRQNLLLKYGKPLQLTLQACDVKGKEDKSGPENLLVEPWTRDGFLTETGKTRASTIFSTGTESAFQVTQIRIMVRRGGIGAQCGLVFAYNSSSDKFCAEEHFKRFEKYDKWKLQELRQFVKSRIGCSSDDLGEDDPIGWFELEEEWDEADVKLQQCRVAKYLMVKFLCTRQESAERLGVQGLTISGYLRPARAEAEQSVTCAHCRKDTEESVCGATLLLRTLQFIQQLAHDLVQQKESGLKYKSFLDFAGLDLQIFWNFYSKLKQNPREECVSAQTLLLQLLQSCFSVLQGDVLAASEEEKAPIQSPKGVEAAKELYTHLCDVVDKVDGDSVPMEILKQEVRNTLLNGAAIFFPNRQTRRNHLFTMMNVTEQEHKQSLQLTFRSLCTYFSDKDPGGLLLLPEKNDLAKMNISEVLAVMDTLVSVAARECELLMLSGAPGEVGSVLFSLFWSVQGSLLSWCYLQLKSTDSGAKDLAVDLIEKYVGQFLASMRAILESLFSQYSGKTIVERLCNSVFSMAARQLVIFLLDFCTLDIPHCVLLREFSVLTELLKKLCSGPEGGLRKLDVETWQQEQPVVLHTWTKESAHNYENNCHEVSVFVSPGATYFEVEFDDRCETEKRYDYLEFTDARGRKTRYDTKVGTDKWPKKVTFKAGPRLQFLFHSDSSHNEWGYKFTVTACGLPDVAVSWGLDLQLLVSRLMGRLASQCMALKSVRQLGSNMVVPQAKMALVLSSPLWKPVFRHQVCPELELEASWPTHPHRNSKEVKNIPDDPCRHFLLDFAQSEPAQNFCGPYSELFKGFIQACRKQAPKTDIVAGSTIDQAVNATFAALVYRTPDLYEKLQKYVNSGGKIALSEEFAQVYSLADGIRIWMLEMKQKSLMSLGNEAEEKHSSEATEVNPESLAKECIEKSLLLLKFLPTGISSKESCEKLETADETSHLQPLNKRQRTSSVVEEHFQASVSPTEAAPPATGDQSPGLGTQPKLPSSSGLPAADVSPATAEEPLSPSTPTRRPPFTRGRLRLLSFRSMEEARLVPTVKEKYPVLKDVMDFIKDQSLSHRSVVKVLSLRKAQAQSILEVLKITQHCAESLGQPHCFHPPFILFLLELLTCQKDFTNYFGHLEGCGADLHKEIRDTYYQLVLFLVKAVKGFSSLNDRSLLPALSCVQTALLHLLDMGWEPNDLAFFVDIQLPDLLMKMSQENISVHDSVISQWSEEDELADAKQNSEWMDECQDGMFEAWYEKIAQEDPEKQRKMHMFIARYCDLLNVDISCDGCDEIAPWHRYRCLQCSDMDLCKTCFLGGVKPEGHGDDHEMVNMEFTCDHCQGLIIGRRMNCNVCDDFDLCYGCYAAKKYSYGHLPTHSITAHPMVTIRISDRQRLIQPYIHNYSWLLFAALALYSAHLASAEDVDGEKLDPQTRSSATTLRSQCMQLVGDCLMKAHQGKGLKALALLGVLPDGDSSLEDQALPVTVPTGASEEQLEKKAVQGAELSEAGNGKRAVHEEIRPVDFKQRNKADKGVSLSKDPSCQTQISDSPADASPPTGLPDAEDSEVSSQKPIEEKAVTPSPEQVFAECSQKRILGLLAAMLPPLKSGPTVPLIDLEHVLPLMFQVVISNAGHLNETYHLTLGLLGQLIIRLLPAEVDAAVIKVLSAKHNLFAAGDSSIVPDGWKTTHLLFSLGAVCLDSRVGLDWACSMAEILRSLNSAPLWRDVIATFTDHCIKQLPFQLKHTNIFTLLVLVGFPQVLCVGTRCVYMDNANEPHNVIILKHFTEKNRAVIVDVKTRKRKTVKDYQLVQKGGGQECGDSRAQLSQYSQHFAFIASHLLQSSMDSHCPEAVEATWVLSLALKGLYKTLKAHGFEEIRATFLQTDLLKLLVKKCSKGTGFSKTWLLRDLEILSIMLYSSKKEINALAEHGDLELDERGDREEEVERPVSSPGDPEQKKLDPLEGLDEPTRICFLMAHDALNAPLHILRAIYELQMKKTDYFFLEVQKRFDGDELTTDERIRSLAQRWQPSKSLRLEEQSAKAVDTDMIILPCLSRPARCDQATAESNPVTQKLISSTESELQQSYAKQRRSKSAALLHKELNCKSKRAVRDYLFRVNEATAVLYARHVLASLLAEWPSHVPVSEDILELSGPAHMTYILDMFMQLEEKHEWEKILQKVLQGCREDMLGTMALAACQFMEEPGMEVQVRESKHPYNNNTNFEDKVHIPGAIYLSIKFDSQCNTEEGCDELAMSSSSDFQQDRHSFSGSQQKWKDFELPGDTLYYRFTSDMSNTEWGYRFTVTAGHLGRFQTGFEILKQMLSEERVVPHLPLAKIWEWLVGVACRQTGHQRLKAIHLLLRIVRCCGHSDLCDLALLKPLWQLFTHMEYGLFEDVTQPGILLPLHRALTELFFVTENRAQELGVLQDYLLALTTDDHLLRCAAQALQNIAAISLAINYPNKATRLWNVEC

SEQ ID NO: 102293 - protein, 812 aa, Homo sapiens
  Payload ID: 20388
  Gene Name: zinc finger, ZZ-type with EF-hand domain 1
  ENSP ID: ENSP00000458554
  MOD_RES (1)..(1): Any amino acid
XLFLLELLTCQKDFTNYFGHLEGCGADLHKEIRDTYYQLVLFLVKAVKGFSSLNDRSLLPALSCVQTALLHLLDMGWEPNDLAFFVDIQLPDLLMKMSQENISVHDSVISQWSEEDELADAKQNSEWMDECQDGMFEAWYEKIAQEDPEKQRKMHMFIARYCDLLNVDISCDGCDEIAPWHRYRCLQCSDMDLCKTCFLGGVKPEGHGDDHEMVNMEFTCDHCQGLIIGRRMNCNVCDDFDLCYGCYAAKKYSYGHLPTHSITAHPMVTIRISDRQRLIQPYIHNYSWLLFAALALYSAHLASAEDVDGEKLDPQTRSSATTLRSQCMQLVGDCLMKAHQGKGLKALALLGVLPDGDSSLEDQALPVTVPTGASEEQLEKKAVQGAELSEAGNGKRAVHEEIRPVDFKQRNKADKGVSLSKDPSCQTQISDSPADASPPTGLPDAEDSEVSSQKPIEEKAVTPSPEQVFAECSQKRILGLLAAMLPPLKSGPTVPLIDLEHVLPLMFQVVISNAGHLNETYHLTLGLLGQLIIRLLPAEVDAAVIKVLSAKHNLFAAGDSSIVPDGWKTTHLLFSLGAVCLDSRVGLDWACSMAEILRSLNSAPLWRDVIATFTDHCIKQLPFQLKHTNIFTLLVLVGFPQVLCVGTRCVYMDNANEPHNVIILKHFTEKNRAVIVDVKTRKRKTVKDYQLVQKGGGQECGDSRAQLSQYSQHFAFIASHLLQSSMDSHCPEAVEATWVLSLALKGLYKTLKAHGFEEIRATFLQTDLLKLLVKKCSKGTGFSKTWLLRDLEVRDERDSCSSFLVQMCWPRS

SEQ ID NO: 102294 - protein, 219 aa, Homo sapiens
  Payload ID: 20388
  Gene Name: zinc finger, ZZ-type with EF-hand domain 1
  ENSP ID: ENSP00000459023
  MOD_RES (1)..(1): Any amino acid
XPLSPSTPTRRPPFTRGRLRLLSFRSMEEARLVPTVKEKYPVLKDVMDFIKDQSLSHRSVVKVLSLRKAQAQSILEVLKITQHCAESLGQPHCFHPPFILFLLELLTCQKDFTNYFGHLEGCGADLHKEIRDTYYQLVLFLVKAVKGFSSLNDRSLLPALSCVQTALLHLLDMGWEPNDLAFFVDIQLPDLLMKMSQENISVHDSVIRCTCSLLATVTC

SEQ ID NO: 102295 - protein, 66 aa, Homo sapiens
  Payload ID: 20388
  Gene Name: zinc finger, ZZ-type with EF-hand domain 1
  ENSP ID: ENSP00000459796
  MOD_RES (1)..(1): Any amino acid
XASLLAEWPSHVPVSEDILELSGPAHMTYILDMFMQLEEKHEWEKANPPAWLGTPSRTRTLYDWFS

SEQ ID NO: 102296 - protein, 148 aa, Homo sapiens
  Payload ID: 20388
  Gene Name: zinc finger, ZZ-type with EF-hand domain 1
  ENSP ID: ENSP00000460633
RYDYLEFTDARGRKTRYDTKVGTDKWPKKVTFKAGPRLQFLFHSDSSHNEWGYKFTVTACGLPDVAVSWGLDLQLLVSRLMGRLASQCMALKSVRQLGSNMVVPQAKMALVLSSPLWKPVFRHQVCPELELEASWPTHPHRNSKEGEV

SEQ ID NO: 102297 - protein, 873 aa, Homo sapiens
  Payload ID: 20389
  Gene Name: zinc fingers and homeoboxes 1
  Uniprot ID: Q9UKY1
  ENSP ID: ENSP00000297857
MASRRKSTTPCMVLASEQDPDLELISDLDEGPPVLTPVENTRAESISSDEEVHESVDSDNQQNKKVEGGYECKYCTFQTPDLNMFTFHVDSEHPNVVLNSSYVCVECNFLTKRYDALSEHNLKYHPGEENFKLTMVKRNNQTIFEQTINDLTFDGSFVKEENAEQAESTEVSSSGISISKTPIMKMMKNKVENKRIAVHHNSVEDVPEEKENEIKPDREEIVENPSSSASESNTSTSIVNRIHPSTASTVVTPAAVLPGLAQVITAVSAQQNSNLIPKVLIPVNSIPTYNAALDNNPLLLNTYNKFPYPTMSEITVLSAQAKYTEEQIKIWFSAQRLKHGVSWTPEEVEEARRKQFNGTVHTVPQTITVIPTHISTGSNGLPSILQTCQIVGQPGLVLTQVAGTNTLPVTAPIALTVAGVPSQNNIQKSQVPAAQPTAETKPATAAVPTSQSVKHETALVNPDSFGIRAKKTKEQLAELKVSYLKNQFPHDSEIIRLMKITGLTKGEIKKWFSDTRYNQRNSKSNQCLHLNNDSSTTIIIDSSDETTESPTVGTAQPKQSWNPFPDFTPQKFKEKTAEQLRVLQASFLNSSVLTDEELNRLRAQTKLTRREIDAWFTEKKKSKALKEEKMEIDESNAGSSKEEAGETSPADESGAPKSGSTGKICKKTPEQLHMLKSAFVRTQWPSPEEYDKLAKESGLARTDIVSWFGDTRYAWKNGNLKWYYYYQSANSSSMNGLSSLRKRGRGRPKGRGRGRPRGRPRGSKRINNWDRGPSLIKFKTGTAILKDYYLKHKFLNEQDLDELVNKSHMGYEQVREWFAERQRRSELGIELFEENEEEDEVIDDQEEDEEETDDSDTWEPPRHVKRKLSKSDD

SEQ ID NO: 102298 - protein, 873 aa, Homo sapiens; identical to SEQ ID NO: 102297
  Payload ID: 20389
  Gene Name: zinc fingers and homeoboxes 1
  Uniprot ID: Q9UKY1
  ENSP ID: ENSP00000378938

SEQ ID NO: 102299 - protein, 873 aa, Homo sapiens; identical to SEQ ID NO: 102297
  Payload ID: 20389
  Gene Name: zinc fingers and homeoboxes 1
  Uniprot ID: Q9UKY1
  ENSP ID: ENSP00000428821

SEQ ID NO: 102300 - protein, 39 aa, Homo sapiens
  Payload ID: 20389
  Gene Name: zinc fingers and homeoboxes 1
  ENSP ID: ENSP00000475324
  MOD_RES (1)..(1): Any amino acid
XEEEDEVIDDQEEDEEETDDSDTWEPPRHVKRKLSKSDD

SEQ ID NO: 102301 - protein, 837 aa, Homo sapiens
  Payload ID: 20390
  Gene Name: zinc fingers and homeoboxes 2
  Uniprot ID: Q9Y6X8
  ENSP ID: ENSP00000314709
MASKRKSTTPCMVRTSQVVEQDVPEEVDRAKEKGIGTPQPDVAKDSWAAELENSSKENEVIEVKSMGESQSKKLQGGYECKYCPYSTQNLNEFTEHVDMQHPNVILNPLYVCAECNFTTKKYDSLSDHNSKFHPGEANFKLKLIKRNNQTVLEQSIETTNHVVSITTSGPGTGDSDSGISVSKTPIMKPGKPKADAKKVPKKPEEITPENHVEGTARLVTDTAEILSRLGGVELLQDTLGHVMPSVQLPPNINLVPKVPVPLNTTKYNSALDTNATMINSFNKFPYPTQAELSWLTAASKHPEEHIRIWFATQRLKHGISWSPEEVEEARKKMFNGTIQSVPPTITVLPAQLAPTKVTQPILQTALPCQILGQTSLVLTQVTSGSTTVSCSPITLAVAGVTNHGQKRPLVTPQAAPEPKRPHIAQVPEPPPKVANPPLTPASDRKKTKEQIAHLKASFLQSQFPDDAEVYRLIEVTGLARSEIKKWFSDHRYRCQRGIVHITSESLAKDQLAIAASRHGRTYHAYPDFAPQKFKEKTQGQVKILEDSFLKSSFPTQAELDRLRVETKLSRREIDSWFSERRKLRDSMEQAVLDSMGSGKKGQDVGAPNGALSRLDQLSGAQLTSSLPSPSPAIAKSQEQVHLLRSTFARTQWPTPQEYDQLAAKTGLVRTEIVRWFKENRCLLKTGTVKWMEQYQHQPMADDHGYDAVARKATKPMAESPKNGGDVVPQYYKDPKKLCEEDLEKLVTRVKVGSEPAKDCLPAKPSEATSDRSEGSSRDGQGSDENEESSVVDYVEVTVGEEDAISDRSDSWSQAAAEGVSELAESDSDCVPAEAGQA

SEQ ID NO: 102302 - protein, 166 aa, Homo sapiens
  Payload ID: 20390
  Gene Name: zinc fingers and homeoboxes 2
  ENSP ID: ENSP00000452720
MASKRKSTTPCMVRTSQVVEQDVPEEVDRAKEKGIGTPQPDVAKDSWAAELENSSKENEVIEVKSMGESQSKKLQGGYECKYCPYSTQNLNEFTEHVDMQHPNVILNPLYVCAECNFTTKKYDSLSDHNSKFHPGEANFKLKLIKRNNQTVLEQSIETTNHVVSIT

SEQ ID NO: 102303 - protein, 956 aa, Homo sapiens
  Payload ID: 20391
  Gene Name: zinc fingers and homeoboxes 3
  Uniprot ID: Q9H4I2
  ENSP ID: ENSP00000312222
MASKRKSTTPCMIPVKTVVLQDASMEAQPAETLPEGPQQDLPPEASAASSEAAQNPSSTDGSTLANGHRSTLDGYLYSCKYCDFRSHDMTQFVGHMNSEHTDFNKDPTFVCSGCSFLAKTPEGLSLHNATCHSGEASFVWNVAKPDNHVVVEQSIPESTSTPDLAGEPSAEGADGQAEIIITKTPIMKIMKGKAEAKKIHTLKENVPSQPVGEALPKLSTGEMEVREGDHSFINGAVPVSQASASSAKNPHAANGPLIGTVPVLPAGIAQFLSLQQQPPVHAQHHVHQPLPTAKALPKVMIPLSSIPTYNAAMDSNSFLKNSFHKFPYPTKAELCYLTVVTKYPEEQLKIWFTAQRLKQGISWSPEEIEDARKKMFNTVIQSVPQPTITVLNTPLVASAGNVQHLIQAALPGHVVGQPEGTGGGLLVTQPLMANGLQATSSPLPLTVTSVPKQPGVAPINTVCSNTTSAVKVVNAAQSLLTACPSITSQAFLDASIYKNKKSHEQLSALKGSFCRNQFPGQSEVEHLTKVTGLSTREVRKWFSDRRYHCRNLKGSRAMIPGDHSSIIIDSVPEVSFSPSSKVPEVTCIPTTATLATHPSAKRQSWHQTPDFTPTKYKERAPEQLRALESSFAQNPLPLDEELDRLRSETKMTRREIDSWFSERRKKVNAEETKKAEENASQEEEEAAEDEGGEEDLASELRVSGENGSLEMPSSHILAERKVSPIKINLKNLRVTEANGRNEIPGLGACDPEDDESNKLAEQLPGKVSCKKTAQQRHLLRQLFVQTQWPSNQDYDSIMAQTGLPRPEVVRWFGDSRYALKNGQLKWYEDYKRGNFPPGLLVIAPGNRELLQDYYMTHKMLYEEDLQNLCDKTQMSSQQVKQWFAEKMGEETRAVADTGSEDQGPGTGELTAVHKGMGDTYSEVSENSESWEPRVPEASSEPFDTSSPQAGRQLETD

SEQ ID NO: 102304 - protein, 96 aa, Homo sapiens
  Payload ID: 20391
  Gene Name: zinc fingers and homeoboxes 3
  ENSP ID: ENSP00000362358
MASKRKSTTPCMIPVKTVVLQDASMEAQPAETLPEGPQQDLPPEASAASSEAAQNPSSTDGSTLANGHRSTLDGYLYSCKYCDFRSHDMTQFVGHM

SEQ ID NO: 102305 - protein, 118 aa, Homo sapiens
  Payload ID: 20391
  Gene Name: zinc fingers and homeoboxes 3
  ENSP ID: ENSP00000399433
MASKRKSTTPCMIPVKTVVLQDASMEAQPAETLPEGPQQDLPPEASAASSEAAQNPSSTDGSTLANGHRSTLDGYLYSCKYCDFRSHDMTQFVGHMNSEHTDFNKDPTFVCSGCSFLA

SEQ ID NO: 102306 - protein, 46 aa, Homo sapiens
  Payload ID: 20391
  Gene Name: zinc fingers and homeoboxes 3
  ENSP ID: ENSP00000400441
MASKRKSTTPCMIPVKTVVLQDASMEAQPAETLPEGPQQDLPPEAS

SEQ ID NO: 102307 - protein, 47 aa, Homo sapiens
  Payload ID: 20391
  Gene Name: zinc fingers and homeoboxes 3
  ENSP ID: ENSP00000401852
MASKRKSTTPCMIPVKTVVLQDASMEAQPAETLPEGPQQDLPPEASA

SEQ ID NO: 102308 - protein, 89 aa, Homo sapiens
  Payload ID: 20391
  Gene Name: zinc fingers and homeoboxes 3
  ENSP ID: ENSP00000403048
MASKRKSTTPCMIPVKTVVLQDASMEAQPAETLPEGPQQDLPPEASAASSEAAQNPSSTDGSTLANGHRSTLDGYLYSCKYCDFRSHDM

SEQ ID NO: 102309 - protein, 678 aa, Homo sapiens
  Payload ID: 20391
  Gene Name: zinc fingers and homeoboxes 3
  ENSP ID: ENSP00000405421
  MOD_RES (1)..(1): Any amino acid
XAKALPKVMIPLSSIPTYNAAMDSNSFLKNSFHKFPYPTKAELCYLTVVTKYPEEQLKIWFTAQRLKQGISWSPEEIEDARKKMFNTVIQSVPQPTITVLNTPLVASAGNVQHLIQAALPGHVVGQPEGTGGGLLVTQPLMANGLQATSSPLPLTVTSVPKQPGVAPINTVCSNTTSAVKVVNAAQSLLTACPSITSQAFLDASIYKNKKSHEQLSALKGSFCRNQFPGQSEVEHLTKVTGLSTREVRKWFSDRRYHCRNLKGSRAMIPGDHSSIIIDSVPEVSFSPSSKVPEVTCIPTTATLATHPSAKRQSWHQTPDFTPTKYKERAPEQLRALESSFAQNPLPLDEELDRLRSETKMTRREIDSWFSERRKKVNAEETKKAEENASQEEEEAAEDEGGEEDLASELRVSGENGSLEMPSSHILAERKVSPIKINLKNLRVTEANGRNEIPGLGACDPEDDESNKLAEQLPGKVSCKKTAQQRHLLRQLFVQTQWPSNQDYDSIMAQTGLPRPEVVRWFGDSRYALKNGQLKWYEDYKRGNFPPGLLVIAPGNRELLQDYYMTHKMLYEEDLQNLCDKTQMSSQQVKQWFAEKMGEETRAVADTGSEDQGPGTGELTAVHKGMGDTYSEVSENSESWEPRVPEASSEPFDTSSPQAGRQLGSWSLSSQPLPSLLTL

SEQ ID NO: 102310 - protein, 956 aa, Homo sapiens; identical to SEQ ID NO: 102303
  Payload ID: 20391
  Gene Name: zinc fingers and homeoboxes 3
  Uniprot ID: Q9H4I2
  ENSP ID: ENSP00000415498

SEQ ID NO: 102311 - protein, 969 aa, Homo sapiens
  Payload ID: 20391
  Gene Name: zinc fingers and homeoboxes 3
  Uniprot ID: Q9H4I2
  ENSP ID: ENSP00000443783
MASKRKSTTPCMIPVKTVVLQDASMEAQPAETLPEGPQQDLPPEASAASSEAAQNPSSTDGSTLANGHRSTLDGYLYSCKYCDFRSHDMTQFVGHMNSEHTDFNKDPTFVCSGCSFLAKTPEGLSLHNATCHSGEASFVWNVAKPDNHVVVEQSIPESTSTPDLAGEPSAEGADGQAEIIITKTPIMKIMKGKAEAKKIHTLKENVPSQPVGEALPKLSTGEMEVREGDHSFINGAVPVSQASASSAKNPHAANGPLIGTVPVLPAGIAQFLSLQQQPPVHAQHHVHQPLPTAKALPKVMIPLSSIPTYNAAMDSNSFLKNSFHKFPYPTKAELCYLTVVTKYPEEQLKIWFTAQRLKQGISWSPEEIEDARKKMFNTVIQSVPQPTITVLNTPLVASAGNVQHLIQAALPGHVVGQPEGTGGGLLVTQPLMANGLQATSSPLPLTVTSVPKQPGVAPINTVCSNTTSAVKVVNAAQSLLTACPSITSQAFLDASIYKNKKSHEQLSALKGSFCRNQFPGQSEVEHLTKVTGLSTREVRKWFSDRRYHCRNLKGSRAMIPGDHSSIIIDSVPEVSFSPSSKVPEVTCIPTTATLATHPSAKRQSWHQTPDFTPTKYKERAPEQLRALESSFAQNPLPLDEELDRLRSETKMTRREIDSWFSERRKKVNAEETKKAEENASQEEEEAAEDEGGEEDLASELRVSGENGSLEMPSSHILAERKVSPIKINLKNLRVTEANGRNEIPGLGACDPEDDESNKLAEQLPGKVSCKKTAQQRHLLRQLFVQTQWPSNQDYDSIMAQTGLPRPEVVRWFGDSRYALKNGQLKWYEDYKRGNFPPGLLVIAPGNRELLQDYYMTHKMLYEEDLQNLCDKTQMSSQQKQTEFDLINVKDWPVWETACHVEEPNPTLCCHMPFPCPAAGHLGELPESSQTAQSLPLPSACPPPSKQQARWGSHQFFLPQCRTFPLPSNG

SEQ ID NO: 102312 - protein, 956 aa, Homo sapiens; identical to SEQ ID NO: 102303
  Payload ID: 20391
  Gene Name: zinc fingers and homeoboxes 3
  Uniprot ID: Q9H4I2
  ENSP ID: ENSP00000452965

SEQ ID NO: 102313 - protein, 127 aa, Homo sapiens
  Payload ID: 20391
  Gene Name: zinc fingers and homeoboxes 3
  ENSP ID: ENSP00000453310
VIAPGNRELLQDYYMTHKMLYEEDLQNLCDKTQMSSQQTEFDLINVKDWPVWETACHVEEPNPTLCCHMPFPCPAAGHLGELPESSQTAQSLPLPSACPPPSKQQARWGSHQFFLPQCRTFPLPSNG

SEQ ID NO: 102314 - protein, 315 aa, Homo sapiens
  Payload ID: 20391
  Gene Name: zinc fingers and homeoboxes 3
  ENSP ID: ENSP00000453647
MASKRKSTTPCMIPVKTVVLQDASMEAQPAETLPEGPQQDLPPEASAASSEAAQNPSSTDGSTLANGHRSTLDGYLYSCKYCDFRSHDMTQFVGHMNSEHTDFNKDPTFVCSGCSFLAKTPEGLSLHNATCHSGEASFVWNVAKPDNHVVVEQSIPESTSTPDLAGEPSAEGADGQAEIIITKTPIMKIMKGKAEAKKIHTLKENVPSQPVGEALPKLSTGEMEKQTEFDLINVKDWPVWETACHVEEPNPTLCCHMPFPCPAAGHLGELPESSQTAQSLPLPSACPPPSKQQARWGSHQFFLPQCRTFPLPSNG

SEQ ID NO: 102315 - protein, 956 aa, Homo sapiens; identical to SEQ ID NO: 102303
  Payload ID: 20391
  Gene Name: zinc fingers and homeoboxes 3
  Uniprot ID: Q9H4I2
  ENSP ID: ENSP00000454006

SEQ ID NO: 102316 - protein, 315 aa, Homo sapiens; identical to SEQ ID NO: 102314
  Payload ID: 20391
  Gene Name: zinc fingers and homeoboxes 3
  ENSP ID: ENSP00000454208

SEQ ID NO: 102317 - protein, 475 aa, Homo sapiens
  Payload ID: 20392
  Gene Name: zinc metallopeptidase STE24
  Uniprot ID: O75844
  ENSP ID: ENSP00000361845
MGMWASLDALWEMPAEKRIFGAVLLFSWTVYLWETFLAQRQRRIYKTTTHVPPELGQIMDSETFEKSRLYQLDKSTFSFWSGLYSETEGTLILLFGGIPYLWRLSGRFCGYAGFGPEYEITQSLVFLLLATLFSALTGLPWSLYNTFVIEEKHGFNQQTLGFFMKDAIKKFVVTQCILLPVSSLLLYIIKIGGDYFFIYAWLFTLVVSLVLVTIYADYIAPLFDKFTPLPEGKLKEEIEVMAKSIDFPLTKVYVVEGSKRSSHSNAYFYGFFKNKRIVLFDTLLEEYSVLNKDIQEDSGMEPRNEEEGNSEEIKAKVKNKKQGCKNEEVLAVLGHELGHWKLGHTVKNIIISQMNSFLCFFLFAVLIGRKELFAAFGFYDSQPTLIGLLIIFQFIFSPYNEVLSFCLTVLSRRFEFQADAFAKKLGKAKDLYSALIKLNKDNLGFPVSDWLFSMWHYSHPPLLERLQALKTMKQH

SEQ ID NO: 102318 - protein, 126 aa, Homo sapiens
  Payload ID: 20393
  Gene Name: zinc ribbon domain containing 1
  Uniprot ID: Q9P1U0
  ENSP ID: ENSP00000331111
MSVMDLANTCSSFQSDLDFCSDCGSVLPLPGAQDTVTCIRCGFNINVRDFEGKVVKTSVVFHQLGTAMPMSVEEGPECQGPVVDRRCPRCGHEGMAYHTRQMRSADEGQTVFYTCTNCKFQEKEDS

SEQ ID NO: 102319 - protein, 126 aa, Homo sapiens; identical to SEQ ID NO: 102318
  Payload ID: 20393
  Gene Name: zinc ribbon domain containing 1
  Uniprot ID: Q9P1U0
  ENSP ID: ENSP00000352333

SEQ ID NO: 102320 - protein, 126 aa, Homo sapiens; identical to SEQ ID NO: 102318
  Payload ID: 20393
  Gene Name: zinc ribbon domain containing 1
  Uniprot ID: Q9P1U0
  ENSP ID: ENSP00000365978

SEQ ID NO: 102321 - protein, 126 aa, Homo sapiens; identical to SEQ ID NO: 102318
  Payload ID: 20393
  Gene Name: zinc ribbon domain containing 1
  Uniprot ID: Q9P1U0
  ENSP ID: ENSP00000365981

SEQ ID NO: 102322 - protein, 126 aa, Homo sapiens; identical to SEQ ID NO: 102318
  Payload ID: 20393
  Gene Name: zinc ribbon domain containing 1
  Uniprot ID: Q9P1U0
  ENSP ID: ENSP00000373108

SEQ ID NO: 102323 - protein, 126 aa, Homo sapiens; identical to SEQ ID NO: 102318
  Payload ID: 20393
  Gene Name: zinc ribbon domain containing 1
  Uniprot ID: Q9P1U0
  ENSP ID: ENSP00000383500

SEQ ID NO: 102324 - protein, 126 aa, Homo sapiens; identical to SEQ ID NO: 102318
  Payload ID: 20393
  Gene Name: zinc ribbon domain containing 1
  Uniprot ID: Q9P1U0
  ENSP ID: ENSP00000383501

SEQ ID NO: 102325 - protein, 126 aa, Homo sapiens; identical to SEQ ID NO: 102318
  Payload ID: 20393
  Gene Name: zinc ribbon domain containing 1
  Uniprot ID: Q9P1U0
  ENSP ID: ENSP00000383503

SEQ ID NO: 102326 - protein, 126 aa, Homo sapiens; identical to SEQ ID NO: 102318
  Payload ID: 20393
  Gene Name: zinc ribbon domain containing 1
  Uniprot ID: Q9P1U0
  ENSP ID: ENSP00000387914

SEQ ID NO: 102327 - protein, 126 aa, Homo sapiens; identical to SEQ ID NO: 102318
  Payload ID: 20393
  Gene Name: zinc ribbon domain containing 1
  Uniprot ID: Q9P1U0
  ENSP ID: ENSP00000391809

SEQ ID NO: 102328 - protein, 126 aa, Homo sapiens; identical to SEQ ID NO: 102318
  Payload ID: 20393
  Gene Name: zinc ribbon domain containing 1
  Uniprot ID: Q9P1U0
  ENSP ID: ENSP00000393236

SEQ ID NO: 102329 - protein, 126 aa, Homo sapiens; identical to SEQ ID NO: 102318
  Payload ID: 20393
  Gene Name: zinc ribbon domain containing 1
  Uniprot ID: Q9P1U0
  ENSP ID: ENSP00000394779

SEQ ID NO: 102330 - protein, 126 aa, Homo sapiens; identical to SEQ ID NO: 102318
  Payload ID: 20393
  Gene Name: zinc ribbon domain containing 1
  Uniprot ID: Q9P1U0
  ENSP ID: ENSP00000395065

SEQ ID NO: 102331 - protein, 126 aa, Homo sapiens; identical to SEQ ID NO: 102318
  Payload ID: 20393
  Gene Name: zinc ribbon domain containing 1
  Uniprot ID: Q9P1U0
  ENSP ID: ENSP00000395397

SEQ ID NO: 102332 - protein, 126 aa, Homo sapiens; identical to SEQ ID NO: 102318
  Payload ID: 20393
  Gene Name: zinc ribbon domain containing 1
  Uniprot ID: Q9P1U0
  ENSP ID: ENSP00000396661

SEQ ID NO: 102333 - protein, 126 aa, Homo sapiens; identical to SEQ ID NO: 102318
  Payload ID: 20393
  Gene Name: zinc ribbon domain containing 1
  Uniprot ID: Q9P1U0
  ENSP ID: ENSP00000396922

SEQ ID NO: 102334 - protein, 126 aa, Homo sapiens; identical to SEQ ID NO: 102318
  Payload ID: 20393
  Gene Name: zinc ribbon domain containing 1
  Uniprot ID: Q9P1U0
  ENSP ID: ENSP00000397636

SEQ ID NO: 102335 - protein, 126 aa, Homo sapiens; identical to SEQ ID NO: 102318
  Payload ID: 20393
  Gene Name: zinc ribbon domain containing 1
  Uniprot ID: Q9P1U0
  ENSP ID: ENSP00000399302

SEQ ID NO: 102336 - protein, 126 aa, Homo sapiens; identical to SEQ ID NO: 102318
  Payload ID: 20393
  Gene Name: zinc ribbon domain containing 1
  Uniprot ID: Q9P1U0
  ENSP ID: ENSP00000399966

SEQ ID NO: 102337 - protein, 126 aa, Homo sapiens; identical to SEQ ID NO: 102318
  Payload ID: 20393
  Gene Name: zinc ribbon domain containing 1
  Uniprot ID: Q9P1U0
  ENSP ID: ENSP00000402198

SEQ ID NO: 102338 - protein, 126 aa, Homo sapiens; identical to SEQ ID NO: 102318
  Payload ID: 20393
  Gene Name: zinc ribbon domain containing 1
  Uniprot ID: Q9P1U0
  ENSP ID: ENSP00000405264

SEQ ID NO: 102339 - protein, 126 aa, Homo sapiens; identical to SEQ ID NO: 102318
  Payload ID: 20393
  Gene Name: zinc ribbon domain containing 1
  Uniprot ID: Q9P1U0
  ENSP ID: ENSP00000405636

SEQ ID NO: 102340 - protein, 126 aa, Homo sapiens; identical to SEQ ID NO: 102318
  Payload ID: 20393
  Gene Name: zinc ribbon domain containing 1
  Uniprot ID: Q9P1U0
  ENSP ID: ENSP00000407364

SEQ ID NO: 102341 - protein, 126 aa, Homo sapiens; identical to SEQ ID NO: 102318
  Payload ID: 20393
  Gene Name: zinc ribbon domain containing 1
  Uniprot ID: Q9P1U0
  ENSP ID: ENSP00000407715

SEQ ID NO: 102342 - protein, 126 aa, Homo sapiens; identical to SEQ ID NO: 102318
  Payload ID: 20393
  Gene Name: zinc ribbon domain containing 1
  Uniprot ID: Q9P1U0
  ENSP ID: ENSP00000410127

SEQ ID NO: 102343 - protein, 126 aa, Homo sapiens; identical to SEQ ID NO: 102318
  Payload ID: 20393
  Gene Name: zinc ribbon domain containing 1
  Uniprot ID: Q9P1U0
  ENSP ID: ENSP00000410530

SEQ ID NO: 102344 - protein, 126 aa, Homo sapiens; identical to SEQ ID NO: 102318
  Payload ID: 20393
  Gene Name: zinc ribbon domain containing 1
  Uniprot ID: Q9P1U0
  ENSP ID: ENSP00000410954

SEQ ID NO: 102345 - protein, 126 aa, Homo sapiens; identical to SEQ ID NO: 102318
  Payload ID: 20393
  Gene Name: zinc ribbon domain containing 1
  Uniprot ID: Q9P1U0
  ENSP ID: ENSP00000412369

SEQ ID NO: 102346 - protein, 126 aa, Homo sapiens; identical to SEQ ID NO: 102318
  Payload ID: 20393
  Gene Name: zinc ribbon domain containing 1
  Uniprot ID: Q9P1U0
  ENSP ID: ENSP00000413265

SEQ ID NO: 102347 - protein, 126 aa, Homo sapiens; identical to SEQ ID NO: 102318
  Payload ID: 20393
  Gene Name: zinc ribbon domain containing 1
  Uniprot ID: Q9P1U0
  ENSP ID: ENSP00000414110

SEQ ID NO: 102348 - protein, 126 aa, Homo sapiens; identical to SEQ ID NO: 102318
  Payload ID: 20393
  Gene Name: zinc ribbon domain containing 1
  Uniprot ID: Q9P1U0
  ENSP ID: ENSP00000414720

SEQ ID NO: 102349 - protein, 126 aa, Homo sapiens; identical to SEQ ID NO: 102318
  Payload ID: 20393
  Gene Name: zinc ribbon domain containing 1
  Uniprot ID: Q9P1U0
  ENSP ID: ENSP00000416599

SEQ ID NO: 102350 - protein, 154 aa, Homo sapiens
  Payload ID: 20394
  Gene Name: ZMYM6 neighbor
  Uniprot ID: Q8NCS4
  ENSP ID: ENSP00000362435
MALLLSVLRVLLGGFFALVGLAKLSEEISAPVSERMNALFVQFAEVFPLKVFGYQPDPLNYQIAVGFLELLAGLLLVMGPPMLQEISNLFLILLMMGAIFTLAALKESLSTCIPAIVCLGFLLLLNVGQLLAQTKKVVRPTRKKTLSTFKESWK

SEQ ID NO: 102351 - protein, 120 aa, Homo sapiens
  Payload ID: 20395
  Gene Name: ZNF559-ZNF177 readthrough
  ENSP ID: ENSP00000413568
MAAGWLTTWSQNSVTFQEVAVDFSQEEWALLDPAQKNLYKDVMLENFRNLASVGYQLCRHSLISKVDQEQLKTDERGILQGDCADWETQLKPKDTIAMQNIPGGKTSNGINTNPHGREFL

SEQ ID NO: 102352 - protein, 481 aa, Homo sapiens; identical to SEQ ID NO: 99156
  Payload ID: 20395
  Gene Name: ZNF559-ZNF177 readthrough
  ENSP ID: ENSP00000415070

SEQ ID NO: 102353 - protein, 321 aa, Homo sapiens; identical to SEQ ID NO: 99153
  Payload ID: 20395
  Gene Name: ZNF559-ZNF177 readthrough
  ENSP ID: ENSP00000445323

SEQ ID NO: 102354 - protein, 120 aa, Homo sapiens; identical to SEQ ID NO: 102351
  Payload ID: 20395
  Gene Name: ZNF559-ZNF177 readthrough
  ENSP ID: ENSP00000473272

SEQ ID NO: 102355 - protein, 111 aa, Homo sapiens
  Payload ID: 20395
  Gene Name: ZNF559-ZNF177 readthrough
  ENSP ID: ENSP00000473911
MVAGWLTNYSQDSVTFEDVAVDFTQEEWTLLDQTQRNLYRDVMLENYKNLVAVDWESHINTKWSAPQQNFLQGKTSSVVEMRCGLAVLPRLVSNSCSQVILLPQPPEYIYI

SEQ ID NO: 102356 - protein, 82 aa, Homo sapiens
  Payload ID: 20395
  Gene Name: ZNF559-ZNF177 readthrough
  ENSP ID: ENSP00000473968
MRITAAILTARSRWRLRNSISAFLFTVTFAWCPPGLSNLTILSCPGLGISKQEEGLGEESDEQGEGSQGWSEIQEMRSCCVA

SEQ ID NO: 102357 - protein, 47 aa, Homo sapiens
  Payload ID: 20395
  Gene Name: ZNF559-ZNF177 readthrough
  ENSP ID: ENSP00000473974
ILTARSRWRLRNSISAFLFTVTFAWCPPGLSNLTILSCPEMRSCCVA

SEQ ID NO: 102358 - protein, 84 aa, Homo sapiens
  Payload ID: 20395
  Gene Name: ZNF559-ZNF177 readthrough
  ENSP ID: ENSP00000474076
MVAGWLTNYSQDSVTFEDVAVDFTQEEWTLLDQTQRNLYRDVMLENYKNLVAVDWESHINTKWSAPQQNFLQGKTSSVVEMGWV

SEQ ID NO: 102359 - protein, 67 aa, Homo sapiens
  Payload ID: 20395
  Gene Name: ZNF559-ZNF177 readthrough
  ENSP ID: ENSP00000474108
LRNSISAFLFTVTFAWCPPGLSNLTILSCPGLGISKQEEGLGEESDEQGEGSQGWSEIQEMRSCCVA

SEQ ID NO: 102360 - protein, 53 aa, Homo sapiens
  Payload ID: 20395
  Gene Name: ZNF559-ZNF177 readthrough
  ENSP ID: ENSP00000474354
MRITAAILTARSRWRLRNSISAFLFTVTFAWCPPGLSNLTILSCPEMRSCCVA

SEQ ID NO: 102361 - protein, 126 aa, Homo sapiens
  Payload ID: 20395
  Gene Name: ZNF559-ZNF177 readthrough
  ENSP ID: ENSP00000474602
MAAGWLTTWSQNSVTFQEVAVDFSQEEWALLDPAQKNLYKDVMLENFRNLASVGYQLCRHSLISKVDQEQLKTDERGILQGDCADWETQLKPKDTIAMQNIPGGKTSNGINTNCVRTHSGEMPYEC

SEQ ID NO: 102362 - protein, 66 aa, Homo sapiens
  Payload ID: 20395
  Gene Name: ZNF559-ZNF177 readthrough
  ENSP ID: ENSP00000474716
  MOD_RES (1)..(1): Any amino acid
XLTARSRWRLRNSISAFLFTVTFAWCPPGLSNLTILSCPGRSTVVRSRFTAALTSLGSGVAPTSVF

SEQ ID NO: 102363 - protein, 46 aa, Homo sapiens
  Payload ID: 20395
  Gene Name: ZNF559-ZNF177 readthrough
  ENSP ID: ENSP00000474918
  MOD_RES (1)..(1): Any amino acid
XTARSRWRLRNSISAFLFTVTFAWCPPGLSNLTILSCPEMRSCCVA

SEQ ID NO: 102364 - protein, 76 aa, Homo sapiens
  Payload ID: 20395
  Gene Name: ZNF559-ZNF177 readthrough
  ENSP ID: ENSP00000474980
MRITAAILTARSRWRLRNSISAFLFTVTFAWCPPGLSNLTILSCPDWESHINTKWSAPQQNFLQGKTSSVVEMGWV

SEQ ID NO: 102365 - protein, 125 aa, Homo sapiens
  Payload ID: 20396
  Gene Name: ZNF625-ZNF20 readthrough (NMD candidate)
  ENSP ID: ENSP00000457423
MDSVVFEDVDVNFTQEEWALLDPSQKNLYRDVMQETFRNLASVGKKWKDQKIEDEYKNPRRNLSLRKWSWSLYARQTLGLDSPSVAPKRLLSGYQISYSERPRVPLPQLLSLCRLHRDPHYSREP

SEQ ID NO: 102366 - protein, 61 aa, Homo sapiens; identical to SEQ ID NO: 100814
  Payload ID: 20396
  Gene Name: ZNF625-ZNF20 readthrough (NMD candidate)
  ENSP ID: ENSP00000457791

SEQ ID NO: 102367 - protein, 118 aa, Homo sapiens
  Payload ID: 20397
  Gene Name: ZNF670-ZNF695 readthrough (NMD candidate)
  ENSP ID: ENSP00000428036
MGLLAFRDVALEFSPEEWECLDPAQRSLYRDVMLENYRNLISLGLAMSKPELIICLEARKEPWNVNTEKTARHSVETRFRHVGQAGLKLLTSGDPPALASQSAGITGTGHHCQPICVF

SEQ ID NO: 102368 - protein, 137 aa, Homo sapiens
  Payload ID: 20397
  Gene Name: ZNF670-ZNF695 readthrough (NMD candidate)
  ENSP ID: ENSP00000428213
MGLLAFRDVALEFSPEEWECLDPAQRSLYRDVMLENYRNLISLGLAMSKPELIICLEARKEPWNVNTEKTARHSVLSSYLTEDILPEQGLQVSFQKVMLRRYERCCLEKLRLRNDWEIVVETGFHRVSQDGLNLLTS

SEQ ID NO: 102369 - protein, 233 aa, Homo sapiens
  Payload ID: 20398
  Gene Name: ZNF816-ZNF321P readthrough
  Uniprot ID: Q8N8H1
  ENSP ID: ENSP00000375656
MLREEATKKSKEKEPGMALPQGRLTFRDVAIEFSLEEWKCLNPAQRALYRAVMLENYRNLEFVDISSKCMMKEFSSTAQGNTEVIHTGTLQRHESHHIRDFCFQEIEKDIHNFEFQWQEEERNGHEAPMTEIKELTGSTDRHDQRHAGNKPIKDQLGSSFHSHLPELHIFQPEWKIGNQVEKSIINASLILTSQRISCSPKTRISNNYGNNSLHSSLPIQKLGSTHERKIFPM

SEQ ID NO: 102370 - protein, 351 aa, Homo sapiens
  Payload ID: 20399
  Gene Name: zona pellucida binding protein
  Uniprot ID: Q9BS86
  ENSP ID: ENSP00000046087
MEAFALGPARRGRRRTRAAGSLLSRAAILLFISAFLVRVPSSVGHLVRLPRAFRLTKDSVKIVGSTSFPVKAYVMLHQKSPHVLCVTQQLRNAELIDPSFQWYGPKGKVVSVENRTAQITSTGSLVFQNFEESMSGIYTCFLEYKPTVEEIVKRLQLKYAIYAYREPHYYYQFTARYHAAPCNSIYNISFEKKLLQILSKLLLDLSCEISLLKSECHRVKMQRAGLQNELFFAFSVSSLDTEKGPKRCTDHNCEPYKRLFKAKNLIERFFNQQVEILGRRAEQLPQIYYIEGTLQMVWINRCFPGYGMNVQQHPKCPECCVICSPGSYNPRDGIHCLQCNSSLVYGAKTCL

SEQ ID NO: 102371 - protein, 72 aa, Homo sapiens
  Payload ID: 20399
  Gene Name: zona pellucida binding protein
  ENSP ID: ENSP00000390054
MFLVGHLVRLPRAFRLTKDSVKIVGSTSFPVKAYVMLHQKSPHVLCVTQQLRNAELIDPSFQWYGPKGKVVS

SEQ ID NO: 102372 - protein, 350 aa, Homo sapiens
  Payload ID: 20399
  Gene Name: zona pellucida binding protein
  Uniprot ID: Q9BS86
  ENSP ID: ENSP00000402071
MEAFALGPARRGRRRTRAAGSLLSRAAILLFISAFLVRVPSSVGHLVRLPRAFRLTKDSVKIVGSTSFPVKAYVMLHQKSPHVLCVTQQLRNAELIDPSFQWYGPKGKVVSENRTAQITSTGSLVFQNFEESMSGIYTCFLEYKPTVEEIVKRLQLKYAIYAYREPHYYYQFTARYHAAPCNSIYNISFEKKLLQILSKLLLDLSCEISLLKSECHRVKMQRAGLQNELFFAFSVSSLDTEKGPKRCTDHNCEPYKRLFKAKNLIERFFNQQVEILGRRAEQLPQIYYIEGTLQMVWINRCFPGYGMNVQQHPKCPECCVICSPGSYNPRDGIHCLQCNSSLVYGAKTCL

SEQ ID NO: 102373 - protein, 75 aa, Homo sapiens
  Payload ID: 20399
  Gene Name: zona pellucida binding protein
  ENSP ID: ENSP00000414755
MEAFALGPARRGRRRTRAAGSLLSRAAILLFISAFLVRVPSSGEGPRRPAGSAGTTAASPTLRIAFSCVTCIRFI

SEQ ID NO: 102374 - protein, 338 aa, Homo sapiens
  Payload ID: 20400
  Gene Name: zona pellucida binding protein 2
  Uniprot ID: Q6X784
  ENSP ID: ENSP00000335384
MMRTCVLLSAVLWCLTGVQCPRFTLFNKKGFIYGKTGQPDKIYVELHQNSPVLICMDFKLSKKEIVDPTYLWIGPNEKTLTGNNRINITETGQLMVKDFLEPLSGLYTCTLSYKTVKAETQEEKTVKKRYDFMVFAYREPDYSYQMAVRFTTRSCIGRYNDVFFRVLKKILDSLISDLSCHVIEPSYKCHSVEIPEHGLIHELFIAFQVNPFAPGWKGACNGSVDCEDTTNHNILQARDRIEDFFRSQAYIFYHNFNKTLPAMHFVDHSLQVVRLDSCRPGFGKNERLHSNCASCCVVCSPATFSPDVNVTCQTCVSVLTYGAKSCPQTSNKNQQYED

SEQ ID NO: 102375 - protein, 316 aa, Homo sapiens
  Payload ID: 20400
  Gene Name: zona pellucida binding protein 2
  Uniprot ID: Q6X784
  ENSP ID: ENSP00000367174
MMRTCVLLSAVLWCLTGDKIYVELHQNSPVLICMDFKLSKKEIVDPTYLWIGPNEKTLTGNNRINITETGQLMVKDFLEPLSGLYTCTLSYKTVKAETQEEKTVKKRYDFMVFAYREPDYSYQMAVRFTTRSCIGRYNDVFFRVLKKILDSLISDLSCHVIEPSYKCHSVEIPEHGLIHELFIAFQVNPFAPGWKGACNGSVDCEDTTNHNILQARDRIEDFFRSQAYIFYHNFNKTLPAMHFVDHSLQVVRLDSCRPGFGKNERLHSNCASCCVVCSPATFSPDVNVTCQTCVSVLTYGAKSCPQTSNKNQQYED

SEQ ID NO: 102376 - protein, 265 aa, Homo sapiens
  Payload ID: 20400
  Gene Name: zona pellucida binding protein 2
  ENSP ID: ENSP00000462067
MMRTCVLLSAVLWCLTGVQCPRFTLFNKKGFIYGKTGQPDKIYVELHQNSPVLICMDFKLSKKEIVDPTYLWIGPNEKTLTGNNRINITETGQLMVKDFLEPLSGLYTCTLSYKTVKAETQEEKTVKKRYDFMVFVNPFAPGWKGACNGSVDCEDTTNHNILQARDRIEDFFRSQAYIFYHNFNKTLPAMHFVDHSLQVVRLDSCRPGFGKNERLHSNCASCCVVCSPATFSPDVNVTCQTCVSVLTYGAKSCPQTSNKNQQYED

SEQ ID NO: 102377 - protein, 218 aa, Homo sapiens
  Payload ID: 20400
  Gene Name: zona pellucida binding protein 2
  ENSP ID: ENSP00000462463
MMRTCVLLSAVLWCLTGAYREPDYSYQMAVRFTTRSCIGRYNDVFFRVLKKILDSLISDLSCHVIEPSYKCHSVEIPEHGLIHELFIAFQVNPFAPGWKGACNGSVDCEDTTNHNILQARDRIEDFFRSQAYIFYHNFNKTLPAMHFVDHSLQVVRLDSCRPGFGKNERLHSNCASCCVVCSPATFSPDVNVTCQTCVSVLTYGAKSCPQTSNKNQQY

SEQ ID NO: 102378 - protein, 638 aa, Homo sapiens
  Payload ID: 20401
  Gene Name: zona pellucida glycoprotein 1 (sperm receptor)
  Uniprot ID: P60852
  ENSP ID: ENSP00000278853
MAGGSATTWGYPVALLLLVATLGLGRWLQPDPGLPGLRHSYDCGIKGMQLLVFPRPGQTLRFKVVDEFGNRFDVNNCSICYHWVTSRPQEPAVFSADYRGCHVLEKDGRFHLRVFMEAVLPNGRVDVAQDATLICPKPDPSRTLDSQLAPPAMFSVSTPQTLSFLPTSGHTSQGSGHAFPSPLDPGHSSVHPTPALPSPGPGPTLATLAQPHWGTLEHWDVNKRDYIGTHLSQEQCQVASGHLPCIVRRTSKEACQQAGCCYDNTREVPCYYGNTATVQCFRDGYFVLVVSQEMALTHRITLANIHLAYAPTSCSPTQHTEAFVVFYFPLTHCGTTMQVAGDQLIYENWLVSGIHIQKGPQGSITRDSTFQLHVRCVFNASDFLPIQASIFPPPSPAPMTQPGPLRLELRIAKDETFSSYYGEDDYPIVRLLREPVHVEVRLLQRTDPNLVLLLHQCWGAPSANPFQQPQWPILSDGCPFKGDSYRTQMVALDGATPFQSHYQRFTVATFALLDSGSQRALRGLVYLFCSTSACHTSGLETCSTACSTGTTRQRRSSGHRNDTARPQDIVSSPGPVGFEDSYGQEPTLGPTDSNGNSSLRPLLWAVLLLPAVALVLGFGVFVGLSQTWAQKLWESNRQ

SEQ ID NO: 102379 - protein, 40 aa, Homo sapiens
  Payload ID: 20401
  Gene Name: zona pellucida glycoprotein 1 (sperm receptor)
  ENSP ID: ENSP00000441293
  MOD_RES (1)..(1): Any amino acid
XRFDVNNCSICYHWVTSRPQEPAVFSADYRGCHVLEKVPT

SEQ ID NO: 102380 - protein, 330 aa, Homo sapiens
  Payload ID: 20401
  Gene Name: zona pellucida glycoprotein 1 (sperm receptor)
  ENSP ID: ENSP00000480463
MALTHRITLANIHLAYAPTSCSPTQHTEAFVVFYFPLTHCGTTMQVAGDQLIYENWLVSGIHIQKGPQGSITRDSTFQLHVRCVFNASDFLPIQASIFPPPSPAPMTQPGPLRLELRIAKDETFSSYYGEDDYPIVRLLREPVHVEVRLLQRTDPNLVLLLHQCWGAPSANPFQQPQWPILSDGCPFKGDSYRTQMVALDGATPFQSHYQRFTVATFALLDSGSQRALRGLVYLFCSTSACHTSGLETCSTACSTGTTRQRRSSGHRNDTARPQDIVSSPGPVGFEDSYGQEPTLGPTDSNGNSSLRPLLWAVLLLPAVALVLGFGVFVA

SEQ ID NO: 102381 - protein, 736 aa, Homo sapiens
  Payload ID: 20402
  Gene Name: zona pellucida glycoprotein 2 (sperm receptor)
  Uniprot ID: Q05996
  ENSP ID: ENSP00000458991
MACRQRGGSWSPSGWFNAGWSTYRSISLFFALVTSGNSIDVSQLVNPAFPGTVTCDEREITVEFPSSPGTKKWHASVVDPLGLDMPNCTYILDPEKLTLRATYDNCTRRVHGGHQMTIRVMNNSAALRHGAVMYQFFCPAMQVEETQGLSASTICQKDFMSFSLPRVFSGLADDSKGTKVQMGWSIEVGDGARAKTLTLPEAMKEGFSLLIDNHRMTFHVPFNATGVTHYVQGNSHLYMVSLKLTFISPGQKVIFSSQAICAPDPVTCNATHMTLTIPEFPGKLKSVSFENQNIDVSQLHDNGIDLEATNGMKLHFSKTLLKTKLSEKCLLHQFYLASLKLTFLLRPETVSMVIYPECLCESPVSIVTGELCTQDGFMDVEVYSYQTQPALDLGTLRVGNSSCQPVFEAQSQGLVRFHIPLNGCGTRYKFEDDKVVYENEIHALWTDFPPSKISRDSEFRNDMLLNINVESLTPPVASVKLGPFTLILQSYPDNSYQQPYGENEYPLVRFLRQPIYMEVRVLNRDDPNIKLVLDDCWATSTMDPDSFPQWNVVVDGCAYDLDNYQTTFHPVGSSVTHPDHYQRFDMKAFAFVSEAHVLSSLVYFHCSALICNRLSPDSPLCSVTCPVSSRHRRATGATEAEKMTVSLPGPILLLSDDSSFRGVGSSDLKASGSSGEKSRSETGEEVGSRGAMDTKGHKTAGDVGSKAVAAVAAFAGVVATLGFIYYLYEKRTVSNH

SEQ ID NO: 102382 - protein, 745 aa, Homo sapiens
  Payload ID: 20402
  Gene Name: zona pellucida glycoprotein 2 (sperm receptor)
  Uniprot ID: Q05996
  ENSP ID: ENSP00000460971
MACRQRGGSWSPSGWFNAGWSTYRSISLFFALVTSGNSIDVSQLVNPAFPGTVTCDEREITVEFPSSPGTKKWHASVVDPLGLDMPNCTYILDPEKLTLRATYDNCTRRVHGGHQMTIRVMNNSAALRHGAVMYQFFCPAMQVEETQGLSASTICQKDFMSFSLPRVFSGLADDSKGTKVQMGWSIEVGDGARAKTLTLPEAMKEGFSLLIDNHRMTFHVPFNATGVTHYVQGNSHLYMVSLKLTFISPGQKVIFSSQAICAPDPVTCNATHMTLTIPEFPGKLKSVSFENQNIDVSQLHDNGIDLEATNGMKLHFSKTLLKTKLSEKCLLHQFYLASLKLTFLLRPETVSMVIYPECLCESPVSIVTGELCTQDGFMDVEVYSYQTQPALDLGTLRVGNSSCQPVFEAQSQGLVRFHIPLNGCGTRYKFEDDKVVYENEIHALWTDFPPSKISRDSEFRMTVKCSYSRNDMLLNINVESLTPPVASVKLGPFTLILQSYPDNSYQQPYGENEYPLVRFLRQPIYMEVRVLNRDDPNIKLVLDDCWATSTMDPDSFPQWNVVVDGCAYDLDNYQTTFHPVGSSVTHPDHYQRFDMKAFAFVSEAHVLSSLVYFHCSALICNRLSPDSPLCSVTCPVSSRHRRATGATEAEKMTVSLPGPILLLSDDSSFRGVGSSDLKASGSSGEKSRSETGEEVGSRGAMDTKGHKTAGDVGSKAVAAVAAFAGVVATLGFIYYLYEKRTVSNH

SEQ ID NO: 102383 - protein, 373 aa, Homo sapiens
  Payload ID: 20403
  Gene Name: zona pellucida glycoprotein 3 (sperm receptor)
  Uniprot ID: P21754
  ENSP ID: ENSP00000337310
MVMVSKDLFGTGKLIRAADLTLGPEACEPLVSMDTEDVVRFEVGLHECGNSMQVTDDALVYSTFLLHDPRPVGNLSIVRTNRAEIPIECRYPRQGNVSSQAILPTWLPFRTTVFSEEKLTFSLRLMEENWNAEKRSPTFHLGDAAHLQAEIHTGSHVPLRLFVDHCVATPTPDQNASPYHTIVDFHGCLVDGLTDASSAFKVPRPGPDTLQFTVDVFHFANDSRNMIYITCHLKVTLAEQDPDELNKACSFSKPSNSWFPVEGSADICQCCNKGDCGTPSHSRRQPHVMSQWSRSASRNRRHVTEEADVTVGPLIFLDRRGDHEVEQWALPSDTSVVLLGVGLAVVVSLTLTAVILVLTRRCRTASHPVSASE

SEQ ID NO: 102384 - protein, 424 aa, Homo sapiens
  Payload ID: 20403
  Gene Name: zona pellucida glycoprotein 3 (sperm receptor)
  Uniprot ID: P21754
  ENSP ID: ENSP00000378326
MELSYRLFICLLLWGSTELCYPQPLWLLQGGASHPETSVQPVLVECQEATLMVMVSKDLFGTGKLIRAADLTLGPEACEPLVSMDTEDVVRFEVGLHECGNSMQVTDDALVYSTFLLHDPRPVGNLSIVRTNRAEIPIECRYPRQGNVSSQAILPTWLPFRTTVFSEEKLTFSLRLMEENWNAEKRSPTFHLGDAAHLQAEIHTGSHVPLRLFVDHCVATPTPDQNASPYHTIVDFHGCLVDGLTDASSAFKVPRPGPDTLQFTVDVFHFANDSRNMIYITCHLKVTLAEQDPDELNKACSFSKPSNSWFPVEGSADICQCCNKGDCGTPSHSRRQPHVMSQWSRSASRNRRHVTEEADVTVGPLIFLDRRGDHEVEQWALPSDTSVVLLGVGLAVVVSLTLTAVILVLTRRCRTASHPVSASE

SEQ ID NO: 102385 - protein, 258 aa, Homo sapiens
  Payload ID: 20403
  Gene Name: zona pellucida glycoprotein 3 (sperm receptor)
  ENSP ID: ENSP00000378329
  MOD_RES (1)..(1): Any amino acid
XNWNAEKRSPTFHLGDAAHLQAEIHTGSHVPLRLFVDHCVATPTPDQNASPYHTIVDFHGCLVDGLTDASSAFKVPRPGPDTLQFTVDVFHFANDSRNMIYITCHLKVTLAEQDPDELNKACSFSKPSNRQQKSKLLLFHLSWFPVEGSADICQCCNKGDCGTPSHSRRQPHVMSQWSRSASRNRRHVTEEADVTVGPLIFLDRRGDHEVEQWALPSDTSVVLLGVGLAVVVSLTLTAVILVLTRRCRTASHPVSASE

SEQ ID NO: 102386 - protein, 248 aa, Homo sapiens
  Payload ID: 20403
  Gene Name: zona pellucida glycoprotein 3 (sperm receptor)
  ENSP ID: ENSP00000411955
MEENWNAEKRSPTFHLGDAAHLQAEIHTGSHVPLRLFVDHCVATPTPDQNASPYHTIVDFHGCLVDGLTDASSAFKVPRPGPDTLQFTVDVFHFANDSRNMIYITCHLKVTLAEQDPDELNKACSFSKPSNSWFPVEGSADICQCCNKGDCGTPSHSRRQPHVMSQWSRSASRNRRHVTEEADVTVGPLIFLDRRGDHEVEQWALPSDTSVVLLGVGLAVVVSLTLTAVILVLTRRCRTASHPVSASE

SEQ ID NO: 102387 - protein, 540 aa, Homo sapiens
  Payload ID: 20404
  Gene Name: zona pellucida glycoprotein 4
  Uniprot ID: Q12836
  ENSP ID: ENSP00000355529
MWLLRCVLLCVSLSLAVSGQHKPEAPDYSSVLHCGPWSFQFAVNLNQEATSPPVLIAWDNQGLLHELQNDSDCGTWIRKGPGSSVVLEATYSSCYVTEWDSHYIMPVGVEGAGAAEHKVVTERKLLKCPMDLLARDAPDTDWCDSIPARDRLPCAPSPISRGDCEGLGCCYSSEEVNSCYYGNTVTLHCTREGHFSIAVSRNVTSPPLLLDSVRLALRNDSACNPVMATQAFVLFQFPFTSCGTTRQITGDRAVYENELVATRDVKNGSRGSVTRDSIFRLHVSCSYSVSSNSLPINVQVFTLPPPFPETQPGPLTLELQIAKDKNYGSYYGVGDYPVVKLLRDPIYVEVSILHRTDPYLGLLLQQCWATPSTDPLSQPQWPILVKGCPYIGDNYQTQLIPVQKALDLPFPSHHQRFSIFTFSFVNPTVEKQALRGPVHLHCSVSVCQPAETPSCVVTCPDLSRRRNFDNSSQNTTASVSSKGPMILLQATKDPPEKLRVPVDSKVLWVAGLSGTLILGALLVSYLAVKKQKSCPDQMCQ

SEQ ID NO: 102388 - protein, 540 aa, Homo sapiens; identical to SEQ ID NO: 102387
  Payload ID: 20404
  Gene Name: zona pellucida glycoprotein 4
  Uniprot ID: Q12836
  ENSP ID: ENSP00000482304

SEQ ID NO: 102389 - protein, 431 aa, Homo sapiens
  Payload ID: 20405
  Gene Name: zona pellucida-like domain containing 1
  Uniprot ID: Q8TCW7
  ENSP ID: ENSP00000307801
MMLRFSMCRGNDEGFAMEQIWLLLLLTIRVLPGSAQFNGYNCDANLHSRFPAERDISVYCGVQAITMKINFCTVLFSGYSETDLALNGRHGDSHCRGFINNNTFPAVVIFIINLSTLEGCGNNLVVSTIPGVSAYGNATSVQVGNISGYIDTPDPPTIISYLPGLLYKFSCSYPLEYLVNNTQLASSSAAISVRENNGTFVSTLNLLLYNDSTYNQQLIIPSIGLPLKTKVFAAVQATNLDGRWNVLMDYCYTTPSGNPNDDIRYDLFLSCDKDPQTTVIENGRSQRGRFSFEVFRFVKHKNQKMSTVFLHCVTKLCRADDCPFLMPICSHRERRDAGRRTTWSPQSSSGSAVLSAGPIITRSDETPTNNSQLGSPSMPPFQLNAITSALISGMVILGVTSFSLLLCSLALLHRKGPTSLVLNGIRNPVFD

SEQ ID NO: 102390 - protein, 415 aa, Homo sapiens
  Payload ID: 20405
  Gene Name: zona pellucida-like domain containing 1
  Uniprot ID: Q8TCW7
  ENSP ID: ENSP00000418253
MEQIWLLLLLTIRVLPGSAQFNGYNCDANLHSRFPAERDISVYCGVQAITMKINFCTVLFSGYSETDLALNGRHGDSHCRGFINNNTFPAVVIFIINLSTLEGCGNNLVVSTIPGVSAYGNATSVQVGNISGYIDTPDPPTIISYLPGLLYKFSCSYPLEYLVNNTQLASSSAAISVRENNGTFVSTLNLLLYNDSTYNQQLIIPSIGLPLKTKVFAAVQATNLDGRWNVLMDYCYTTPSGNPNDDIRYDLFLSCDKDPQTTVIENGRSQRGRFSFEVFRFVKHKNQKMSTVFLHCVTKLCRADDCPFLMPICSHRERRDAGRRTTWSPQSSSGSAVLSAGPIITRSDETPTNNSQLGSPSMPPFQLNAITSALISGMVILGVTSFSLLLCSLALLHRKGPTSLVLNGIRNPVFD

SEQ ID NO: 102391 - protein, 415 aa, Homo sapiens; identical to SEQ ID NO: 102390
  Payload ID: 20405
  Gene Name: zona pellucida-like domain containing 1
  Uniprot ID: Q8TCW7
  ENSP ID: ENSP00000420265

SEQ ID NO: 102392 - protein, 2601 aa, Homo sapiens
  Payload ID: 20406
  Gene Name: zonadhesin (gene/pseudogene)
  ENSP ID: ENSP00000441117
MVPPVWTLLLLVGAALFRKEKPPDQKLVVRSSRDNYVLTQCDFEDDAKPLCDWSQVSADDEDWVRASGPSPTGSTGAPGGYPNGEGSYLHMESNSFHRGGVARLLSPDLWEQGPLCVHFAHHMFGLSWGAQLRLLLLSGEEGRRPDVLWKHWNTQRPSWMLTTVTVPAGFTLPTRLMFEGTRGSTAYLDIALDALSIRRGSCNRVCMMQTCSFDIPNDLCDWTWIPTASGAKWTQKKGSSGKPGVGPDGDFSSPGSGCYMLLDPKNARPGQKAVLLSPVSLSSGCLSFSFHYILRGQSPGAALHIYASVLGSIRKHTLFSGQPGPNWQAVSVNYTAVGRIQFAVVGVFGKTPEPAVAVDATSIAPCGEGFPQCDFEDNAHPFCDWVQTSGDGGHWALGHKNGPVHGMGPAGGFPNAGGHYIYLEADEFSQAGQSVRLVSRPFCAPGDICVEFAYHMYGLGEGTMLELLLGSPAGSPPIPLWKRVGSQRPYWQNTSVTVPSGHQQPMQLIFKGIQGSNTASVVAMGFILINPGTCPVKVLPELPPVSPVSSTGPSETTGLTENPTISTKKPTVSIEKPSVTTEKPTVPKEKPTIPTEKPTISTEKPTIPSEKPNMPSEKPTIPSEKPTILTEKPTIPSEKPTIPSEKPTISTEKPTVPTEEPTTPTEETTTSMEEPVIPTEKPSIPTEKPSIPTEKPTISMEETIISTEKPTISPEKPTIPTEKPTIPTEKSTISPEKPTTPTEKPTIPTEKPTISPEKPTTPTEKPTISPEKLTIPTEKPTIPTEKPTIPTEKPTISTEEPTTPTEETTISTEKPSIPMEKPTLPTEETTTSVEETTISTEKLTIPMEKPTISTEKPTIPTEKPTISPEKLTIPTEKLTIPTEKPTIPIEETTISTEKLTIPTEKPTISPEKPTISTEKPTIPTEKPTIPTEETTISTEKLTIPTEKPTISPEKLTIPTEKPTISTEKPTIPTEKLTIPTEKPTIPTEKPTIPTEKLTALRPPHPSPTATGLAALVMSPHAPSTPMTSVILGTTTTSRSSTERCPPNARYESCACPASCKSPRPSCGPLCREGCVCNPGFLFSDNHCIQASSCNCFYNNDYYEPGAEWFSPNCTEHCRCWPGSRVECQISQCGTHTVCQLKNGQYGCHPYAGTATCLVYGDPHYVTFDGRHFGFMGKCTYILAQPCGNSTDPFFRVTAKNEEQGQEGVSCLSKVYVTLPESTVTLLKGRRTLVGGQQVTLPAIPSKGVFLGASGRFVELQTEFGLRVRWDGDQQLYVTVSSTYSGKLCGLCGNYDGNSDNDHLKLDGSPAGDKEELGNSWQTDQDEDQECQKYQVVNSPSCDSSLQSSMSGPGFCGRLVDTHGPFETCLLHVKAASFFDSCMLDMCGFQGLQHLLCTHMSTMTTTCQDAGHAVKPWREPHFCPMACPPNSKYSLCAKPCPDTCHSGFSGMFCSDRCVEACECNPGFVLSGLECIPRSQCGCLHPAGSYFKVGERWYKPGCKELCVCESNNRIRCQPWRCRAQEFCGQQDGIYGCHAQGAATCTASGDPHYLTFDGALHHFMGTCTYVLTRPCWSRSQDSYFVVSATNENRGGILEVSYIKAVHVTVFDLSISLLRGCKVMLNGHRVALPVWLAQGRVTIRLSSNLVLLYTNFGLQVRYDGSHLVEVTVPSSYGGQLCGLCGNYNNNSLDDNLRPDRKLAGDSMQLGAAWKLPESSEPGCFLVGGKPSSCQENSMADAWNKNCAILINPQGPFSQCHQVVPPQSSFASCVHGQCGTKGDTTALCRSLQAYASLCAQAGQAPAWRNRTFCPMRCPPGSSYSPCSSPCPDTCSSINNPRDCPKALPCAESCECQKGHILSGTSCVPLGQCGCTDPAGSYHPVGERWYTENTCTRLCTCSVHNNITCFQSTCKPNQICWALDGLLHCRASGVGVCQLPGESHYVSFDGSNHSIPDACTLVLVKVCHPAMALPFFKISAKHEKEEGGTEAFRLHEVYIDIYDAQVTLQKGHRVLINSKQVTLPAISQIPGVSVKSSSIYSIVNIKIGVQVKFDGNHLLEIEIPTTYYGKVCGMCGNFNDEEEDELMMPSDEVANSDSEFVNSWKDKDIDPSCQSLLVDEQQIPAEQQENPSGNCRAADLRRAREKCEAALRAPVWAQCASRIDLTPFLVDCANTLCEFGGLYQALCQALQAFGATCQSQGLKPPLWRNSSFCPLECPAYSSYTNCLPSCSPSCWDLDGRCEGAKVPSACAEGCICQPGYVLSEDKCVPRSQCGCKDAHGGSIPLGKSWVSSGCTEKCVCTGGAIQCGDFRCPSGSHCQLTSDNSNSNCVSDKSEQCSVYGDPRYLTFDGFSYRLQGRMTYVLIKTVDVLPEGVEPLLVEGRNKMDPPRSSIFLQEVITTVYGYKVQLQAGLELVVNNQKMAVPYRPNEHLRVTLWGQRLYLVTDFELVVSFGGRKNAVISLPSMYEGLVSGLCGNYDKNRKNDMMLPSGALTQNLNTFGNSWEVKTEDALLRFPRAIPAEEEGQGAELGLRTGLQVSECSPEQLASNSTQACRVLADPQGPFAACHQTVAPEPFQEHCVLDLCSAQDPREQEELRCQVLSGWAAAF

SEQ ID NO: 102393 - protein, 2689 aa, Homo sapiens
  Payload ID: 20406
  Gene Name: zonadhesin (gene/pseudogene)
  ENSP ID: ENSP00000444427
MVPPVWTLLLLVGAALFRKEKPPDQKLVVRSSRDNYVLTQCDFEDDAKPLCDWSQVSADDEDWVRASGPSPTGSTGAPGGYPNGEGSYLHMESNSFHRGGVARLLSPDLWEQGPLCVHFAHHMFGLSWGAQLRLLLLSGEEGRRPDVLWKHWNTQRPSWMLTTVTVPAGFTLPTRLMFEGTRGSTAYLDIALDALSIRRGSCNRVCMMQTCSFDIPNDLCDWTWIPTASGAKWTQKKGSSGKPGVGPDGDFSSPGSGCYMLLDPKNARPGQKAVLLSPVSLSSGCLSFSFHYILRGQSPGAALHIYASVLGSIRKHTLFSGQPGPNWQAVSVNYTAVGRIQFAVVGVFGKTPEPAVAVDATSIAPCGEGFPQCDFEDNAHPFCDWVQTSGDGGHWALGHKNGPVHGMGPAGGFPNAGGHYIYLEADEFSQAGQSVRLVSRPFCAPGDICVEFAYHMYGLGEGTMLELLLGSPAGSPPIPLWKRVGSQRPYWQNTSVTVPSGHQQPMQLIFKGIQGSNTASVVAMGFILINPGTCPVKVLPELPPVSPVSSTGPSETTGLTENPTISTKKPTVSIEKPSVTTEKPTVPKEKPTIPTEKPTISTEKPTIPSEKPNMPSEKPTIPSEKPTILTEKPTIPSEKPTIPSEKPTISTEKPTVPTEEPTTPTEETTTSMEEPVIPTEKPSIPTEKPSIPTEKPTISMEETIISTEKPTISPEKPTIPTEKPTIPTEKSTISPEKPTTPTEKPTIPTEKPTISPEKPTTPTEKPTISPEKLTIPTEKPTIPTEKPTIPTEKPTISTEEPTTPTEETTISTEKPSIPMEKPTLPTEETTTSVEETTISTEKLTIPMEKPTISTEKPTIPTEKPTISPEKLTIPTEKLTIPTEKPTIPIEETTISTEKLTIPTEKPTISPEKPTISTEKPTIPTEKPTIPTEETTISTEKLTIPTEKPTISPEKLTIPTEKPTISTEKPTIPTEKLTIPTEKPTIPTEKPTIPTEKLTALRPPHPSPTATGLAALVMSPHAPSTPMTSVILGTTTTSRSSTERCPPNARYESCACPASCKSPRPSCGPLCREGCVCNPGFLFSDNHCIQASSCNCFYNNDYYEPGAEWFSPNCTEHCRCWPGSRVECQISQCGTHTVCQLKNGQYGCHPYAGTATCLVYGDPHYVTFDGRHFGFMGKCTYILAQPCGNSTDPFFRVTAKNEEQGQEGVSCLSKVYVTLPESTVTLLKGRRTLVGGQQVTLPAIPSKGVFLGASGRFVELQTEFGLRVRWDGDQQLYVTVSSTYSGKLCGLCGNYDGNSDNDHLKLDGSPAGDKEELGNSWQTDQDEDQECQKYQVVNSPSCDSSLQSSMSGPGFCGRLVDTHGPFETCLLHVKAASFFDSCMLDMCGFQGLQHLLCTHMSTMTTTCQDAGHAVKPWREPHFCPMACPPNSKYSLCAKPCPDTCHSGFSGMFCSDRCVEACECNPGFVLSGLECIPRSQCGCLHPAGSYFKVGERWYKPGCKELCVCESNNRIRCQPWRCRAQEFCGQQDGIYGCHAQGAATCTASGDPHYLTFDGALHHFMGTCTYVLTRPCWSRSQDSYFVVSATNENRGGILEVSYIKAVHVTVFDLSISLLRGCKVMLNGHRVALPVWLAQGRVTIRLSSNLVLLYTNFGLQVRYDGSHLVEVTVPSSYGGQLCGLCGNYNNNSLDDNLRPDRKLAGDSMQLGAAWKLPESSEPGCFLVGGKPSSCQENSMADAWNKNCAILINPQGPFSQCHQVVPPQSSFASCVHGQCGTKGDTTALCRSLQAYASLCAQAGQAPAWRNRTFCPMRCPPGSSYSPCSSPCPDTCSSINNPRDCPKALPCAESCECQKGHILSGTSCVPLGQCGCTDPAGSYHPVGERWYTENTCTRLCTCSVHNNITCFQSTCKPNQICWALDGLLHCRASGVGVCQLPGESHYVSFDGSNHSIPDACTLVLVKVCHPAMALPFFKISAKHEKEEGGTEAFRLHEVYIDIYDAQVTLQKGHRVLINSKQVTLPAISQIPGVSVKSSSIYSIVNIKIGVQVKFDGNHLLEIEIPTTYYGKVCGMCGNFNDEEEDELMMPSDEVANSDSEFVNSWKDKDIDPSCQSLLVDEQQIPAEQQENPSGNCRAADLRRAREKCEAALRAPVWAQCASRIDLTPFLVDCANTLCEFGGLYQALCQALQAFGATCQSQGLKPPLWRNSSFCPLECPAYSSYTNCLPSCSPSCWDLDGRCEGAKVPSACAEGCICQPGYVLSEDKCVPRSQCGCKDAHGGSIPLGKSWVSSGCTEKCVCTGGAIQCGDFRCPSGSHCQLTSDNSNSNCVSDKSEQCSVYGDPRYLTFDGFSYRLQGRMTYVLIKTVDVLPEGVEPLLVEGRNKMDPPRSSIFLQEVITTVYGYKVQLQAGLELVVNNQKMAVPYRPNEHLRVTLWGQRLYLVTDFELVVSFGGRKNAVISLPSMYEGLVSGLCGNYDKNRKNDMMLPSGALTQNLNTFGNSWEVKTEDALLRFPRAIPAEEEGQGAELGLRTGLQVSECSPEQLASNSTQACRVLADPQGPFAACHQTVAPEPFQEHCVLDLCSAQDPREQEELRCQVLSGYAILCQEAGAALAGWRDRTLCAMECPAGTIYQSCMTPCPASCANLADPGDCEGPCVEGCASIPGYAYSGTQSLPWLTVAAPAMASTTSWAAAF

SEQ ID NO: 102394 - protein, 2624 aa, Homo sapiens
  Payload ID: 20406
  Gene Name: zonadhesin (gene/pseudogene)
  ENSP ID: ENSP00000445091
MVPPVWTLLLLVGAALFRKEKPPDQKLVVRSSRDNYVLTQCDFEDDAKPLCDWSQVSADDEDWVRASGPSPTGSTGAPGGYPNGEGSYLHMESNSFHRGGVARLLSPDLWEQGPLCVHFAHHMFGLSWGAQLRLLLLSGEEGRRPDVLWKHWNTQRPSWMLTTVTVPAGFTLPTRLMFEGTRGSTAYLDIALDALSIRRGSCNRVCMMQTCSFDIPNDLCDWTWIPTASGAKWTQKKGSSGKPGVGPDGDFSSPGSGCYMLLDPKNARPGQKAVLLSPVSLSSGCLSFSFHYILRGQSPGAALHIYASVLGSIRKHTLFSGQPGPNWQAVSVNYTAVGRIQFAVVGVFGKTPEPAVAVDATSIAPCGEGFPQCDFEDNAHPFCDWVQTSGDGGHWALGHKNGPVHGMGPAGGFPNAGGHYIYLEADEFSQAGQSVRLVSRPFCAPGDICVEFAYHMYGLGEGTMLELLLGSPAGSPPIPLWKRVGSQRPYWQNTSVTVPSGHQQPMQLIFKGIQGSNTASVVAMGFILINPGTCPVKVLPELPPVSPVSSTGPSETTGLTENPTISTKKPTVSIEKPSVTTEKPTVPKEKPTIPTEKPTISTEKPTIPSEKPNMPSEKPTIPSEKPTILTEKPTIPSEKPTIPSEKPTISTEKPTVPTEEPTTPTEETTTSMEEPVIPTEKPSIPTEKPSIPTEKPTISMEETIISTEKPTISPEKPTIPTEKPTIPTEKSTISPEKPTTPTEKPTIPTEKPTISPEKPTTPTEKPTISPEKLTIPTEKPTIPTEKPTIPTEKPTISTEEPTTPTEETTISTEKPSIPMEKPTLPTEETTTSVEETTISTEKLTIPMEKPTISTEKPTIPTEKPTISPEKLTIPTEKLTIPTEKPTIPIEETTISTEKLTIPTEKPTISPEKPTISTEKPTIPTEKPTIPTEETTISTEKLTIPTEKPTISPEKLTIPTEKPTISTEKPTIPTEKLTIPTEKPTIPTEKPTIPTEKLTALRPPHPSPTATGLAALVMSPHAPSTPMTSVILGTTTTSRSSTERCPPNARYESCACPASCKSPRPSCGPLCREGCVCNPGFLFSDNHCIQASSCNCFYNNDYYEPGAEWFSPNCTEHCRCWPGSRVECQISQCGTHTVCQLKNGQYGCHPYAGTATCLVYGDPHYVTFDGRHFGFMGKCTYILAQPCGNSTDPFFRVTAKNEEQGQEGVSCLSKVYVTLPESTVTLLKGRRTLVGGQQVTLPAIPSKGVFLGASGRFVELQTEFGLRVRWDGDQQLYVTVSSTYSGKLCGLCGNYDGNSDNDHLKLDGSPAGDKEELGNSWQTDQDEDQECQKYQVVNSPSCDSSLQSSMSGPGFCGRLVDTHGPFETCLLHVKAASFFDSCMLDMCGFQGLQHLLCTHMSTMTTTCQDAGHAVKPWREPHFCPMACPPNSKYSLCAKPCPDTCHSGFSGMFCSDRCVEACECNPGFVLSGLECIPRSQCGCLHPAGSYFKVGERWYKPGCKELCVCESNNRIRCQPWRCRAQEFCGQQDGIYGCHAQGAATCTASGDPHYLTFDGALHHFMGTCTYVLTRPCWSRSQDSYFVVSATNENRGGILEVSYIKAVHVTVFDLSISLLRGCKVMLNGHRVALPVWLAQGRVTIRLSSNLVLLYTNFGLQVRYDGSHLVEVTVPSSYGGQLCGLCGNYNNNSLDDNLRPDRKLAGDSMQLGAAWKLPESSEPGCFLVGGKPSSCQENSMADAWNKNCAILINPQGPFSQCHQVVPPQSSFASCVHGQCGTKGDTTALCRSLQAYASLCAQAGQAPAWRNRTFCPMRCPPGSSYSPCSSPCPDTCSSINNPRDCPKALPCAESCECQKGHILSGTSCVPLGQCGCTDPAGSYHPVGERWYTENTCTRLCTCSVHNNITCFQSTCKPNQICWALDGLLHCRASGVGVCQLPGESHYVSFDGSNHSIPDACTLVLVKVCHPAMALPFFKISAKHEKEEGGTEAFRLHEVYIDIYDAQVTLQKGHRVLINSKQVTLPAISQIPGVSVKSSSIYSIVNIKIGVQVKFDGNHLLEIEIPTTYYGKVCGMCGNFNDEEEDELMMPSDEVANSDSEFVNSWKDKDIDPSCQSLLVDEQQIPAEQQENPSGNCRAADLRRAREKCEAALRAPVWAQCASRIDLTPFLVDCANTLCEFGGLYQALCQALQAFGATCQSQGLKPPLWRNSSFCPLECPAYSSYTNCLPSCSPSCWDLDGRCEGAKVPSACAEGCICQPGYVLSEDKCVPRSQCGCKDAHGGSIPLGKSWVSSGCTEKCVCTGGAIQCGDFRCPSGSHCQLTSDNSNSNCVSDKSEQCSVYGDPRYLTFDGFSYRLQGRMTYVLIKTVDVLPEGVEPLLVEGRNKMDPPRSSIFLQEVITTVYGYKVQLQAGLELVVNNQKMAVPYRPNEHLRVTLWGQRLYLVTDFELVVSFGGRKNAVISLPSMYEGLVSGLCGNYDKNRKNDMMLPSGALTQNLNTFGNSWEVKTEDALLRFPRAIPAEEEGQGAELGLRTGLQVSECSPEQLASNSTQACRVLADPQGPFAACHQTVAPEPFQEHCVLDLCSAQDPREQEELRCQVLSGYAILCQEAGAALAGWRDRTLCAGQQLSD

SEQ ID NO: 102395 - protein, 2721 aa, Homo sapiens
  Payload ID: 20406
  Gene Name: zonadhesin (gene/pseudogene)
  ENSP ID: ENSP00000445943
MVPPVWTLLLLVGAALFRKEKPPDQKLVVRSSRDNYVLTQCDFEDDAKPLCDWSQVSADDEDWVRASGPSPTGSTGAPGGYPNGEGSYLHMESNSFHRGGVARLLSPDLWEQGPLCVHFAHHMFGLSWGAQLRLLLLSGEEGRRPDVLWKHWNTQRPSWMLTTVTVPAGFTLPTRLMFEGTRGSTAYLDIALDALSIRRGSCNRVCMMQTCSFDIPNDLCDWTWIPTASGAKWTQKKGSSGKPGVGPDGDFSSPGSGCYMLLDPKNARPGQKAVLLSPVSLSSGCLSFSFHYILRGQSPGAALHIYASVLGSIRKHTLFSGQPGPNWQAVSVNYTAVGRIQFAVVGVFGKTPEPAVAVDATSIAPCGEGFPQCDFEDNAHPFCDWVQTSGDGGHWALGHKNGPVHGMGPAGGFPNAGGHYIYLEADEFSQAGQSVRLVSRPFCAPGDICVEFAYHMYGLGEGTMLELLLGSPAGSPPIPLWKRVGSQRPYWQNTSVTVPSGHQQPMQLIFKGIQGSNTASVVAMGFILINPGTCPVKVLPELPPVSPVSSTGPSETTGLTENPTISTKKPTVSIEKPSVTTEKPTVPKEKPTIPTEKPTISTEKPTIPSEKPNMPSEKPTIPSEKPTILTEKPTIPSEKPTIPSEKPTISTEKPTVPTEEPTTPTEETTTSMEEPVIPTEKPSIPTEKPSIPTEKPTISMEETIISTEKPTISPEKPTIPTEKPTIPTEKSTISPEKPTTPTEKPTIPTEKPTISPEKPTTPTEKPTISPEKLTIPTEKPTIPTEKPTIPTEKPTISTEEPTTPTEETTISTEKPSIPMEKPTLPTEETTTSVEETTISTEKLTIPMEKPTISTEKPTIPTEKPTISPEKLTIPTEKLTIPTEKPTIPIEETTISTEKLTIPTEKPTISPEKPTISTEKPTIPTEKPTIPTEETTISTEKLTIPTEKPTISPEKLTIPTEKPTISTEKPTIPTEKLTIPTEKPTIPTEKPTIPTEKLTALRPPHPSPTATGLAALVMSPHAPSTPMTSVILGTTTTSRSSTERCPPNARYESCACPASCKSPRPSCGPLCREGCVCNPGFLFSDNHCIQASSCNCFYNNDYYEPGAEWFSPNCTEHCRCWPGSRVECQISQCGTHTVCQLKNGQYGCHPYAGTATCLVYGDPHYVTFDGRHFGFMGKCTYILAQPCGNSTDPFFRVTAKNEEQGQEGVSCLSKVYVTLPESTVTLLKGRRTLVGGQQVTLPAIPSKGVFLGASGRFVELQTEFGLRVRWDGDQQLYVTVSSTYSGKLCGLCGNYDGNSDNDHLKLDGSPAGDKEELGNSWQTDQDEDQECQKYQVVNSPSCDSSLQSSMSGPGFCGRLVDTHGPFETCLLHVKAASFFDSCMLDMCGFQGLQHLLCTHMSTMTTTCQDAGHAVKPWREPHFCPMACPPNSKYSLCAKPCPDTCHSGFSGMFCSDRCVEACECNPGFVLSGLECIPRSQCGCLHPAGSYFKVGERWYKPGCKELCVCESNNRIRCQPWRCRAQEFCGQQDGIYGCHAQGAATCTASGDPHYLTFDGALHHFMGTCTYVLTRPCWSRSQDSYFVVSATNENRGGILEVSYIKAVHVTVFDLSISLLRGCKVMLNGHRVALPVWLAQGRVTIRLSSNLVLLYTNFGLQVRYDGSHLVEVTVPSSYGGQLCGLCGNYNNNSLDDNLRPDRKLAGDSMQLGAAWKLPESSEPGCFLVGGKPSSCQENSMADAWNKNCAILINPQGPFSQCHQVVPPQSSFASCVHGQCGTKGDTTALCRSLQAYASLCAQAGQAPAWRNRTFCPMRCPPGSSYSPCSSPCPDTCSSINNPRDCPKALPCAESCECQKGHILSGTSCVPLGQCGCTDPAGSYHPVGERWYTENTCTRLCTCSVHNNITCFQSTCKPNQICWALDGLLHCRASGVGVCQLPGESHYVSFDGSNHSIPDACTLVLVKVCHPAMALPFFKISAKHEKEEGGTEAFRLHEVYIDIYDAQVTLQKGHRVLINSKQVTLPAISQIPGVSVKSSSIYSIVNIKIGVQVKFDGNHLLEIEIPTTYYGKVCGMCGNFNDEEEDELMMPSDEVANSDSEFVNSWKDKDIDPSCQSLLVDEQQIPAEQQENPSGNCRAADLRRAREKCEAALRAPVWAQCASRIDLTPFLVDCANTLCEFGGLYQALCQALQAFGATCQSQGLKPPLWRNSSFCPLECPAYSSYTNCLPSCSPSCWDLDGRCEGAKVPSACAEGCICQPGYVLSEDKCVPRSQCGCKDAHGGSIPLGKSWVSSGCTEKCVCTGGAIQCGDFRCPSGSHCQLTSDNSNSNCVSDKSEQCSVYGDPRYLTFDGFSYRLQGRMTYVLIKTVDVLPEGVEPLLVEGRNKMDPPRSSIFLQEVITTVYGYKVQLQAGLELVVNNQKMAVPYRPNEHLRVTLWGQRLYLVTDFELVVSFGGRKNAVISLPSMYEGLVSGLCGNYDKNRKNDMMLPSGALTQNLNTFGNSWEVKTEDALLRFPRAIPAEEEGQGAELGLRTGLQVSECSPEQLASNSTQACRVLADPQGPFAACHQTVAPEPFQEHCVLDLCSAQDPREQEELRCQVLSGYAILCQEAGAALAGWRDRTLCESPCLQNPCQNDGQCREQGATFTCECEVGYGGGLCMEPRDAPPPRKPASNLVGVLLGLLVPVVVVLLAVTRECIYRTRRKREKTQEGDRLARLVDTDTVLDCAC

SEQ ID NO: 102396 - protein, 2812 aa, Homo sapiens
  Payload ID: 20406
  Gene Name: zonadhesin (gene/pseudogene)
  ENSP ID: ENSP00000478371
MVPPVWTLLLLVGAALFRKEKPPDQKLVVRSSRDNYVLTQCDFEDDAKPLCDWSQVSADDEDWVRASGPSPTGSTGAPGGYPNGEGSYLHMESNSFHRGGVARLLSPDLWEQGPLCVHFAHHMFGLSWGAQLRLLLLSGEEGRRPDVLWKHWNTQRPSWMLTTVTVPAGFTLPTRLMFEGTRGSTAYLDIALDALSIRRGSCNRVCMMQTCSFDIPNDLCDWTWIPTASGAKWTQKKGSSGKPGVGPDGDFSSPGSGCYMLLDPKNARPGQKAVLLSPVSLSSGCLSFSFHYILRGQSPGAALHIYASVLGSIRKHTLFSGQPGPNWQAVSVNYTAVGRIQFAVVGVFGKTPEPAVAVDATSIAPCGEGFPQCDFEDNAHPFCDWVQTSGDGGHWALGHKNGPVHGMGPAGGFPNAGGHYIYLEADEFSQAGQSVRLVSRPFCAPGDICVEFAYHMYGLGEGTMLELLLGSPAGSPPIPLWKRVGSQRPYWQNTSVTVPSGHQQPMQLIFKGIQGSNTASVVAMGFILINPGTCPVKVLPELPPVSPVSSTGPSETTGLTENPTISTKKPTVSIEKPSVTTEKPTVPKEKPTIPTEKPTISTEKPTIPSEKPNMPSEKPTIPSEKPTILTEKPTIPSEKPTIPSEKPTISTEKPTVPTEEPTTPTEETTTSMEEPVIPTEKPSIPTEKPSIPTEKPTISMEETIISTEKPTISPEKPTIPTEKPTIPTEKSTISPEKPTTPTEKPTIPTEKPTISPEKPTTPTEKPTISPEKLTIPTEKPTIPTEKPTIPTEKPTISTEEPTTPTEETTISTEKPSIPMEKPTLPTEETTTSVEETTISTEKLTIPMEKPTISTEKPTIPTEKPTISPEKLTIPTEKLTIPTEKPTIPIEETTISTEKLTIPTEKPTISPEKPTISTEKPTIPTEKPTIPTEETTISTEKLTIPTEKPTISPEKLTIPTEKPTISTEKPTIPTEKLTIPTEKPTIPTEKPTIPTEKLTALRPPHPSPTATGLAALVMSPHAPSTPMTSVILGTTTTSRSSTERCPPNARYESCACPASCKSPRPSCGPLCREGCVCNPGFLFSDNHCIQASSCNCFYNNDYYEPGAEWFSPNCTEHCRCWPGSRVECQISQCGTHTVCQLKNGQYGCHPYAGTATCLVYGDPHYVTFDGRHFGFMGKCTYILAQPCGNSTDPFFRVTAKNEEQGQEGVSCLSKVYVTLPESTVTLLKGRRTLVGGQQVTLPAIPSKGVFLGASGRFVELQTEFGLRVRWDGDQQLYVTVSSTYSGKLCGLCGNYDGNSDNDHLKLDGSPAGDKEELGNSWQTDQDEDQECQKYQVVNSPSCDSSLQSSMSGPGFCGRLVDTHGPFETCLLHVKAASFFDSCMLDMCGFQGLQHLLCTHMSTMTTTCQDAGHAVKPWREPHFCPMACPPNSKYSLCAKPCPDTCHSGFSGMFCSDRCVEACECNPGFVLSGLECIPRSQCGCLHPAGSYFKVGERWYKPGCKELCVCESNNRIRCQPWRCRAQEFCGQQDGIYGCHAQGAATCTASGDPHYLTFDGALHHFMGTCTYVLTRPCWSRSQDSYFVVSATNENRGGILEVSYIKAVHVTVFDLSISLLRGCKVMLNGHRVALPVWLAQGRVTIRLSSNLVLLYTNFGLQVRYDGSHLVEVTVPSSYGGQLCGLCGNYNNNSLDDNLRPDRKLAGDSMQLGAAWKLPESSEPGCFLVGGKPSSCQENSMADAWNKNCAILINPQGPFSQCHQVVPPQSSFASCVHGQCGTKGDTTALCRSLQAYASLCAQAGQAPAWRNRTFCPMRCPPGSSYSPCSSPCPDTCSSINNPRDCPKALPCAESCECQKGHILSGTSCVPLGQCGCTDPAGSYHPVGERWYTENTCTRLCTCSVHNNITCFQSTCKPNQICWALDGLLHCRASGVGVCQLPGESHYVSFDGSNHSIPDACTLVLVKVCHPAMALPFFKISAKHEKEEGGTEAFRLHEVYIDIYDAQVTLQKGHRVLINSKQVTLPAISQIPGVSVKSSSIYSIVNIKIGVQVKFDGNHLLEIEIPTTYYGKVCGMCGNFNDEEEDELMMPSDEVANSDSEFVNSWKDKDIDPSCQSLLVDEQQIPAEQQENPSGNCRAADLRRAREKCEAALRAPVWAQCASRIDLTPFLVDCANTLCEFGGLYQALCQALQAFGATCQSQGLKPPLWRNSSFCPLECPAYSSYTNCLPSCSPSCWDLDGRCEGAKVPSACAEGCICQPGYVLSEDKCVPRSQCGCKDAHGGSIPLGKSWVSSGCTEKCVCTGGAIQCGDFRCPSGSHCQLTSDNSNSNCVSDKSEQCSVYGDPRYLTFDGFSYRLQGRMTYVLIKTVDVLPEGVEPLLVEGRNKMDPPRSSIFLQEVITTVYGYKVQLQAGLELVVNNQKMAVPYRPNEHLRVTLWGQRLYLVTDFELVVSFGGRKNAVISLPSMYEGLVSGLCGNYDKNRKNDMMLPSGALTQNLNTFGNSWEVKTEDALLRFPRAIPAEEEGQGAELGLRTGLQVSECSPEQLASNSTQACRVLADPQGPFAACHQTVAPEPFQEHCVLDLCSAQDPREQEELRCQVLSGHGVSSRYHISELYDTLPSILCQPGRPRGLRGPLRGRLRQHPRLCLQWHPEPPLADCGCTSNGIYYQLGSSFLTEDCSQRCTCASSRILLCEPFSCRAGEVCTLGNHTQGCFPESPCLQNPCQNDGQCREQGATFTCECEVGYGGGLCMEPRDAPPPRKPASNLVGVLLGLLVPVVVVLLAVTRECIYRTRRKREKTQEGDRLARLVDTDTVLDCAC

SEQ ID NO: 102397 - protein, 2812 aa, Homo sapiens; identical to SEQ ID NO: 102396
  Payload ID: 20406
  Gene Name: zonadhesin (gene/pseudogene)
  ENSP ID: ENSP00000480750

SEQ ID NO: 102398 - protein, 2721 aa, Homo sapiens; identical to SEQ ID NO: 102395
  Payload ID: 20406
  Gene Name: zonadhesin (gene/pseudogene)
  ENSP ID: ENSP00000481742

SEQ ID NO: 102399 - protein, 459 aa, Homo sapiens
  Payload ID: 20407
  Gene Name: ZPR1 zinc finger
  Uniprot ID: O75312
  ENSP ID: ENSP00000227322
MAASGAVEPGPPGAAVAPSPAPAPPPAPDHLFRPISAEDEEQQPTEIESLCMNCYCNGMTRLLLTKIPFFREIIVSSFSCEHCGWNNTEIQSAGRIQDQGVRYTLSVRALEDMNREVVKTDSAATRIPELDFEIPAFSQKGALTTVEGLITRAISGLEQDQPARRANKDATAERIDEFIVKLKELKQVASPFTLIIDDPSGNSFVENPHAPQKDDALVITHYNRTRQQEEMLGLQEEAPAEKPEEEDLRNEVLQFSTNCPECNAPAQTNMKLVQIPHFKEVIIMATNCENCGHRTNEVKSGGAVEPLGTRITLHITDASDMTRDLLKSETCSVEIPELEFELGMAVLGGKFTTLEGLLKDIRELVTKNPFTLGDSSNPGQTERLQEFSQKMDQIIEGNMKAHFIMDDPAGNSYLQNVYAPEDDPEMKVERYKRTFDQNEELGLNDMKTEGYEAGLAPQR

SEQ ID NO: 102400 - protein, 430 aa, Homo sapiens
  Payload ID: 20407
  Gene Name: ZPR1 zinc finger
  ENSP ID: ENSP00000390391
  MOD_RES (1)..(1): Any amino acid
XAASGAVEPGPPGAAVAPSPAPAPPPAPDHLFRPISAEDEEQQPTEIESLCMNCYCNGMTRLLLTKIPFFREIIVSSFSCEHCGWNNTEIQSAGRIQDQGVRYTLSVRALEDMNREVVKTDSAATRIPELDFEIPAFSQKGALTTVEGLITRAISGLEQDQPARRANKDATAERIDEFIVKLKELKQVASPFTLIIDDPSGNSFVENPHAPQKDDALVITHYNRTRQQEEMLGLQEEAPAEKPEEEDLRNEVLQFSTNCPECNAPAQTNMKLVQIPHFKEVIIMATNCENCGHRTNEVKSGGAVEPLGTRITLHITDASDMTRDLLKSETCSVEIPELEFELGMAVLGGKFTTLEGLLKDIRELIIEGNMKAHFIMDDPAGNSYLQNVYAPEDDPEMKVERYKRTFDQNEELGLNDMKTEGYEAGLAPQR

SEQ ID NO: 102401 - protein, 76 aa, Homo sapiens
  Payload ID: 20407
  Gene Name: ZPR1 zinc finger
  ENSP ID: ENSP00000391077
  MOD_RES (1)..(1): Any amino acid
XFRPISAEDEEQQPTEIESLCMNCYCNRNNSELLFLRALWLEQHGDPVGRQDPGPGSALHFVCQGSGGHEQRSGED

SEQ ID NO: 102402 - protein, 386 aa, Homo sapiens
  Payload ID: 20407
  Gene Name: ZPR1 zinc finger
  ENSP ID: ENSP00000394495
  MOD_RES (1)..(1): Any amino acid
XGAVEPGPPGAAVAPSPAPAPPPAPDHLFRPISAEDEEQQPTEIESLCMNCYCNDMNREVVKTDSAATRIPELDFEIPAFSQKGALTTVEGLITRAISGLEQDQPARRANKDATAERIDEFIVKLKELKQVASPFTLIIDDPSGNSFVENPHAPQKDDALVITHYNRTRQQEEMLGLQVLQFSTNCPECNAPAQTNMKLVQIPHFKEVIIMATNCENCGHRTNEVKSGGAVEPLGTRITLHITDASDMTRDLLKSETCSVEIPELEFELGMAVLGGKFTTLEGLLKDIRELVTKNPFTLGDSSNPGQTERLQEFSQKMDQIIEGNMKAHFIMDDPAGNSYLQNVYAPEDDPEMKVERYKRTFDQNEELGLNDMKTEGYEAGLAPQR

SEQ ID NO: 102403 - protein, 49 aa, Homo sapiens
  Payload ID: 20407
  Gene Name: ZPR1 zinc finger
  ENSP ID: ENSP00000410141
MAASGAVEPGPPGAAVAPSPAPAPPPAPDHLFRPISAEDEEQQPTEIEA

SEQ ID NO: 102404 - protein, 102 aa, Homo sapiens
  Payload ID: 20407
  Gene Name: ZPR1 zinc finger
  ENSP ID: ENSP00000415505
IVKLKELKQVASPFTLIIDDPSGNSFVENPHAPQKDDALVITHYNRTRQQEEMLGLQEEAPAEKPEEEDLRNEVLQFSTNCPECNAPAQTNMKLMVVLFAWK

SEQ ID NO: 102405 - protein, 157 aa, Homo sapiens
  Payload ID: 20408
  Gene Name: ZW10 interacting kinetochore protein
  ENSP ID: ENSP00000322850
MEEAQRKRTQLREAFEQLQAKKQMAMEKRRAVQNQWQLQQEKHLQHLAEVSAEVRERKTGTQQELDRVFQKLGNLKQQAEQERDKLQRYQTFLQLLYTLQGKLLFPEAEAEAENLPDDKPQQPTRPQEQSTGDTMGRDPGVSFKAVGLQPAGDVNLP

SEQ ID NO: 102406 - protein, 230 aa, Homo sapiens
  Payload ID: 20408
  Gene Name: ZW10 interacting kinetochore protein
  Uniprot ID: O95229
  ENSP ID: ENSP00000354921
MEAAETEAEAAALEVLAEVAGILEPVGLQEEAELPAKILVEFVVDSQKKDKLLCSQLQVADFLQNILAQEDTAKGLDPLASEDTSRQKAIAAKEQWKELKATYREHVEAIKIGLTKALTQMEEAQRKRTQLREAFEQLQAKKQMAMEKRRAVQNQWQLQQEKHLQHLAEVSAEGKLLFPEAEAEAENLPDDKPQQPTRPQEQSTGDTMGRDPGVSFKAVGLQPAGDVNLP

SEQ ID NO: 102407 - protein, 277 aa, Homo sapiens
  Payload ID: 20408
  Gene Name: ZW10 interacting kinetochore protein
  Uniprot ID: O95229
  ENSP ID: ENSP00000363055
MEAAETEAEAAALEVLAEVAGILEPVGLQEEAELPAKILVEFVVDSQKKDKLLCSQLQVADFLQNILAQEDTAKGLDPLASEDTSRQKAIAAKEQWKELKATYREHVEAIKIGLTKALTQMEEAQRKRTQLREAFEQLQAKKQMAMEKRRAVQNQWQLQQEKHLQHLAEVSAEVRERKTGTQQELDRVFQKLGNLKQQAEQERDKLQRYQTFLQLLYTLQGKLLFPEAEAEAENLPDDKPQQPTRPQEQSTGDTMGRDPGVSFKAVGLQPAGDVNLP

SEQ ID NO: 102408 - protein, 277 aa, Homo sapiens; identical to SEQ ID NO: 102407
  Payload ID: 20408
  Gene Name: ZW10 interacting kinetochore protein
  Uniprot ID: O95229
  ENSP ID: ENSP00000378801

SEQ ID NO: 102409 - protein, 48 aa, Homo sapiens
  Payload ID: 20408
  Gene Name: ZW10 interacting kinetochore protein
  ENSP ID: ENSP00000473330
MEAAETEAEAAALEVLAEVAGILEPVGLQEEAELPAKILVEFVVVCTR

SEQ ID NO: 102410 - protein, 779 aa, Homo sapiens
  Payload ID: 20409
  Gene Name: zw10 kinetochore protein
  Uniprot ID: O43264
  ENSP ID: ENSP00000200135
MASFVTEVLAHSGRLEKEDLGTRISRLTRRVEEIKGEVCNMISKKYSEFLPSMQSAQGLITQVDKLSEDIDLLKSRIESEVRRDLHVSTGEFTDLKQQLERDSVVLSLLKQLQEFSTAIEEYNCALTEKKYVTGAQRLEEAQKCLKLLKSRKCFDLKILKSLSMELTIQKQNILYHLGEEWQKLIVWKFPPSKDTSSLESYLQTELHLYTEQSHKEEKTPMPPISSVLLAFSVLGELHSKLKSFGQMLLKYILRPLASCPSLHAVIESQPNIVIIRFESIMTNLEYPSPSEVFTKIRLVLEVLQKQLLDLPLDTDLENEKTSTVPLAEMLGDMIWEDLSECLIKNCLVYSIPTNSSKLQQYEEIIQSTEEFENALKEMRFLKGDTTDLLKYARNINSHFANKKCQDVIVAARNLMTSEIHNTVKIIPDSKINVPELPTPDEDNKLEVQKVSNTQYHEVMNLEPENTLDQHSFSLPTCRISESVKKLMELAYQTLLEATTSSDQCAVQLFYSVRNIFHLFHDVVPTYHKENLQKLPQLAAIHHNNCMYIAHHLLTLGHQFRLRLAPILCDGTATFVDLVPGFRRLGTECFLAQMRAQKGELLERLSSARNFSNMDDEENYSAASKAVRQVLHQLKRLGIVWQDVLPVNIYCKAMGTLLNTAISEVIGKITALEDISTEDGDRLYSLCKTVMDEGPQVFAPLSEESKNKKYQEEVPVYVPKWMPFKELMMMLQASLQEIGDRWADGKGPLAAAFSSSEVKALIRALFQNTERRAAALAKIK

SEQ ID NO: 102411 - protein, 135 aa, Homo sapiens
  Payload ID: 20409
  Gene Name: zw10 kinetochore protein
  ENSP ID: ENSP00000439197
MASFVTEVLAHSGRLEKEDLGTRISRLTRRVEEIKGEVCNMISKKYSEFLPSMQSAQGLITQVDKLSEDIDLLKSRIESEIPAVWNLTYKLNFIYTLNNRTKRRRPLCHPSVLSSWHFLFLENYTASLNHLVRCC

SEQ ID NO: 102412 - protein, 672 aa, Homo sapiens
  Payload ID: 20409
  Gene Name: zw10 kinetochore protein
  Uniprot ID: O43264
  ENSP ID: ENSP00000440879
MASFVTEVLAHSGRLEKEDLGTRISRLTRRVEEIKGEVCNMISKKYSEFLPSMQSAQGLITQVDKLSEDIDLLKSRIESEVRRDLHVSTGEFTDLKQQLERDSVVLSLLKQLQEFSTAIEEYNCALTEKKYVTGAQRLEEAQKCLKLLKSRKCFDLKILKSLSMELTIQKQNILYHLGEEWQKLIVWKFPPSKDTSSLESYLQTELHLYTEQSHKEEKTPMPPISSVLLAFSVLGELHSKLKSFGQMLLKYILRPLASCPSLHAVIESQPNIVIIRFESIMTNLEYPSPSEVFTKIRLVLEVLQKQLLDLPLDTDLENEKTSTVPLAEMLGDMIWEDLSECLIKNCLVYSIPTNSSKLQQYEEIIQSTEEFENALKEMRFLKGDTTDLLKYARNINSHFANKKCQDVIVAARNLMTSEIHNTVKIIPDSKINVPELPTPDEDNKLEVQKVSNTQYHEVMNLEPENTLDQHSFSLPTCRISESVKKLMELAYQTLLEATTSSDQCAVQLFYSVRNIFHLFHDVVPTYHKENLQKLPQLAAIHHNNCMYIAHHLLTLGHQFRLRLAPILCDGTATFVDLVPGFRRLGTECFLAQMRAQKGELLERLSSARNFSNMDDEENYSAASKAVRQVLHQLKRLGIVWQDVLPVNIYCKAMGTLLNTAISEVIGKITALE

SEQ ID NO: 102413 - protein, 591 aa, Homo sapiens
  Payload ID: 20410
  Gene Name: zwilch kinetochore protein
  Uniprot ID: Q9H900
  ENSP ID: ENSP00000311429
MWERLNCAAEDFYSRLLQKFNEEKKGIRKDPFLYEADVQVQLISKGQPNPLKNILNENDIVFIVEKVPLEKEETSHIEELQSEETAISDFSTGENVGPLALPVGKARQLIGLYTMAHNPNMTHLKINLPVTALPPLWVRCDSSDPEGTCWLGAELITTNNSITGIVLYVVSCKADKNYSVNLENLKNLHKKRHHLSTVTSKGFAQYELFKSSALDDTITASQTAIALDISWSPVDEILQIPPLSSTATLNIKVESGEPRGPLNHLYRELKFLLVLADGLRTGVTEWLEPLEAKSAVELVQEFLNDLNKLDGFGDSTKKDTEVETLKHDTAAVDRSVKRLFKVRSDLDFAEQLWCKMSSSVISYQDLVKCFTLIIQSLQRGDIQPWLHSGSNSLLSKLIHQSYHGTMDTVSLSGTIPVQMLLEIGLDKLKKDYISFFIGQELASLNHLEYFIAPSVDIQEQVYRVQKLHHILEILVSCMPFIKSQHELLFSLTQICIKYYKQNPLDEQHIFQLPVRPTAVKNLYQSEKPQKWRVEIYSGQKKIKTVWQLSDSSPIDHLNFHKPDFSELTLNGSLEERIFFTNMVTCSQVHFK

SEQ ID NO: 102414 - protein, 477 aa, Homo sapiens
  Payload ID: 20410
  Gene Name: zwilch kinetochore protein
  Uniprot ID: Q9H900
  ENSP ID: ENSP00000402217
MAHNPNMTHLKINLPVTALPPLWVRCDSSDPEGTCWLGAELITTNNSITGIVLYVVSCKADKNYSVNLENLKNLHKKRHHLSTVTSKGFAQYELFKSSALDDTITASQTAIALDISWSPVDEILQIPPLSSTATLNIKVESGEPRGPLNHLYRELKFLLVLADGLRTGVTEWLEPLEAKSAVELVQEFLNDLNKLDGFGDSTKKDTEVETLKHDTAAVDRSVKRLFKVRSDLDFAEQLWCKMSSSVISYQDLVKCFTLIIQSLQRGDIQPWLHSGSNSLLSKLIHQSYHGTMDTVSLSGTIPVQMLLEIGLDKLKKDYISFFIGQELASLNHLEYFIAPSVDIQEQVYRVQKLHHILEILVSCMPFIKSQHELLFSLTQICIKYYKQNPLDEQHIFQLPVRPTAVKNLYQSEKPQKWRVEIYSGQKKIKTVWQLSDSSPIDHLNFHKPDFSELTLNGSLEERIFFTNMVTCSQVHFK

SEQ ID NO: 102415 - protein, 477 aa, Homo sapiens; identical to SEQ ID NO: 102414
  Payload ID: 20410
  Gene Name: zwilch kinetochore protein
  Uniprot ID: Q9H900
  ENSP ID: ENSP00000437749

SEQ ID NO: 102416 - protein, 477 aa, Homo sapiens; identical to SEQ ID NO: 102414
  Payload ID: 20410
  Gene Name: zwilch kinetochore protein
  Uniprot ID: Q9H900
  ENSP ID: ENSP00000454737

SEQ ID NO: 102417 - protein, 48 aa, Homo sapiens
  Payload ID: 20410
  Gene Name: zwilch kinetochore protein
  ENSP ID: ENSP00000455336
TVWQLSDSSPIDHLNFHKPDFSELTLNGSLEERIFFTNMVTCSQVHFK

SEQ ID NO: 102418 - protein, 98 aa, Homo sapiens
  Payload ID: 20410
  Gene Name: zwilch kinetochore protein
  ENSP ID: ENSP00000455548
ICIKYYKQNPLDEQHIFQLPVRPTAVKNLYQSEKPQKWRVEIYSGQKKIKTVWQLSDSSPIDHLNFHKPDFSELTLNGSLEERIFFTNMVTCSQVHFK

SEQ ID NO: 102419 - protein, 84 aa, Homo sapiens
  Payload ID: 20410
  Gene Name: zwilch kinetochore protein
  ENSP ID: ENSP00000456689
MAHNPNMTHLKINLPVTALPPLWVRCDSSDPEGTCWLGAELITTNNSITGIVLYVVSCKADKNYSVNLENLKNLHKKRHHLSTV

SEQ ID NO: 102420 - protein, 477 aa, Homo sapiens; identical to SEQ ID NO: 102414
  Payload ID: 20410
  Gene Name: zwilch kinetochore protein
  Uniprot ID: Q9H900
  ENSP ID: ENSP00000477955

SEQ ID NO: 102421 - protein, 710 aa, Homo sapiens
  Payload ID: 20411
  Gene Name: ZXD family zinc finger C
  Uniprot ID: Q2QGD7
  ENSP ID: ENSP00000337694
MDLPALLPAPTARGGQHGGGPGPLRRAPAPLGASPARRRLLLVRGPEDGGPGARPGEASGPSPPPAEDDSDGDSFLVLLEVPHGGAAAEAAGSQEAEPGSRVNLASRPEQGPSGPAAPPGPGVAPAGAVTISSQDLLVRLDRGVLALSAPPGPATAGAAAPRRAPQASGPSTPGYRCPEPQCALAFAKKHQLKVHLLTHGGGQGRRPFKCPLEGCGWAFTTSYKLKRHLQSHDKLRPFGCPVGGCGKKFTTVYNLKAHMKGHEQESLFKCEVCAERFPTHAKLSSHQRSHFEPERPYKCDFPGCEKTFITVSALFSHNRAHFREQELFSCSFPGCSKQYDKACRLKIHLRSHTGERPFICDSDSCGWTFTSMSKLLRHRRKHDDDRRFTCPVEGCGKSFTRAEHLKGHSITHLGTKPFECPVEGCCARFSARSSLYIHSKKHVQDVGAPKSRCPVSTCNRLFTSKHSMKAHMVRQHSRRQDLLPQLEAPSSLTPSSELSSPGQSELTNMDLAALFSDTPANASGSAGGSDEALNSGILTIDVTSVSSSLGGNLPANNSSLGPMEPLVLVAHSDIPPSLDSPLVLGTAATVLQQGSFSVDDVQTVSAGALGCLVALPMKNLSDDPLALTSNSNLAAHITTPTSSSTPRENASVPELLAPIKVEPDSPSRPGAVGQQEGSHGLPQSTLPSPAEQHGAQDTELSAGTGNFYLV

SEQ ID NO: 102422 - protein, 858 aa, Homo sapiens
  Payload ID: 20411
  Gene Name: ZXD family zinc finger C
  Uniprot ID: Q2QGD7
  ENSP ID: ENSP00000374359
MDLPALLPAPTARGGQHGGGPGPLRRAPAPLGASPARRRLLLVRGPEDGGPGARPGEASGPSPPPAEDDSDGDSFLVLLEVPHGGAAAEAAGSQEAEPGSRVNLASRPEQGPSGPAAPPGPGVAPAGAVTISSQDLLVRLDRGVLALSAPPGPATAGAAAPRRAPQASGPSTPGYRCPEPQCALAFAKKHQLKVHLLTHGGGQGRRPFKCPLEGCGWAFTTSYKLKRHLQSHDKLRPFGCPVGGCGKKFTTVYNLKAHMKGHEQESLFKCEVCAERFPTHAKLSSHQRSHFEPERPYKCDFPGCEKTFITVSALFSHNRAHFREQELFSCSFPGCSKQYDKACRLKIHLRSHTGERPFICDSDSCGWTFTSMSKLLRHRRKHDDDRRFTCPVEGCGKSFTRAEHLKGHSITHLGTKPFECPVEGCCARFSARSSLYIHSKKHVQDVGAPKSRCPVSTCNRLFTSKHSMKAHMVRQHSRRQDLLPQLEAPSSLTPSSELSSPGQSELTNMDLAALFSDTPANASGSAGGSDEALNSGILTIDVTSVSSSLGGNLPANNSSLGPMEPLVLVAHSDIPPSLDSPLVLGTAATVLQQGSFSVDDVQTVSAGALGCLVALPMKNLSDDPLALTSNSNLAAHITTPTSSSTPRENASVPELLAPIKVEPDSPSRPGAVGQQEGSHGLPQSTLPSPAEQHGAQDTELSAGTGNFYLESGGSARTDYRAIQLAKEKKQRGAGSNAGASQSTQRKIKEGKMSPPHFHASQNSWLCGSLVVPSGGRPGPAPAAGVQCGAQGVQVQLVQDDPSGEGVLPSARGPATFLPFLTVDLPVYVLQEVLPSSGGPAGPEATQFPGSTINLQDLQ

SEQ ID NO: 102423 - protein, 418 aa, Homo sapiens
  Payload ID: 20411
  Gene Name: ZXD family zinc finger C
  ENSP ID: ENSP00000426532
  MOD_RES (1)..(1): Any amino acid
XERPYKCDFPGCEKTFITVSALFSHNRAHFREQELFSCSFPGCSKQYDKACRLKIHLRSHTGERPFICDSDSCGWTFTSMSKLLRHRRKHDDDRRFTCPVEGCGKSFTRAEHLKGHSITHLGTKPFECPVEGCCARFSARSSLYIHSKKHVQDVGAPKSRCPVSTCNRLFTSKHSMKAHMVRQHSRRQDLLPQLEAPSSLTPSSELSSPGQSELTNMDLAALFSDTPANASGSAGGSDEALNSGILTIDVTSVSSSLGGNLPANNSSLGPMEPLVLVAHSDIPPSLDSPLVLGTAATVLQQGSFSVDDVQTVSAGALGCLVALPMKNLSDDPLALTSNSNLAAHITTPTSSSTPRENASVPELLAPIKVEPDSPSRPGAVGQQEGSHGLPQSTLPSPAEQHGAQDTELSAGTGNFYLV

SEQ ID NO: 102424 - protein, 759 aa, Homo sapiens
  Payload ID: 20412
  Gene Name: zyg-11 family member A, cell cycle regulator
  Uniprot ID: Q6WRX3
  ENSP ID: ENSP00000360583
MVHFLHPGHTPRNIVPPDAQKDALGCCVVQEEASPYTLVNICLNVLIANLEKLCSERPDGTLCLPEHWSFPQEVAERFLRVMTWQGKLTDRTASIFRGNQMKLKLVNIQKAKISTAAFIKAFCRHKLIELNATAVHADLPVPDIISGLCSNRWIQQNLQCLLLDSTSIPQNSRLLFFSQLTGLRILSVFNVCFHTEDLANVSQLPRLESLDISNTLVTDISALLTCKDRLKSLTMHYLKCLAMTKSQILAVIRELKCLLHLDISDHRQLKSDLAFHLLQQKDILPNVVSLDISGGNCITDEAVELFIRLRPAMQFVGLLATDAGSSDFFTTKQGLRVAGGASMSQISEALSRYRNRSCFVKEALHRLFTETFSMEVTMPAILKLVAIGMRNHPLDLRVQFTASACALNLTRQGLAKGMPVRLLSEVTCLLFKALKNFPHYQQLQKNCLLSLTNSRILVDVPFDRFDAAKFVMRWLCKHENPKMQTMAVSVTSILALQLSPEQTAQLEELFMAVKELLAIVKQKTTENLDDVTFLFTLKALWNLTDGSPAACKHFIENQGLQIFIQVLETFSESAIQSKVLGLLNNIAEVRELSSKLVTEDVLKHINSLLCSREMEVSYFAAGIIAHLTSDRQLWISRDFQRRTLLQDLHATIQNWPSSSCKMTALVTYRSFKTFFPLLGNFSQPEVQLWALWAMYHVCSKNPSKYCKMLVEEEGLQLLCDIQEHSEATPKAQQIAASILDDFRMHFMNYQRPTLCQMPF

SEQ ID NO: 102425 - protein, 417 aa, Homo sapiens
  Payload ID: 20412
  Gene Name: zyg-11 family member A, cell cycle regulator
  Uniprot ID: Q6WRX3
  ENSP ID: ENSP00000360587
MSQISEALSRYRNRSCFVKEALHRLFTETFSMEVTMPAILKLVAIGMRNHPLDLRVQFTASACALNLTRQGLAKGMPVRLLSEVTCLLFKALKNFPHYQQLQKNCLLSLTNSRILVDVPFDRFDAAKFVMRWLCKHENPKMQTMAVSVTSILALQLSPEQTAQLEELFMAVKELLAIVKQKTTENLDDVTFLFTLKALWNLTDGSPAACKHFIENQGLQIFIQVLETFSESAIQSKVLGLLNNIAEVRELSSKLVTEDVLKHINSLLCSREMEVSYFAAGIIAHLTSDRQLWISRDFQRRTLLQDLHATIQNWPSSSCKMTALVTYRSFKTFFPLLGNFSQPEVQLWALWAMYHVCSKNPSKYCKMLVEEEGLQLLCDIQEHSEATPKAQQIAASILDDFRMHFMNYQRPTLCQMPF

SEQ ID NO: 102426 - protein, 417 aa, Homo sapiens; identical to SEQ ID NO: 102425
  Payload ID: 20412
  Gene Name: zyg-11 family member A, cell cycle regulator
  Uniprot ID: Q6WRX3
  ENSP ID: ENSP00000482761

SEQ ID NO: 102427 - protein, 744 aa, Homo sapiens
  Payload ID: 20413
  Gene Name: zyg-11 family member B, cell cycle regulator
  Uniprot ID: Q9C0D3
  ENSP ID: ENSP00000294353
MPEDQAGAAMEEASPYSLLDICLNFLTTHLEKFCSARQDGTLCLQEPGVFPQEVADRLLRTMAFHGLLNDGTVGIFRGNQMRLKRACIRKAKISAVAFRKAFCHHKLVELDATGVNADITITDIISGLGSNKWIQQNLQCLVLNSLTLSLEDPYERCFSRLSGLRALSITNVLFYNEDLAEVASLPRLESLDISNTSITDITALLACKDRLKSLTMHHLKCLKMTTTQILDVVRELKHLNHLDISDDKQFTSDIALRLLEQKDILPNLVSLDVSGRKHVTDKAVEAFIQQRPSMQFVGLLATDAGYSEFLTGEGHLKVSGEANETQIAEALKRYSERAFFVREALFHLFSLTHVMEKTKPEILKLVVTGMRNHPMNLPVQLAASACVFNLTKQDLAAGMPVRLLADVTHLLLKAMEHFPNHQQLQKNCLLSLCSDRILQDVPFNRFEAAKLVMQWLCNHEDQNMQRMAVAIISILAAKLSTEQTAQLGTELFIVRQLLQIVKQKTNQNSVDTTLKFTLSALWNLTDESPTTCRHFIENQGLELFMRVLESFPTESSIQQKVLGLLNNIAEVQELHSELMWKDFIDHISSLLHSVEVEVSYFAAGIIAHLISRGEQAWTLSRSQRNSLLDDLHSAILKWPTPECEMVAYRSFNPFFPLLGCFTTPGVQLWAVWAMQHVCSKNPSRYCSMLIEEGGLQHLYNIKDHEHTDPHVQQIAVAILDSLEKHIVRHGRPPPCKKQPQARLN

SEQ ID NO: 102428 - protein, 566 aa, Homo sapiens
  Payload ID: 20413
  Gene Name: zyg-11 family member B, cell cycle regulator
  ENSP ID: ENSP00000441315
MPEDQAGAAMEEASPYSLLDICLNFLTTHLEKFCSARQDGTLCLQEPGVFPQEVADRLLRTMAFHGLLNDGTVGIFRGNQMRLKRACIRKAKISAVAFRKAFCHHKLVELDATGVNADITITDIISGLGSNKWIQQNLQCLVLNSLTLSLEDPYERCFSRLSGLRALSITNVLFYNEDLAEVASLPRLESLDISNTSITDITALLACKDRLKSLTMHHLKCLKMTTTQILDVVRELKHLNHLDISDDKQFTSDIALRLLEQKDILPNLVSLDVSGRKHVTDKAVEAFIQQRPSMQFVGLLATDAGYSEFLTGEGHLKVSGEANETQIAEALKRYSERAFFVREALFHLFSLTHVMEKTKPEILKLVVTGMRNHPMNLPVQLAASACVFNLTKQDLAAGMPVRLLADVTHLLLKAMEHFPNHQQLQKNCLLSLCSDRILQDVPFNRFEAAKLVMQWLCNHEDQNMQRMAVAIISILAAKLSTEQTAQLGTELFIVRQLLQIVKQKTNQNSVDTTLKFTLSALWNLTDESPTTCRHFIENQGLELFMRVLESFPTESSIQQKVLGLLG

SEQ ID NO: 102429 - protein, 766 aa, Homo sapiens
  Payload ID: 20414
  Gene Name: zyg-11 related, cell cycle regulator
  Uniprot ID: Q7Z7L7
  ENSP ID: ENSP00000291900
MASDTPESLMALCTDFCLRNLDGTLGYLLDKETLRLHPDIFLPSEICDRLVNEYVELVNAACNFEPHESFFSLFSDPRSTRLTRIHLREDLVQDQDLEAIRKQDLVELYLTNCEKLSAKSLQTLRSFSHTLVSLSLFGCTNIFYEEENPGGCEDEYLVNPTCQVLVKDFTFEGFSRLRFLNLGRMIDWVPVESLLRPLNSLAALDLSGIQTSDAAFLTQWKDSLVSLVLYNMDLSDDHIRVIVQLHKLRHLDISRDRLSSYYKFKLTREVLSLFVQKLGNLMSLDISGHMILENCSISKMEEEAGQTSIEPSKSSIIPFRALKRPLQFLGLFENSLCRLTHIPAYKVSGDKNEEQVLNAIEAYTEHRPEITSRAINLLFDIARIERCNQLLRALKLVITALKCHKYDRNIQVTGSAALFYLTNSEYRSEQSVKLRRQVIQVVLNGMESYQEVTVQRNCCLTLCNFSIPEELEFQYRRVNELLLSILNPTRQDESIQRIAVHLCNALVCQVDNDHKEAVGKMGFVVTMLKLIQKKLLDKTCDQVMEFSWSALWNITDETPDNCEMFLNFNGMKLFLDCLKEFPEKQELHRNMLGLLGNVAEVKELRPQLMTSQFISVFSNLLESKADGIEVSYNACGVLSHIMFDGPEAWGVCEPQREEVEERMWAAIQSWDINSRRNINYRSFEPILRLLPQGISPVSQHWATWALYNLVSVYPDKYCPLLIKEGGMPLLRDIIKMATARQETKEMARKVIEHCSNFKEENMDTSR

SEQ ID NO: 102430 - protein, 101 aa, Homo sapiens
  Payload ID: 20414
  Gene Name: zyg-11 related, cell cycle regulator
  ENSP ID: ENSP00000389271
MASDTPESLMALCTDFCLRNLDGTLGYLLDKETLRLHPDIFLPSEICDRLVNEYVELVNAACNFEPHESFFSLFSDPRSTRLTRIHLREDLVQDQDLEAIR

SEQ ID NO: 102431 - protein, 164 aa, Homo sapiens
  Payload ID: 20414
  Gene Name: zyg-11 related, cell cycle regulator
  ENSP ID: ENSP00000393051
MASDTPESLMALCTDFCLRNLDGTLGYLLDKETLRLHPDIFLPSEICDRLVNEYVELVNAACNFEPHESFFSLFSDPRSTRLTRIHLREDLVQDQDLEAIRKQDLVELYLTNCEKLSAKSLQTLRSFSHTLVSLSLFGCTNIFYEEENPGGCEDEYLVNPTCQV

SEQ ID NO: 102432 - protein, 424 aa, Homo sapiens
  Payload ID: 20415
  Gene Name: zygote arrest 1
  Uniprot ID: Q86SH2
  ENSP ID: ENSP00000329803
MAALGDEVLDGYVFPACPPCSYRYPYPAATKGKGAAGGSWQQRGRGCLPASSPCSAGAASLSFPGCGRLTAAEYFDSYQRERLMALLAQVGPGLGPRARRAGSCDVAVQVSPRIDAAVQCSLGRRTLQRRARDPESPAGPGAEGTTGGGSFSQQPSRRGLEQGSPQNGAPRPMRFPRTVAVYSPLALRRLTAFLEGPGPAAGEQRSGASDGERGPPPARLQGPEEGEVWTKKAPRRPQSDDDGEAQAAVRASWEQPADGPELPPREAQEGEAAPRSALRSPGQPPSAGRARDGGDGREAAVAGEGPSPRSPELGKERLRFQFLEQKYGYYHCKDCNIRWESAYVWCVQGTNKVYFKQFCRTCQKSYNPYRVEDITCQSCKQTRCSCPVKLRHVDPKRPHRQDLCGRCKGKRLSCDSTFSFKYII

SEQ ID NO: 102433 - protein, 321 aa, Homo sapiens
  Payload ID: 20416
  Gene Name: zygote arrest 1-like
  Uniprot ID: A6NP61
  ENSP ID: ENSP00000344616
MERFVRVPYGLYQGYGSTVPLGQPGLSGHKQPDWRQNMGPPTFLARPGLLVPANAPDYCIDPYKRAQLKAILSQMNPSLSPRLCKPNTKEVGVQVSPRVDKAVQCSLGPRTLSSCSPWDGRDPQEPLPACGVTSPATGRRGLIRLRRDGDEAESKALPGPAEASQPQPPSRRSGADRQEEPGQLEESGEKDAPCPQETKSKQVPGDAASEPLRRPNFQFLEPKYGYFHCKDCKTRWESAYVWCISGTNKVYFKQLCCKCQKSFNPYRVEAIQCQTCSKSHCSCPQKKRHIDLRRPHRQELCGRCKDKRFSCGNIYSFKYVM

SEQ ID NO: 102434 - protein, 321 aa, Homo sapiens; identical to SEQ ID NO: 102433
  Payload ID: 20416
  Gene Name: zygote arrest 1-like
  Uniprot ID: A6NP61
  ENSP ID: ENSP00000437289

SEQ ID NO: 102435 - protein, 167 aa, Homo sapiens
  Payload ID: 20417
  Gene Name: zymogen granule protein 16
  Uniprot ID: O60844
  ENSP ID: ENSP00000383563
MLTVALLALLCASASGNAIQARSSSYSGEYGGGGGKRFSHSGNQLDGPITALRVRVNTYYIVGLQVRYGKVWSDYVGGRNGDLEEIFLHPGESVIQVSGKYKWYLKKLVFVTDKGRYLSFGKDSGTSFNAVPLHPNTVLRFISGRSGSLIDAIGLHWDVYPSSCSRC

SEQ ID NO: 102436 - protein, 208 aa, Homo sapiens
  Payload ID: 20418
  Gene Name: zymogen granule protein 16B
  Uniprot ID: Q96DA0
  ENSP ID: ENSP00000371715
MGAQGAQESIKAMWRVPGTTRRPVTGESPGMHRPEAMLLLLTLALLGGPTWAGKMYGPGGGKYFSTTEDYDHEITGLRVSVGLLLVKSVQVKLGDSWDVKLGALGGNTQEVTLQPGEYITKVFVAFQAFLRGMVMYTSKDRYFYFGKLDGQISSAYPSQEGQVLVGIYGQYQLLGIKSIGFEWNYPLEEPTTEPPVNLTYSANSPVGR

SEQ ID NO: 102437 - protein, 69 aa, Homo sapiens
  Payload ID: 20418
  Gene Name: zymogen granule protein 16B
  ENSP ID: ENSP00000458847
  MOD_RES (1)..(1): Any amino acid
XRRPVTGESPGMHRPEAMLLLLTLALLGGPTWAGKMYGPGGGKYFSTTEDYDHEITGLRVSVGLLLVKR

SEQ ID NO: 102438 - protein, 95 aa, Homo sapiens
  Payload ID: 20418
  Gene Name: zymogen granule protein 16B
  ENSP ID: ENSP00000460793
  MOD_RES (1)..(1): Any amino acid
XAQGAQESIKAMWRVPGTTRRPVTGESPGMHRPEAMLLLLTLALLGGPTWAGKMYGPGGGKYFSTTEDYDHEITGLRVSVGLLLVKRFLEGVIYE

SEQ ID NO: 102439 - protein, 178 aa, Homo sapiens
  Payload ID: 20418
  Gene Name: zymogen granule protein 16B
  ENSP ID: ENSP00000461740
MHRPEAMLLLLTLALLGGPTWAGKMYGPGGGKYFSTTEDYDHEITGLRVSVGLLLVKSVQVKLGDSWDVKLGALGGNTQEVTLQPGEYITKVFVAFQAFLRGMVMYTSKDRYFYFGKLDGQISSAYPSQEGQVLVGIYGQYQLLGIKSIGFEWNYPLEEPTTEPPVNLTYSANSPVGR

SEQ ID NO: 102440 - protein, 95 aa, Homo sapiens; identical to SEQ ID NO: 102438
  Payload ID: 20418
  Gene Name: Zymogen granule protein 16B
  ENSP ID: ENSP00000488971
  MOD_RES (1)..(1): Any amino acid

SEQ ID NO: 102441 - protein, 208 aa, Homo sapiens; identical to SEQ ID NO: 102436
  Payload ID: 20418
  Gene Name: Zymogen granule protein 16B
  ENSP ID: ENSP00000489035

SEQ ID NO: 102442 - protein, 178 aa, Homo sapiens; identical to SEQ ID NO: 102439
  Payload ID: 20418
  Gene Name: Zymogen granule protein 16B
  ENSP ID: ENSP00000489251

SEQ ID NO: 102443 - protein, 69 aa, Homo sapiens; identical to SEQ ID NO: 102437
  Payload ID: 20418
  Gene Name: Zymogen granule protein 16B
  ENSP ID: ENSP00000489599
  MOD_RES (1)..(1): Any amino acid

SEQ ID NO: 102444 - protein, 572 aa, Homo sapiens
  Payload ID: 20419
  Gene Name: zyxin
  Uniprot ID: Q15942
  ENSP ID: ENSP00000324422
MAAPRPSPAISVSVSAPAFYAPQKKFGPVVAPKPKVNPFRPGDSEPPPAPGAQRAQMGRVGEIPPPPPEDFPLPPPPLAGDGDDAEGALGGAFPPPPPPIEESFPPAPLEEEIFPSPPPPPEEEGGPEAPIPPPPQPREKVSSIDLEIDSLSSLLDDMTKNDPFKARVSSGYVPPPVATPFSSKSSTKPAAGGTAPLPPWKSPSSSQPLPQVPAPAQSQTQFHVQPQPQPKPQVQLHVQSQTQPVSLANTQPRGPPASSPAPAPKFSPVTPKFTPVASKFSPGAPGGSGSQPNQKLGHPEALSAGTGSPQPPSFTYAQQREKPRVQEKQHPVPPPAQNQNQVRSPGAPGPLTLKEVEELEQLTQQLMQDMEHPQRQNVAVNELCGRCHQPLARAQPAVRALGQLFHIACFTCHQCAQQLQGQQFYSLEGAPYCEGCYTDTLEKCNTCGEPITDRMLRATGKAYHPHCFTCVVCARPLEGTSFIVDQANRPHCVPDYHKQYAPRCSVCSEPIMPEPGRDETVRVVALDKNFHMKCYKCEDCGKPLSIEADDNGCFPLDGHVLCRKCHTARAQT

SEQ ID NO: 102445 - protein, 540 aa, Homo sapiens
  Payload ID: 20419
  Gene Name: zyxin
  ENSP ID: ENSP00000346417
AAPRPSPAISVSVSAPAFYAPQKKFGPVVAPKPKVNPFRPGDSEPPPAPGAQRAQMGRVGEIPPPPPEDFPLPPPPLAGDGDDAEGALGGAFPPPPPPIEESFPPAPLEEEIFPSPPPPPEEEGGPEAPIPPPPQVSSGYVPPPVATPFSSKSSTKPAAGGTAPLPPWKSPSSSQPLPQVPAPAQSQTQFHVQPQPQPKPQVQLHVQSQTQPVSLANTQPRGPPASSPAPAPKFSPVTPKFTPVASKFSPGAPGGSGSQPNQKLGHPEALSAGTGSPQPPSFTYAQQREKPRVQEKQHPVPPPAQNQNQVRSPGAPGPLTLKEVEELEQLTQQLMQDMEHPQRQNVAVNELCGRCHQPLARAQPAVRALGQLFHIACFTCHQCAQQLQGQQFYSLEGAPYCEGCYTDTLEKCNTCGEPITDRMLRATGKAYHPHCFTCVVCARPLEGTSFIVDQANRPHCVPDYHKQYAPRCSVCSEPIMPEPGRDETVRVVALDKNFHMKCYKCEDCGKPLSIEADDNGCFPLDGHVLCRKCHTARAQT

SEQ ID NO: 102446 - protein, 415 aa, Homo sapiens
  Payload ID: 20419
  Gene Name: zyxin
  Uniprot ID: Q15942
  ENSP ID: ENSP00000376642
MTKNDPFKARVSSGYVPPPVATPFSSKSSTKPAAGGTAPLPPWKSPSSSQPLPQVPAPAQSQTQFHVQPQPQPKPQVQLHVQSQTQPVSLANTQPRGPPASSPAPAPKFSPVTPKFTPVASKFSPGAPGGSGSQPNQKLGHPEALSAGTGSPQPPSFTYAQQREKPRVQEKQHPVPPPAQNQNQVRSPGAPGPLTLKEVEELEQLTQQLMQDMEHPQRQNVAVNELCGRCHQPLARAQPAVRALGQLFHIACFTCHQCAQQLQGQQFYSLEGAPYCEGCYTDTLEKCNTCGEPITDRMLRATGKAYHPHCFTCVVCARPLEGTSFIVDQANRPHCVPDYHKQYAPRCSVCSEPIMPEPGRDETVRVVALDKNFHMKCYKCEDCGKPLSIEADDNGCFPLDGHVLCRKCHTARAQT

SEQ ID NO: 102447 - protein, 164 aa, Homo sapiens
  Payload ID: 20419
  Gene Name: zyxin
  ENSP ID: ENSP00000400537
MAAPRPSPAISVSVSAPAFYAPQKKFGPVVAPKPKVNPFRPGDSEPPPAPGAQRAQMGRVGEIPPPPPEDFPLPPPPLAGDGDDAEGALGGAFPPPPPPIEESFPPAPLEEEIFPSPPPPPEEEGGPEAPIPPPPQPREKVSSIDLEIDSLSSLLDDMTKNDPF

SEQ ID NO: 102448 - protein, 171 aa, Homo sapiens
  Payload ID: 20419
  Gene Name: zyxin
  ENSP ID: ENSP00000403714
MSTYTRTQHRKKCQGPVSFAESWAAQQQAGRVRSPGAPGPLTLKEVEELEQLTQQLMQDMEHPQRQNVAVNELCGRCHQPLARAQPAVRALGQLFHIACFTCHQCAQQLQGQQFYSLEGAPYCEGCYTDTLEKCNTCGEPITDRMLRATGKAYHPHCFTCVVCARPLEGTS

SEQ ID NO: 102449 - protein, 176 aa, Homo sapiens
  Payload ID: 20419
  Gene Name: zyxin
  ENSP ID: ENSP00000411230
  MOD_RES (1)..(1): Any amino acid
XSSTKPAAGGTAPLPPWKSPSSSQPLPQVPAPAQSQTQFHVQPQPQPKPQVQLHVQSQTQPVSLANTQPRGPPASSPAPAPKFSPVTPKFTPVASKFSPGAPGGSGSQPNQKLGHPEALSAGTGSPQPPSFTYAQQREKPRVQEKQHPVPPPAQNQNQGLLSSRQAGCAPLGPQGP

SEQ ID NO: 102450 - protein, 177 aa, Homo sapiens
  Payload ID: 20419
  Gene Name: zyxin
  ENSP ID: ENSP00000413467
PSVCPSPPGWRLLRTGTQSLRTRRRGGHPRRGAHAPACDFPLPPPPLAGDGDDAEGALGGAFPPPPPPIEESFPPAPLEEEIFPSPPPPPEEEGGPEAPIPPPPQPREKVSSIDLEIDSLSSLLDDMTKNDPFKARVSSGYVPPPVATPFSSKSSTKPAAGGTAPLPPWKSPSSSQP

SEQ ID NO: 102451 - DNA, 1781 bp, Homo sapiens
  Payload ID: 1
  Gene Symbol: SEP15
  Gene Name: 15 kDa selenoprotein
  ENST ID: ENST00000331835
  CDS Start-End: 255-752
gtcgtgaataaaagaaaggagaccgcagaagtaaagaagtggggagtttaggcaagtgcctgatttgggtaatcgaaagcacccagtgattgtatttgatgacttttaagctttcatatgccgttatttaatacctgtcacttccaaatgagagatgtaagggcaacggccgttagcgttctgttttggatcaggctctggagtggacgcccctagcttaggggtccttctaggcagccagaaacctgcggaaaatggtagcgatggcggctgggccgagtgggtgtctggtgccggcgtttgggctacggttgttgttggcgactgtgcttcaagcggtgtctgcttttggggcagagttttcatcggaggcatgcagagagttaggcttttctagcaacttgctttgcagctcttgtgatcttctcggacagttcaacctgcttcagctggatcctgattgcagaggatgctgtcaggaggaagcacaatttgaaaccaaaaagctgtatgcaggagctattcttgaagtttgtggatgaaaattgggaaggttccctcaagtccaagcttttgttaggagtgataaacccaaactgttcagaggactgcaaatcaagtatgtccgtggttcagaccctgtattaaagcttttggacgacaatgggaacattgctgaagaactgagcattctcaaatggaacacagacagtgtagaagaattcctgagtgaaaagttggaacgcatataaatcttgcttaaattttgtcctatccttttgttaccttatcaaatgaaatattacagcacctagaaaataatttagttttgcttgcttccattgatcagtcttttacttgaggcattaaatatctaattaaatcgtgaaatggcagtatagtccatgatatctaaggagttggcaagcttaacaaaacccattttttataaatgtccatcctcctgcatttgttgataccactaacaaaatgctttgtaacagacttgcggttaattatgcaaatgatagtttgtgataattggtccagttttacgaacaacagatttctaaattagagaggttaacaagacagatgattactatgcctcatgtgctgtgtgctctttgaaaggaatgacagcagactacaaagcaaataagatatactgagcctcaacagattgcctgctcctcagagtctctcctatttttgtattacccagctttctttttaatacaaatgttatttatagtttacaatgaatgcactgcataaaaactttgtagcttcattattgtaaaacatattcaagatcctacagtaagagtgaaacattcacaaagatttgcgttaatgaagactacacagaaaacctttctagggatttgtgtggatcagatacatacttggcaaatttttgagttttacattcttacagaaaagtccatttaaaagtgatcatttgtaagaccaaaatataaataaaaagtttcaaaaatctatctgaatttggaattcttctggtttgttctttcatgtttaaaaatgatgtttttcaatgcatttttttcatgtaagccctttttttagccaaaatgtaaaaatggctgtaatatttaaaacttataacatcttattgttggtaatagtgctttatatttgtctgattttatttttcaaagttttttcatttatgaacacattttcattggtatattatttaaggaatatctcttgatatagaatttttatattaaaaatgatttttctttgcttaa

SEQ ID NO: 102452 - DNA, 1220 bp, Homo sapiens
  Payload ID: 1
  Gene Symbol: SEP15
  Gene Name: 15 kDa selenoprotein
  ENST ID: ENST00000370554
  CDS Start-End: 24-398
aggcagccagaaacctgcggaaaatggtagcgatggcggctgggccgagtgggtgtctggtgccggcgtttgggctacggttgttgttggcgactgtgcttcaagcggtgtctgcttttggggcagagttttcatcggaggcatgcagagagttaggcttttctagcaacttgctttgcagctcttgtgatcttctcggacagttcaacctgcttcagctggatcctgattgcagaggatgctgtcaggaggaagcacaatttgaaaccaaaaagctgtatgcaggagctattcttgaagtttgtggatgaaaattgggaaggttccctcaagtccaagtatgtccgtggttcagaccctgtattaaagcttttggacgacaatgggaacattgctgaagaactgagcattctcaaatggaacacagacagtgtagaagaattcctgagtgaaaagttggaacgcatataaatcttgcttaaattttgtcctatccttttgttaccttatcaaatgaaatattacagcacctagaaaataatttagttttgcttgcttccattgatcagtcttttacttgaggcattaaatatctaattaaatcgtgaaatggcagtatagtccatgatatctaaggagttggcaagcttaacaaaacccattttttataaatgtccatcctcctgcatttgttgataccactaacaaaatgctttgtaacagacttgcggttaattatgcaaatgatagtttgtgataattggtccagttttacgaacaacagatttctaaattagagaggttaacaagacagatgattactatgcctcatgtgctgtgtgctctttgaaaggaatgacagcagactacaaagcaaataagatatactgagcctcaacagattgcctgctcctcagagtctctcctatttttgtattacccagctttctttttaatacaaatgttatttatagtttacaatgaatgcactgcataaaaactttgtagcttcattattgtaaaacatattcaagatcctacagtaagagtgaaacattcacaaagatttgcgttaatgaagactacacagaaaacctttctagggatttgtgtggatcagatacatacttggcaaatttttgagttttacattcttacagaaaagtccatttaaaagtgatcatttgtaagaccaaaatataaataaaaagtttcaaaaa

SEQ ID NO: 102453 - DNA, 727 bp, Homo sapiens
  Payload ID: 1
  Gene Symbol: SEP15
  Gene Name: 15 kDa selenoprotein
  ENST ID: ENST00000401030
  CDS Start-End: 16-450
agaaacctgcggaaaatggtagcgatggcggctgggccgagtgggtgtctggtgccggcgtttgggctacggttgttgttggcgactgtgcttcaagcggtgtctgcttttggggcagagttttcatcggaggcatgcagagagttaggcttttctagcaacttgctttgcagctcttgtgatcttctcggacagttcaacctgcttcagctggatcctgattgcagaggatgctgtcaggaggaagcacaatttgaaaccaaaaagtattcatccattgtttctaagcaagaatgccatcactcaaactgtatgcaggagctattcttgaagtttgtggatgaaaattgggaaggttccctcaagtccaagcttttgttaggagtgataaacccaaactgttcagaggactgcaaatcaagtatgtccgtggttcagaccctgtattaaagcttttggacgacaatgggaacattgctgaagaactgagcattctcaaatggaacacagacagtgtagaagaattcctgagtgaaaagttggaacgcatataaatcttgcttaaattttgtcctatccttttgttaccttatcaaatgaaatattacagcacctagaaaataatttagttttgcttgcttccattgatcagtcttttacttgaggcattaaatatctaattaaatcgtgaaatggcagtatagtccatgatatctaaggagttggc

SEQ ID NO: 102454 - DNA, 1785 bp, Homo sapiens
  Payload ID: 1
  Gene Symbol: SEP15
  Gene Name: 15 kDa selenoprotein
  ENST ID: ENST00000611507
  CDS Start-End: 314-685
ggagaagaaggcggggctaaaactggcgaaggcgtggcttcttggctgcttgacgaagtgtcgtgaataaaagaaaggagaccgcagaagtaaagaagtggggagtttaggcaagtgcctgatttgggtaatcgaaagcacccagtgattgtatttgatgacttttaagctttcatatgccgttatttaatacctgtcacttccaaatgagagatgtaagggcaacggccgttagcgttctgttttggatcaggctctggagtggacgcccctagcttaggggtccttctaggcagccagaaacctgcggaaaatggtagcgatggcggctgggccgagtgggtgtctggtgccggcgtttgggctacggttgttgttggcgactgtgcttcaagcggtgtctgcttttggggcagagttttcatcggaggcatgcagagagttaggcttttctagcaacttgctttgcagctcttgtgatcttctcggacagttcaacctgcttcagctggatcctgattgcagaggatgctgtcaggaggaagcacaatttgaaaccaaaaagctgtatgcaggagctattcttgaagtttgtggaaaattgggaaggttccctcaagtccaagtatgtccgtggttcagaccctgtattaaagcttttggacgacaatgggaacattgctgaagaactgagcattctcaaatggaacacagacagtgtagaagaattcctgagtgaaaagttggaacgcatataaatcttgcttaaattttgtcctatccttttgttaccttatcaaatgaaatattacagcacctagaaaataatttagttttgcttgcttccattgatcagtcttttacttgaggcattaaatatctaattaaatcgtgaaatggcagtatagtccatgatatctaaggagttggcaagcttaacaaaacccattttttataaatgtccatcctcctgcatttgttgataccactaacaaaatgctttgtaacagacttgcggttaattatgcaaatgatagtttgtgataattggtccagttttacgaacaacagatttctaaattagagaggttaacaagacagatgattactatgcctcatgtgctgtgtgctctttgaaaggaatgacagcagactacaaagcaaataagatatactgagcctcaacagattgcctgctcctcagagtctctcctatttttgtattacccagctttctttttaatacaaatgttatttatagtttacaatgaatgcactgcataaaaactttgtagcttcattattgtaaaacatattcaagatcctacagtaagagtgaaacattcacaaagatttgcgttaatgaagactacacagaaaacctttctagggatttgtgtggatcagatacatacttggcaaatttttgagttttacattcttacagaaaagtccatttaaaagtgatcatttgtaagaccaaaatataaataaaaagtttcaaaaatctatctgaatttggaattcttctggtttgttctttcatgtttaaaaatgatgtttttcaatgcatttttttcatgtaagccctttttttagccaaaatgtaaaaatggctgtaatatttaaaacttataacatcttattgttggtaatagtgctttatatttgtctgattttatttttcaaagttttttcatttatgaacacattttcattggtatattatttaaggaatatctcttgatatagaatttttatattaaaaatgatttttctttgctt

SEQ ID NO: 102455 - DNA, 1835 bp, Homo sapiens
  Payload ID: 1
  Gene Symbol: SEP15
  Gene Name: 15 kDa selenoprotein
  ENST ID: ENST00000616787
  CDS Start-End: 314-808
ggagaagaaggcggggctaaaactggcgaaggcgtggcttcttggctgcttgacgaagtgtcgtgaataaaagaaaggagaccgcagaagtaaagaagtggggagtttaggcaagtgcctgatttgggtaatcgaaagcacccagtgattgtatttgatgacttttaagctttcatatgccgttatttaatacctgtcacttccaaatgagagatgtaagggcaacggccgttagcgttctgttttggatcaggctctggagtggacgcccctagcttaggggtccttctaggcagccagaaacctgcggaaaatggtagcgatggcggctgggccgagtgggtgtctggtgccggcgtttgggctacggttgttgttggcgactgtgcttcaagcggtgtctgcttttggggcagagttttcatcggaggcatgcagagagttaggcttttctagcaacttgctttgcagctcttgtgatcttctcggacagttcaacctgcttcagctggatcctgattgcagaggatgctgtcaggaggaagcacaatttgaaaccaaaaagctgtatgcaggagctattcttgaagtttgtggaaaattgggaaggttccctcaagtccaagcttttgttaggagtgataaacccaaactgttcagaggactgcaaatcaagtatgtccgtggttcagaccctgtattaaagcttttggacgacaatgggaacattgctgaagaactgagcattctcaaatggaacacagacagtgtagaagaattcctgagtgaaaagttggaacgcatataaatcttgcttaaattttgtcctatccttttgttaccttatcaaatgaaatattacagcacctagaaaataatttagttttgcttgcttccattgatcagtcttttacttgaggcattaaatatctaattaaatcgtgaaatggcagtatagtccatgatatctaaggagttggcaagcttaacaaaacccattttttataaatgtccatcctcctgcatttgttgataccactaacaaaatgctttgtaacagacttgcggttaattatgcaaatgatagtttgtgataattggtccagttttacgaacaacagatttctaaattagagaggttaacaagacagatgattactatgcctcatgtgctgtgtgctctttgaaaggaatgacagcagactacaaagcaaataagatatactgagcctcaacagattgcctgctcctcagagtctctcctatttttgtattacccagctttctttttaatacaaatgttatttatagtttacaatgaatgcactgcataaaaactttgtagcttcattattgtaaaacatattcaagatcctacagtaagagtgaaacattcacaaagatttgcgttaatgaagactacacagaaaacctttctagggatttgtgtggatcagatacatacttggcaaatttttgagttttacattcttacagaaaagtccatttaaaagtgatcatttgtaagaccaaaatataaataaaaagtttcaaaaatctatctgaatttggaattcttctggtttgttctttcatgtttaaaaatgatgtttttcaatgcatttttttcatgtaagccctttttttagccaaaatgtaaaaatggctgtaatatttaaaacttataacatcttattgttggtaatagtgctttatatttgtctgattttatttttcaaagttttttcatttatgaacacattttcattggtatattatttaaggaatatctcttgatatagaatttttatattaaaaatgatttttctttgctt

SEQ ID NO: 102456 - DNA, 266 bp, Homo sapiens
  Payload ID: 1
  Gene Symbol: SEP15
  Gene Name: 15 kDa selenoprotein
  ENST ID: ENST00000497861
  CDS Start-End: 1-266
ttcaacctgcttcagctggatcctgattgcagaggatgctgtcaggaggaagcacaatttgaaaccaaaaagtattcatccattgtttctaagcaagaatgccatcactcaaactgtatgcaggagctattcttgaagtttgtggatgaaaattgggaaggttccctcaagtccaagtatgtccgtggttcagaccctgtattaaagcttttggacgacaatgggaacattgctgaagaactgagcattctcaaatggaacacaga

SEQ ID NO: 102457 - DNA, 499 bp, Homo sapiens
  Payload ID: 1
  Gene Symbol: SEP15
  Gene Name: 15 kDa selenoprotein
  ENST ID: ENST00000467557
  CDS Start-End: 1-95
ttgggctacggttgttgttggcgactgtgcttcaagcggtgagtgtagatcaccttcgcagctgccacagggagagtaggagtgattgcagctgagaaagacgcaacattcggtcctggttgaaaagggtggggaggactgcgcttccttaatgactgctgcggccagaatgcaacgtggcttaatttctcggttgatccttctccttccccgccttgggtttctagcagcagttttctcttgatttcagattgtcttgggtgtctgcttttggggcagagttttcatcggaggcatgcagagagttaggcttttctagcaacttgctttgcagctcttgtgatcttctcggacagttcaacctgcttcagctggatcctgattgcagaggatgctgtcaggaggaagcacaatttgaaaccaaaaagctgtatgcaggagctattcttgaagtttgtggatgaaaattgggaaggttccctcaagtccaagcttttgt

SEQ ID NO: 102458 - DNA, 2021 bp, Homo sapiens
  Payload ID: 2
  Gene Symbol: AGPAT1
  Gene Name: 1-acylglycerol-3-phosphate O-acyltransferase 1
  Uniprot ID: Q99943
  ENST ID: ENST00000336984
  CDS Start-End: 106-957
tcctcttttagagaatgtccggattgctattggactttggagcgtatggctccaaatcaactcattggctaaaacttgacggaaaatggtggttaggtggccagaatggatttgtggccaggggcatggatgctgctgctgctgctcttcctgctgctgctcttcctgctgcccaccctgtggttctgcagccccagtgccaagtacttcttcaagatggccttctacaatggctggatcctcttcctggctgtgctcgccatccctgtgtgtgccgtgcgaggacgcaacgtcgagaacatgaagatcttgcgtctaatgctgctccacatcaaatacctgtacgggatccgagtggaggtgcgaggggctcaccacttccctccctcgcagccctatgttgttgtctccaaccaccagagctctctcgatctgcttgggatgatggaggtactgccaggccgctgtgtgcccattgccaagcgcgagctactgtgggctggctctgccgggctggcctgctggctggcaggagtcatcttcatcgaccggaagcgcacgggggatgccatcagtgtcatgtctgaggtcgcccagaccctgctcacccaggacgtgagggtctgggtgtttcctgagggaacgagaaaccacaatggctccatgctgcccttcaaacgtggcgccttccatcttgcagtgcaggcccaggttcccattgtccccatagtcatgtcctcctaccaagacttctactgcaagaaggagcgtcgcttcacctcgggacaatgtcaggtgcgggtgctgcccccagtgcccacggaagggctgacaccagatgacgtcccagctctggctgacagagtccggcactccatgctcactgttttccgggaaatctccactgatggccggggtggtggtgactatctgaagaagcctgggggcggtgggtgaaccctggctctgagctctcctcccatctgtccccatcttcctccccacacctacccacccagtgggccctgaagcagggccaaaccctcttccttgtctcccctctccccacttattctcctctttggaatcttcaacttctgaagtgaatgtggatacagcgccactcctgccccctcttggccccatccatggactcttgcctcggtgcagtctccactcttgacccccacctcctactgtcttgtctgtgggacagttgcctccccctcatctccagtgactcagcctacacaagggaggggaacattccatccccagtggagtctcttcctatgtggtcttctctacccctctaccccacattggccagtggactcatccattctttggaacaaatcccccccactccaaagtccatggattcaatggactcatccatttgtgaggaggacttctcgccctctggctggaagctgatacctgaagcactcccaggctcatcatgggagctttcctcagcaccttcaccttccctcccagtgtagcctcctgtcagtgggggctggacccttctaattcagaggtctcatgcctgcccttgcccagatgcccagggtcgtgcactctctgggataccagttcagtctccacatttctggttttctgtccccatagtacagttcttcagtggacatgaccccacccagccccctgcagccctgctgcaccatctcaccagacacaaggggaagaagcagacatcaggtgctgcactcacttctgccccctggggagttggggaaaggaacgaaccctggctggaggggataggagggcttttaatttatttctttttctgttgaggcttccccctctctgagccagttttcatttcttcctggtggcattagccactccctgcctctcactccagacctgttcccacaactggggaggtaggctgggagcaaaaggagagggtgggacccagttttgcgtggttggtttttattaattatctggataacagcaaaaaaactgaaaataaagagagagagaga

SEQ ID NO: 102459 - DNA, 2017 bp, Homo sapiens
  Payload ID: 2
  Gene Symbol: AGPAT1
  Gene Name: 1-acylglycerol-3-phosphate O-acyltransferase 1
  Uniprot ID: Q99943
  ENST ID: ENST00000375104
  CDS Start-End: 102-953
gaaatagggtcttcttcccaggttggaccccggggagtttgggcttttcctacaatcactgaccctcactgtgactaaaggagcagaattaggtggccagaatggatttgtggccaggggcatggatgctgctgctgctgctcttcctgctgctgctcttcctgctgcccaccctgtggttctgcagccccagtgccaagtacttcttcaagatggccttctacaatggctggatcctcttcctggctgtgctcgccatccctgtgtgtgccgtgcgaggacgcaacgtcgagaacatgaagatcttgcgtctaatgctgctccacatcaaatacctgtacgggatccgagtggaggtgcgaggggctcaccacttccctccctcgcagccctatgttgttgtctccaaccaccagagctctctcgatctgcttgggatgatggaggtactgccaggccgctgtgtgcccattgccaagcgcgagctactgtgggctggctctgccgggctggcctgctggctggcaggagtcatcttcatcgaccggaagcgcacgggggatgccatcagtgtcatgtctgaggtcgcccagaccctgctcacccaggacgtgagggtctgggtgtttcctgagggaacgagaaaccacaatggctccatgctgcccttcaaacgtggcgccttccatcttgcagtgcaggcccaggttcccattgtccccatagtcatgtcctcctaccaagacttctactgcaagaaggagcgtcgcttcacctcgggacaatgtcaggtgcgggtgctgcccccagtgcccacggaagggctgacaccagatgacgtcccagctctggctgacagagtccggcactccatgctcactgttttccgggaaatctccactgatggccggggtggtggtgactatctgaagaagcctgggggcggtgggtgaaccctggctctgagctctcctcccatctgtccccatcttcctccccacacctacccacccagtgggccctgaagcagggccaaaccctcttccttgtctcccctctccccacttattctcctctttggaatcttcaacttctgaagtgaatgtggatacagcgccactcctgccccctcttggccccatccatggactcttgcctcggtgcagtctccactcttgacccccacctcctactgtcttgtctgtgggacagttgcctccccctcatctccagtgactcagcctacacaagggaggggaacattccatccccagtggagtctcttcctatgtggtcttctctacccctctaccccacattggccagtggactcatccattctttggaacaaatcccccccactccaaagtccatggattcaatggactcatccatttgtgaggaggacttctcgccctctggctggaagctgatacctgaagcactcccaggctcatcatgggagctttcctcagcaccttcaccttccctcccagtgtagcctcctgtcagtgggggctggacccttctaattcagaggtctcatgcctgcccttgcccagatgcccagggtcgtgcactctctgggataccagttcagtctccacatttctggttttctgtccccatagtacagttcttcagtggacatgaccccacccagccccctgcagccctgctgcaccatctcaccagacacaaggggaagaagcagacatcaggtgctgcactcacttctgccccctggggagttggggaaaggaacgaaccctggctggaggggataggagggcttttaatttatttctttttctgttgaggcttccccctctctgagccagttttcatttcttcctggtggcattagccactccctgcctctcactccagacctgttcccacaactggggaggtaggctgggagcaaaaggagagggtgggacccagttttgcgtggttggtttttattaattatctggataacagcaaaaaaactgaaaataaagagagagagaga

SEQ ID NO: 102460 - DNA, 2234 bp, Homo sapiens
  Payload ID: 2
  Gene Symbol: AGPAT1
  Gene Name: 1-acylglycerol-3-phosphate O-acyltransferase 1
  Uniprot ID: Q99943
  ENST ID: ENST00000375107
  CDS Start-End: 319-1170
ggaaaccagcaggcgttggggaggggtggcgggggaatagcggcggcagcagccccagccctcagagagacagcagaaagggagggagggagggtgctggggggacagccccccaccattcctaccgctatgggcccaacctcccactcccacctcccctccatcggccggggctaggacacccccaaatcccgtcgcccccttggcaccgacaccccgacagagacagagacacagccatccgccaccaccgctgccgcagcctggctggggagggggccagccccccaggccccctacccctctgaggtggccagaatggatttgtggccaggggcatggatgctgctgctgctgctcttcctgctgctgctcttcctgctgcccaccctgtggttctgcagccccagtgccaagtacttcttcaagatggccttctacaatggctggatcctcttcctggctgtgctcgccatccctgtgtgtgccgtgcgaggacgcaacgtcgagaacatgaagatcttgcgtctaatgctgctccacatcaaatacctgtacgggatccgagtggaggtgcgaggggctcaccacttccctccctcgcagccctatgttgttgtctccaaccaccagagctctctcgatctgcttgggatgatggaggtactgccaggccgctgtgtgcccattgccaagcgcgagctactgtgggctggctctgccgggctggcctgctggctggcaggagtcatcttcatcgaccggaagcgcacgggggatgccatcagtgtcatgtctgaggtcgcccagaccctgctcacccaggacgtgagggtctgggtgtttcctgagggaacgagaaaccacaatggctccatgctgcccttcaaacgtggcgccttccatcttgcagtgcaggcccaggttcccattgtccccatagtcatgtcctcctaccaagacttctactgcaagaaggagcgtcgcttcacctcgggacaatgtcaggtgcgggtgctgcccccagtgcccacggaagggctgacaccagatgacgtcccagctctggctgacagagtccggcactccatgctcactgttttccgggaaatctccactgatggccggggtggtggtgactatctgaagaagcctgggggcggtgggtgaaccctggctctgagctctcctcccatctgtccccatcttcctccccacacctacccacccagtgggccctgaagcagggccaaaccctcttccttgtctcccctctccccacttattctcctctttggaatcttcaacttctgaagtgaatgtggatacagcgccactcctgccccctcttggccccatccatggactcttgcctcggtgcagtctccactcttgacccccacctcctactgtcttgtctgtgggacagttgcctccccctcatctccagtgactcagcctacacaagggaggggaacattccatccccagtggagtctcttcctatgtggtcttctctacccctctaccccacattggccagtggactcatccattctttggaacaaatcccccccactccaaagtccatggattcaatggactcatccatttgtgaggaggacttctcgccctctggctggaagctgatacctgaagcactcccaggctcatcatgggagctttcctcagcaccttcaccttccctcccagtgtagcctcctgtcagtgggggctggacccttctaattcagaggtctcatgcctgcccttgcccagatgcccagggtcgtgcactctctgggataccagttcagtctccacatttctggttttctgtccccatagtacagttcttcagtggacatgaccccacccagccccctgcagccctgctgcaccatctcaccagacacaaggggaagaagcagacatcaggtgctgcactcacttctgccccctggggagttggggaaaggaacgaaccctggctggaggggataggagggcttttaatttatttctttttctgttgaggcttccccctctctgagccagttttcatttcttcctggtggcattagccactccctgcctctcactccagacctgttcccacaactggggaggtaggctgggagcaaaaggagagggtgggacccagttttgcgtggttggtttttattaattatctggataacagcaaaaaaactgaaaataaagagagagagaga

SEQ ID NO: 102461 - DNA, 2021 bp, Homo sapiens
  Payload ID: 2
  Gene Symbol: AGPAT1
  Gene Name: 1-acylglycerol-3-phosphate O-acyltransferase 1
  Uniprot ID: Q99943
  ENST ID: ENST00000383294
  CDS Start-End: 106-957
tcctcttttagagaatgtccggattgctattggactttggagcgtatggctccaaatcaactcattggctaaaacttgacggaaaatggtggttaggtggccagaatggatttgtggccaggggcatggatgctgctgctgctgctcttcctgctgctgctcttcctgctgcccaccctgtggttctgcagccccagtgccaagtacttcttcaagatggccttctacaatggctggatcctcttcctggctgtgctcgccatccctgtgtgtgccgtgcgaggacgcaacgtcgagaacatgaagatcttgcgtctaatgctgctccacatcaaatacctgtacgggatccgagtggaggtgcgaggggctcaccacttccctccctcgcagccctatgttgttgtctccaaccaccagagctctctcgatctgcttgggatgatggaggtactgccaggccgctgtgtgcccattgccaagcgcgagctactgtgggctggctctgccgggctggcctgctggctggcaggagtcatcttcatcgaccggaagcgcacgggggatgccatcagtgtcatgtctgaggtcgcccagaccctgctcacccaggacgtgagggtctgggtgtttcctgagggaacgagaaaccacaatggctccatgctgcccttcaaacgtggcgccttccatcttgcagtgcaggcccaggttcccattgtccccatagtcatgtcctcctaccaagacttctactgcaagaaggagcgtcgcttcacctcgggacaatgtcaggtgcgggtgctgcccccagtgcccacggaagggctgacaccagatgacgtcccagctctggctgacagagtccggcactccatgctcactgttttccgggaaatctccactgatggccggggtggtggtgactatctgaagaagcctgggggcggtgggtgaaccctggctctgagctctcctcccatctgtccccatcttcctccccacacctacccacccagtgggccctgaagcagggccaaaccctcttccttgtctcccctctccccacttattctcctctttggaatcttcaacttctgaagtgaatgtggatacagcgccactcctgccccctcttggccccatccatggactcttgcctcggtgcagtctccactcttgacccccacctcctactgtcttgtctgtgggacagttgcctccccctcatctccagtgactcagcctacacaagggaggggaacattccatccccagtggagtctcttcctatgtggtcttctctacccctctaccccacattggccagtggactcatccattctttggaacaaatcccccccactccaaagtccatggattcaatggactcatccatttgtgaggaggacttctcgccctctggctggaagctgatacctgaagcactcccaggctcatcctgggagctttcctcagcaccttcaccttccctcccagtgtagcctcctgtcagtgggggctggacccttctaattcagaggtctcatgcctgcccttgcccagatgcccagggtcgtgcactctctgggataccagttcagtctccacatttctggttttctgtccccatagtacagttcttcagtggacatgaccccacccagccccctgcagccctgctgcaccatctcaccagacacaaggggaagaagcagacatcaggtgctgcactcacttctgccccctggggagttggggaaaggaacgaaccctggctggaggggataggagggcttttaatttatttctttttctgttgaggcttccccctctctgagccagttttcatttcttcctggtggcattagccactccctgcctctcactccagacctgttcccacaactggggaggtaggctgggagcaaaaggagagggtgggacccagttttgcgtggttggtttttattaattatctggataacagcaaaaaaactgaaaataaagagagagagaga

SEQ ID NO: 102462 - DNA, 2103 bp, Homo sapiens
  Payload ID: 2
  Gene Symbol: AGPAT1
  Gene Name: 1-acylglycerol-3-phosphate O-acyltransferase 1
  Uniprot ID: Q99943
  ENST ID: ENST00000395496
  CDS Start-End: 188-1039
ctttcctctcccagggcaagtgctgttaggtcacctttactccattccctccttttttcacttggtgaggcctcacacactgtacctgcccacgcaaagtgtcactagaaggaagggaaagggtagtaggattcgtttgcctgtctggaggtaggattggtctttgtagctattccaggtggccagaatggatttgtggccaggggcatggatgctgctgctgctgctcttcctgctgctgctcttcctgctgcccaccctgtggttctgcagccccagtgccaagtacttcttcaagatggccttctacaatggctggatcctcttcctggctgtgctcgccatccctgtgtgtgccgtgcgaggacgcaacgtcgagaacatgaagatcttgcgtctaatgctgctccacatcaaatacctgtacgggatccgagtggaggtgcgaggggctcaccacttccctccctcgcagccctatgttgttgtctccaaccaccagagctctctcgatctgcttgggatgatggaggtactgccaggccgctgtgtgcccattgccaagcgcgagctactgtgggctggctctgccgggctggcctgctggctggcaggagtcatcttcatcgaccggaagcgcacgggggatgccatcagtgtcatgtctgaggtcgcccagaccctgctcacccaggacgtgagggtctgggtgtttcctgagggaacgagaaaccacaatggctccatgctgcccttcaaacgtggcgccttccatcttgcagtgcaggcccaggttcccattgtccccatagtcatgtcctcctaccaagacttctactgcaagaaggagcgtcgcttcacctcgggacaatgtcaggtgcgggtgctgcccccagtgcccacggaagggctgacaccagatgacgtcccagctctggctgacagagtccggcactccatgctcactgttttccgggaaatctccactgatggccggggtggtggtgactatctgaagaagcctgggggcggtgggtgaaccctggctctgagctctcctcccatctgtccccatcttcctccccacacctacccacccagtgggccctgaagcagggccaaaccctcttccttgtctcccctctccccacttattctcctctttggaatcttcaacttctgaagtgaatgtggatacagcgccactcctgccccctcttggccccatccatggactcttgcctcggtgcagtctccactcttgacccccacctcctactgtcttgtctgtgggacagttgcctccccctcatctccagtgactcagcctacacaagggaggggaacattccatccccagtggagtctcttcctatgtggtcttctctacccctctaccccacattggccagtggactcatccattctttggaacaaatcccccccactccaaagtccatggattcaatggactcatccatttgtgaggaggacttctcgccctctggctggaagctgatacctgaagcactcccaggctcatcatgggagctttcctcagcaccttcaccttccctcccagtgtagcctcctgtcagtgggggctggacccttctaattcagaggtctcatgcctgcccttgcccagatgcccagggtcgtgcactctctgggataccagttcagtctccacatttctggttttctgtccccatagtacagttcttcagtggacatgaccccacccagccccctgcagccctgctgcaccatctcaccagacacaaggggaagaagcagacatcaggtgctgcactcacttctgccccctggggagttggggaaaggaacgaaccctggctggaggggataggagggcttttaatttatttctttttctgttgaggcttccccctctctgagccagttttcatttcttcctggtggcattagccactccctgcctctcactccagacctgttcccacaactggggaggtaggctgggagcaaaaggagagggtgggacccagttttgcgtggttggtttttattaattatctggataacagcaaaaaaactgaaaataaagagagagagaga

SEQ ID NO: 102463 - DNA, 2168 bp, Homo sapiens
  Payload ID: 2
  Gene Symbol: AGPAT1
  Gene Name: 1-acylglycerol-3-phosphate O-acyltransferase 1
  Uniprot ID: Q99943
  ENST ID: ENST00000395497
  CDS Start-End: 253-1104
tggccgacatcgggaaagacggcgaagagctaggaaaagagggaaaacactagggtcgcagggttcaaaatggctccaacctcctttggtgacgtagagagcagaacttgggtctgcccctcccttttagttaagggagcagaactgggattagcccgacgtttggatagtgggaacatcgatctgcggcgctggtgttaacccaactcattcggctggacgactcagccctccccatattaggtggccagaatggatttgtggccaggggcatggatgctgctgctgctgctcttcctgctgctgctcttcctgctgcccaccctgtggttctgcagccccagtgccaagtacttcttcaagatggccttctacaatggctggatcctcttcctggctgtgctcgccatccctgtgtgtgccgtgcgaggacgcaacgtcgagaacatgaagatcttgcgtctaatgctgctccacatcaaatacctgtacgggatccgagtggaggtgcgaggggctcaccacttccctccctcgcagccctatgttgttgtctccaaccaccagagctctctcgatctgcttgggatgatggaggtactgccaggccgctgtgtgcccattgccaagcgcgagctactgtgggctggctctgccgggctggcctgctggctggcaggagtcatcttcatcgaccggaagcgcacgggggatgccatcagtgtcatgtctgaggtcgcccagaccctgctcacccaggacgtgagggtctgggtgtttcctgagggaacgagaaaccacaatggctccatgctgcccttcaaacgtggcgccttccatcttgcagtgcaggcccaggttcccattgtccccatagtcatgtcctcctaccaagacttctactgcaagaaggagcgtcgcttcacctcgggacaatgtcaggtgcgggtgctgcccccagtgcccacggaagggctgacaccagatgacgtcccagctctggctgacagagtccggcactccatgctcactgttttccgggaaatctccactgatggccggggtggtggtgactatctgaagaagcctgggggcggtgggtgaaccctggctctgagctctcctcccatctgtccccatcttcctccccacacctacccacccagtgggccctgaagcagggccaaaccctcttccttgtctcccctctccccacttattctcctctttggaatcttcaacttctgaagtgaatgtggatacagcgccactcctgccccctcttggccccatccatggactcttgcctcggtgcagtctccactcttgacccccacctcctactgtcttgtctgtgggacagttgcctccccctcatctccagtgactcagcctacacaagggaggggaacattccatccccagtggagtctcttcctatgtggtcttctctacccctctaccccacattggccagtggactcatccattctttggaacaaatcccccccactccaaagtccatggattcaatggactcatccatttgtgaggaggacttctcgccctctggctggaagctgatacctgaagcactcccaggctcatcatgggagctttcctcagcaccttcaccttccctcccagtgtagcctcctgtcagtgggggctggacccttctaattcagaggtctcatgcctgcccttgcccagatgcccagggtcgtgcactctctgggataccagttcagtctccacatttctggttttctgtccccatagtacagttcttcagtggacatgaccccacccagccccctgcagccctgctgcaccatctcaccagacacaaggggaagaagcagacatcaggtgctgcactcacttctgccccctggggagttggggaaaggaacgaaccctggctggaggggataggagggcttttaatttatttctttttctgttgaggcttccccctctctgagccagttttcatttcttcctggtggcattagccactccctgcctctcactccagacctgttcccacaactggggaggtaggctgggagcaaaaggagagggtgggacccagttttgcgtggttggtttttattaattatctggataacagcaaaaaaactgaaaataaagagagagagaga

SEQ ID NO: 102464 - DNA, 2496 bp, Homo sapiens
  Payload ID: 2
  Gene Symbol: AGPAT1
  Gene Name: 1-acylglycerol-3-phosphate O-acyltransferase 1
  Uniprot ID: Q99943
  ENST ID: ENST00000395499
  CDS Start-End: 581-1432
ggcagatgaggattcaggaagcttgaggtttaggaaggaagatattgagagggaaaggtggaaatgaaggagagtgaagtgatggaatgatcctagtaaagggataatgggagtggaggaagagaagagggggtggaaaactagatacatggctaccaaattaaggaggcacgcgcattccagaggaatcggcattcttcctcactttttatttttctagaaagcacccctgaagccaaatttccattggaagaaaagatgtacccatattgtatgttgtgagaaggggttgtctcagcttgggcaagtaaggagactgatacgaaggaagtaggaaagaaaaggtacagaggtaaaagagcatggaaaaggaaagggtcagggataaggccaaagagatctcttctctttaaaggccagagaaggcaggtggaggggggagctggactgctgggagatagtgagggacaaagggcaaaggaaaccagaccagaggactggagagtgagatggagtgagatggagtcctggagagaaaaagaagagaggtgaacttaatgcttgtcatatggtggccagaatggatttgtggccaggggcatggatgctgctgctgctgctcttcctgctgctgctcttcctgctgcccaccctgtggttctgcagccccagtgccaagtacttcttcaagatggccttctacaatggctggatcctcttcctggctgtgctcgccatccctgtgtgtgccgtgcgaggacgcaacgtcgagaacatgaagatcttgcgtctaatgctgctccacatcaaatacctgtacgggatccgagtggaggtgcgaggggctcaccacttccctccctcgcagccctatgttgttgtctccaaccaccagagctctctcgatctgcttgggatgatggaggtactgccaggccgctgtgtgcccattgccaagcgcgagctactgtgggctggctctgccgggctggcctgctggctggcaggagtcatcttcatcgaccggaagcgcacgggggatgccatcagtgtcatgtctgaggtcgcccagaccctgctcacccaggacgtgagggtctgggtgtttcctgagggaacgagaaaccacaatggctccatgctgcccttcaaacgtggcgccttccatcttgcagtgcaggcccaggttcccattgtccccatagtcatgtcctcctaccaagacttctactgcaagaaggagcgtcgcttcacctcgggacaatgtcaggtgcgggtgctgcccccagtgcccacggaagggctgacaccagatgacgtcccagctctggctgacagagtccggcactccatgctcactgttttccgggaaatctccactgatggccggggtggtggtgactatctgaagaagcctgggggcggtgggtgaaccctggctctgagctctcctcccatctgtccccatcttcctccccacacctacccacccagtgggccctgaagcagggccaaaccctcttccttgtctcccctctccccacttattctcctctttggaatcttcaacttctgaagtgaatgtggatacagcgccactcctgccccctcttggccccatccatggactcttgcctcggtgcagtctccactcttgacccccacctcctactgtcttgtctgtgggacagttgcctccccctcatctccagtgactcagcctacacaagggaggggaacattccatccccagtggagtctcttcctatgtggtcttctctacccctctaccccacattggccagtggactcatccattctttggaacaaatcccccccactccaaagtccatggattcaatggactcatccatttgtgaggaggacttctcgccctctggctggaagctgatacctgaagcactcccaggctcatcatgggagctttcctcagcaccttcaccttccctcccagtgtagcctcctgtcagtgggggctggacccttctaattcagaggtctcatgcctgcccttgcccagatgcccagggtcgtgcactctctgggataccagttcagtctccacatttctggttttctgtccccatagtacagttcttcagtggacatgaccccacccagccccctgcagccctgctgcaccatctcaccagacacaaggggaagaagcagacatcaggtgctgcactcacttctgccccctggggagttggggaaaggaacgaaccctggctggaggggataggagggcttttaatttatttctttttctgttgaggcttccccctctctgagccagttttcatttcttcctggtggcattagccactccctgcctctcactccagacctgttcccacaactggggaggtaggctgggagcaaaaggagagggtgggacccagttttgcgtggttggtttttattaattatctggataacagcaaaaaaactgaaaataaagagagagagaga

SEQ ID NO: 102465 - DNA, 2496 bp, Homo sapiens
  Payload ID: 2
  Gene Symbol: AGPAT1
  Gene Name: 1-acylglycerol-3-phosphate O-acyltransferase 1
  Uniprot ID: Q99943
  ENST ID: ENST00000399825
  CDS Start-End: 581-1432
ggcagatgaggattcaggaagcttgaggtttaggaaggaagatattgagagggaaaggtggaaatgaaggagagtgaagtgatggaatgatcctagtaaagggataatgggagtggaggaagagaagagggggtggaaaactagatacatggctaccaaattaaggaggcacgcgcattccagaggaatcggcattcttcctcactttttatttttctagaaagcacccctgaagccaaatttccattggaagaaaagatgtacccatattgtatgttgtgagaaggggttgtctcagcttgggcaagtaaggagactgatacgaaggaagtaggaaagaaaaggtacagaggtaaaagagcatggaaaaggaaagggtcagggataaggccaaagagatctcttctctttaaaggccagagaaggcaggtggaggggggagctggactgctgggagatagtgagggacaaagggcaaaggaaaccagaccagaggactggagagtgagatggagtgagatggagtcctggagagaaaaagaagagaggtgaacttaatgcttgtcatatggtggccagaatggatttgtggccaggggcatggatgctgctgctgctgctcttcctgctgctgctcttcctgctgcccaccctgtggttctgcagccccagtgccaagtacttcttcaagatggccttctacaatggctggatcctcttcctggctgtgctcgccatccctgtgtgtgccgtgcgaggacgcaacgtcgagaacatgaagatcttgcgtctaatgctgctccacatcaaatacctgtacgggatccgagtggaggtgcgaggggctcaccacttccctccctcgcagccctatgttgttgtctccaaccaccagagctctctcgatctgcttgggatgatggaggtactgccaggccgctgtgtgcccattgccaagcgcgagctactgtgggctggctctgccgggctggcctgctggctggcaggagtcatcttcatcgaccggaagcgcacgggggatgccatcagtgtcatgtctgaggtcgcccagaccctgctcacccaggacgtgagggtctgggtgtttcctgagggaacgagaaaccacaatggctccatgctgcccttcaaacgtggcgccttccatcttgcagtgcaggcccaggttcccattgtccccatagtcatgtcctcctaccaagacttctactgcaagaaggagcgtcgcttcacctcgggacaatgtcaggtgcgggtgctgcccccagtgcccacggaagggctgacaccagatgacgtcccagctctggctgacagagtccggcactccatgctcactgttttccgggaaatctccactgatggccggggtggtggtgactatctgaagaagcctgggggcggtgggtgaaccctggctctgagctctcctcccatctgtccccatcttcctccccacacctacccacccagtgggccctgaagcagggccaaaccctcttccttgtctcccctctccccacttattctcctctttggaatcttcaacttctgaagtgaatgtggatacagcgccactcctgccccctcttggccccatccatggactcttgcctcggtgcagtctccactcttgacccccacctcctactgtcttgtctgtgggacagttgcctccccctcatctccagtgactcagcctacacaagggaggggaacattccatccccagtggagtctcttcctatgtggtcttctctacccctctaccccacattggccagtggactcatccattctttggaacaaatcccccccactccaaagtccatggattcaatggactcatccatttgtgaggaggacttctcgccctctggctggaagctgatacctgaagcactcccaggctcatcctgggagctttcctcagcaccttcaccttccctcccagtgtagcctcctgtcagtgggggctggacccttctaattcagaggtctcatgcctgcccttgcccagatgcccagggtcgtgcactctctgggataccagttcagtctccacatttctggttttctgtccccatagtacagttcttcagtggacatgaccccacccagccccctgcagccctgctgcaccatctcaccagacacaaggggaagaagcagacatcaggtgctgcactcacttctgccccctggggagttggggaaaggaacgaaccctggctggaggggataggagggcttttaatttatttctttttctgttgaggcttccccctctctgagccagttttcatttcttcctggtggcattagccactccctgcctctcactccagacctgttcccacaactggggaggtaggctgggagcaaaaggagagggtgggacccagttttgcgtggttggtttttattaattatctggataacagcaaaaaaactgaaaataaagagagagagaga

SEQ ID NO: 102466 - DNA, 2103 bp, Homo sapiens
  Payload ID: 2
  Gene Symbol: AGPAT1
  Gene Name: 1-acylglycerol-3-phosphate O-acyltransferase 1
  Uniprot ID: Q99943
  ENST ID: ENST00000399827
  CDS Start-End: 188-1039
ctttcctctcccagggcaagtgctgttaggtcacctttactccattccctccttttttcacttggtgaggcctcacacactgtacctgcccacgcaaagtgtcactagaaggaagggaaagggtagtaggattcgtttgcctgtctggaggtaggattggtctttgtagctattccaggtggccagaatggatttgtggccaggggcatggatgctgctgctgctgctcttcctgctgctgctcttcctgctgcccaccctgtggttctgcagccccagtgccaagtacttcttcaagatggccttctacaatggctggatcctcttcctggctgtgctcgccatccctgtgtgtgccgtgcgaggacgcaacgtcgagaacatgaagatcttgcgtctaatgctgctccacatcaaatacctgtacgggatccgagtggaggtgcgaggggctcaccacttccctccctcgcagccctatgttgttgtctccaaccaccagagctctctcgatctgcttgggatgatggaggtactgccaggccgctgtgtgcccattgccaagcgcgagctactgtgggctggctctgccgggctggcctgctggctggcaggagtcatcttcatcgaccggaagcgcacgggggatgccatcagtgtcatgtctgaggtcgcccagaccctgctcacccaggacgtgagggtctgggtgtttcctgagggaacgagaaaccacaatggctccatgctgcccttcaaacgtggcgccttccatcttgcagtgcaggcccaggttcccattgtccccatagtcatgtcctcctaccaagacttctactgcaagaaggagcgtcgcttcacctcgggacaatgtcaggtgcgggtgctgcccccagtgcccacggaagggctgacaccagatgacgtcccagctctggctgacagagtccggcactccatgctcactgttttccgggaaatctccactgatggccggggtggtggtgactatctgaagaagcctgggggcggtgggtgaaccctggctctgagctctcctcccatctgtccccatcttcctccccacacctacccacccagtgggccctgaagcagggccaaaccctcttccttgtctcccctctccccacttattctcctctttggaatcttcaacttctgaagtgaatgtggatacagcgccactcctgccccctcttggccccatccatggactcttgcctcggtgcagtctccactcttgacccccacctcctactgtcttgtctgtgggacagttgcctccccctcatctccagtgactcagcctacacaagggaggggaacattccatccccagtggagtctcttcctatgtggtcttctctacccctctaccccacattggccagtggactcatccattctttggaacaaatcccccccactccaaagtccatggattcaatggactcatccatttgtgaggaggacttctcgccctctggctggaagctgatacctgaagcactcccaggctcatcctgggagctttcctcagcaccttcaccttccctcccagtgtagcctcctgtcagtgggggctggacccttctaattcagaggtctcatgcctgcccttgcccagatgcccagggtcgtgcactctctgggataccagttcagtctccacatttctggttttctgtccccatagtacagttcttcagtggacatgaccccacccagccccctgcagccctgctgcaccatctcaccagacacaaggggaagaagcagacatcaggtgctgcactcacttctgccccctggggagttggggaaaggaacgaaccctggctggaggggataggagggcttttaatttatttctttttctgttgaggcttccccctctctgagccagttttcatttcttcctggtggcattagccactccctgcctctcactccagacctgttcccacaactggggaggtaggctgggagcaaaaggagagggtgggacccagttttgcgtggttggtttttattaattatctggataacagcaaaaaaactgaaaataaagagagagagaga

SEQ ID NO: 102467 - DNA, 2168 bp, Homo sapiens
  Payload ID: 2
  Gene Symbol: AGPAT1
  Gene Name: 1-acylglycerol-3-phosphate O-acyltransferase 1
  Uniprot ID: Q99943
  ENST ID: ENST00000399829
  CDS Start-End: 253-1104
tggccgacatcgggaaagacggcgaagagctaggaaaagagggaaaacactagggtcgcagggttcaaaatggctccaacctcctttggtgacgtagagagcagaacttgggtctgcccctcccttttagttaagggagcagaactgggattagcccgacgtttggatagtgggaacatcgatctgcggcgctggtgttaacccaactcattcggctggacgactcagccctccccatattaggtggccagaatggatttgtggccaggggcatggatgctgctgctgctgctcttcctgctgctgctcttcctgctgcccaccctgtggttctgcagccccagtgccaagtacttcttcaagatggccttctacaatggctggatcctcttcctggctgtgctcgccatccctgtgtgtgccgtgcgaggacgcaacgtcgagaacatgaagatcttgcgtctaatgctgctccacatcaaatacctgtacgggatccgagtggaggtgcgaggggctcaccacttccctccctcgcagccctatgttgttgtctccaaccaccagagctctctcgatctgcttgggatgatggaggtactgccaggccgctgtgtgcccattgccaagcgcgagctactgtgggctggctctgccgggctggcctgctggctggcaggagtcatcttcatcgaccggaagcgcacgggggatgccatcagtgtcatgtctgaggtcgcccagaccctgctcacccaggacgtgagggtctgggtgtttcctgagggaacgagaaaccacaatggctccatgctgcccttcaaacgtggcgccttccatcttgcagtgcaggcccaggttcccattgtccccatagtcatgtcctcctaccaagacttctactgcaagaaggagcgtcgcttcacctcgggacaatgtcaggtgcgggtgctgcccccagtgcccacggaagggctgacaccagatgacgtcccagctctggctgacagagtccggcactccatgctcactgttttccgggaaatctccactgatggccggggtggtggtgactatctgaagaagcctgggggcggtgggtgaaccctggctctgagctctcctcccatctgtccccatcttcctccccacacctacccacccagtgggccctgaagcagggccaaaccctcttccttgtctcccctctccccacttattctcctctttggaatcttcaacttctgaagtgaatgtggatacagcgccactcctgccccctcttggccccatccatggactcttgcctcggtgcagtctccactcttgacccccacctcctactgtcttgtctgtgggacagttgcctccccctcatctccagtgactcagcctacacaagggaggggaacattccatccccagtggagtctcttcctatgtggtcttctctacccctctaccccacattggccagtggactcatccattctttggaacaaatcccccccactccaaagtccatggattcaatggactcatccatttgtgaggaggacttctcgccctctggctggaagctgatacctgaagcactcccaggctcatcctgggagctttcctcagcaccttcaccttccctcccagtgtagcctcctgtcagtgggggctggacccttctaattcagaggtctcatgcctgcccttgcccagatgcccagggtcgtgcactctctgggataccagttcagtctccacatttctggttttctgtccccatagtacagttcttcagtggacatgaccccacccagccccctgcagccctgctgcaccatctcaccagacacaaggggaagaagcagacatcaggtgctgcactcacttctgccccctggggagttggggaaaggaacgaaccctggctggaggggataggagggcttttaatttatttctttttctgttgaggcttccccctctctgagccagttttcatttcttcctggtggcattagccactccctgcctctcactccagacctgttcccacaactggggaggtaggctgggagcaaaaggagagggtgggacccagttttgcgtggttggtttttattaattatctggataacagcaaaaaaactgaaaataaagagagagagaga

SEQ ID NO: 102468 - DNA, 2017 bp, Homo sapiens
  Payload ID: 2
  Gene Symbol: AGPAT1
  Gene Name: 1-acylglycerol-3-phosphate O-acyltransferase 1
  Uniprot ID: Q99943
  ENST ID: ENST00000399830
  CDS Start-End: 102-953
gaaatagggtcttcttcccaggttggaccccggggagtttgggcttttcctacaatcactgaccctcactgtgactaaaggagcagaattaggtggccagaatggatttgtggccaggggcatggatgctgctgctgctgctcttcctgctgctgctcttcctgctgcccaccctgtggttctgcagccccagtgccaagtacttcttcaagatggccttctacaatggctggatcctcttcctggctgtgctcgccatccctgtgtgtgccgtgcgaggacgcaacgtcgagaacatgaagatcttgcgtctaatgctgctccacatcaaatacctgtacgggatccgagtggaggtgcgaggggctcaccacttccctccctcgcagccctatgttgttgtctccaaccaccagagctctctcgatctgcttgggatgatggaggtactgccaggccgctgtgtgcccattgccaagcgcgagctactgtgggctggctctgccgggctggcctgctggctggcaggagtcatcttcatcgaccggaagcgcacgggggatgccatcagtgtcatgtctgaggtcgcccagaccctgctcacccaggacgtgagggtctgggtgtttcctgagggaacgagaaaccacaatggctccatgctgcccttcaaacgtggcgccttccatcttgcagtgcaggcccaggttcccattgtccccatagtcatgtcctcctaccaagacttctactgcaagaaggagcgtcgcttcacctcgggacaatgtcaggtgcgggtgctgcccccagtgcccacggaagggctgacaccagatgacgtcccagctctggctgacagagtccggcactccatgctcactgttttccgggaaatctccactgatggccggggtggtggtgactatctgaagaagcctgggggcggtgggtgaaccctggctctgagctctcctcccatctgtccccatcttcctccccacacctacccacccagtgggccctgaagcagggccaaaccctcttccttgtctcccctctccccacttattctcctctttggaatcttcaacttctgaagtgaatgtggatacagcgccactcctgccccctcttggccccatccatggactcttgcctcggtgcagtctccactcttgacccccacctcctactgtcttgtctgtgggacagttgcctccccctcatctccagtgactcagcctacacaagggaggggaacattccatccccagtggagtctcttcctatgtggtcttctctacccctctaccccacattggccagtggactcatccattctttggaacaaatcccccccactccaaagtccatggattcaatggactcatccatttgtgaggaggacttctcgccctctggctggaagctgatacctgaagcactcccaggctcatcctgggagctttcctcagcaccttcaccttccctcccagtgtagcctcctgtcagtgggggctggacccttctaattcagaggtctcatgcctgcccttgcccagatgcccagggtcgtgcactctctgggataccagttcagtctccacatttctggttttctgtccccatagtacagttcttcagtggacatgaccccacccagccccctgcagccctgctgcaccatctcaccagacacaaggggaagaagcagacatcaggtgctgcactcacttctgccccctggggagttggggaaaggaacgaaccctggctggaggggataggagggcttttaatttatttctttttctgttgaggcttccccctctctgagccagttttcatttcttcctggtggcattagccactccctgcctctcactccagacctgttcccacaactggggaggtaggctgggagcaaaaggagagggtgggacccagttttgcgtggttggtttttattaattatctggataacagcaaaaaaactgaaaataaagagagagagaga

SEQ ID NO: 102469 - DNA, 2234 bp, Homo sapiens
  Payload ID: 2
  Gene Symbol: AGPAT1
  Gene Name: 1-acylglycerol-3-phosphate O-acyltransferase 1
  Uniprot ID: Q99943
  ENST ID: ENST00000399833
  CDS Start-End: 319-1170
ggaaaccagcaggcgttggggaggggtggcgggggaatagcggcggcagcagccccagccctcagagagacagcagaaagggagggagggagggtgctggggggacagccccccaccattcctaccgctatgggcccaacctcccactcccacctcccctccatcggccggggctaggacacccccaaatcccgtcgcccccttggcaccgacaccccgacagagacagagacacagccatccgccaccaccgctgccgcagcctggctggggagggggccagccccccaggccccctacccctctgaggtggccagaatggatttgtggccaggggcatggatgctgctgctgctgctcttcctgctgctgctcttcctgctgcccaccctgtggttctgcagccccagtgccaagtacttcttcaagatggccttctacaatggctggatcctcttcctggctgtgctcgccatccctgtgtgtgccgtgcgaggacgcaacgtcgagaacatgaagatcttgcgtctaatgctgctccacatcaaatacctgtacgggatccgagtggaggtgcgaggggctcaccacttccctccctcgcagccctatgttgttgtctccaaccaccagagctctctcgatctgcttgggatgatggaggtactgccaggccgctgtgtgcccattgccaagcgcgagctactgtgggctggctctgccgggctggcctgctggctggcaggagtcatcttcatcgaccggaagcgcacgggggatgccatcagtgtcatgtctgaggtcgcccagaccctgctcacccaggacgtgagggtctgggtgtttcctgagggaacgagaaaccacaatggctccatgctgcccttcaaacgtggcgccttccatcttgcagtgcaggcccaggttcccattgtccccatagtcatgtcctcctaccaagacttctactgcaagaaggagcgtcgcttcacctcgggacaatgtcaggtgcgggtgctgcccccagtgcccacggaagggctgacaccagatgacgtcccagctctggctgacagagtccggcactccatgctcactgttttccgggaaatctccactgatggccggggtggtggtgactatctgaagaagcctgggggcggtgggtgaaccctggctctgagctctcctcccatctgtccccatcttcctccccacacctacccacccagtgggccctgaagcagggccaaaccctcttccttgtctcccctctccccacttattctcctctttggaatcttcaacttctgaagtgaatgtggatacagcgccactcctgccccctcttggccccatccatggactcttgcctcggtgcagtctccactcttgacccccacctcctactgtcttgtctgtgggacagttgcctccccctcatctccagtgactcagcctacacaagggaggggaacattccatccccagtggagtctcttcctatgtggtcttctctacccctctaccccacattggccagtggactcatccattctttggaacaaatcccccccactccaaagtccatggattcaatggactcatccatttgtgaggaggacttctcgccctctggctggaagctgatacctgaagcactcccaggctcatcctgggagctttcctcagcaccttcaccttccctcccagtgtagcctcctgtcagtgggggctggacccttctaattcagaggtctcatgcctgcccttgcccagatgcccagggtcgtgcactctctgggataccagttcagtctccacatttctggttttctgtccccatagtacagttcttcagtggacatgaccccacccagccccctgcagccctgctgcaccatctcaccagacacaaggggaagaagcagacatcaggtgctgcactcacttctgccccctggggagttggggaaaggaacgaaccctggctggaggggataggagggcttttaatttatttctttttctgttgaggcttccccctctctgagccagttttcatttcttcctggtggcattagccactccctgcctctcactccagacctgttcccacaactggggaggtaggctgggagcaaaaggagagggtgggacccagttttgcgtggttggtttttattaattatctggataacagcaaaaaaactgaaaataaagagagagagaga

SEQ ID NO: 102470 - DNA, 2234 bp, Homo sapiens; identical to SEQ ID NO: 102469
  Payload ID: 2
  Gene Symbol: AGPAT1
  Gene Name: 1-acylglycerol-3-phosphate O-acyltransferase 1
  Uniprot ID: Q99943
  ENST ID: ENST00000452427
  CDS Start-End: 319-1170

SEQ ID NO: 102471 - DNA, 2234 bp, Homo sapiens
  Payload ID: 2
  Gene Symbol: AGPAT1
  Gene Name: 1-acylglycerol-3-phosphate O-acyltransferase 1
  Uniprot ID: Q99943
  ENST ID: ENST00000433376
  CDS Start-End: 319-1170
ggaaaccagcaggcgttggggaggggtggcgggggaatagcggcggcagcagccccagccctcagagagacagcagaaagggagggagggagggtgctggggggacagccccccaccattcctaccgctatgggcccaacctcccactcccacctcccctccatcggccggggctaggacacccccaaatcccgtcgcccccttggcaccgacaccccgacagagacagagacacagccatccgccaccaccgctgccgcagcctggctggggagggggccagccccccaggccccctacccctctgaggtggccagaatggatttgtggccaggggcatggatgctgctgctgctgctcttcctgctgctgctcttcctgctgcccaccctgtggttctgcagccccagtgccaagtacttcttcaagatggccttctacaatggctggatcctcttcctggctgtgctcgccatccctgtgtgtgccgtgcgaggacgcaacgtcgagaacatgaagatcttgcgtctaatgctgctccacatcaaatacctgtacgggatccgagtggaggtgcgaggggctcaccacttccctccctcgcagccctatgttgttgtctccaaccaccagagctctctcgatctgcttgggatgatggaggtactgccaggccgctgtgtgcccattgccaagcgcgagctactgtgggctggctctgccgggctggcctgctggctggcaggagtcatcttcatcgaccggaagcgcacgggggatgccatcagtgtcatgtctgaggtcgcccagaccctgctcacccaggacgtgagggtctgggtgtttcctgagggaacgagaaaccacaatggctccatgctgcccttcaaacgtggcgccttccatcttgcagtgcaggcccaggttcccattgtccccatagtcatgtcctcctaccaagacttctactgcaagaaggagcgtcgcttcacctcgggacaatgtcaggtgcgggtgctgcccccagtgcccacggaagggctgacaccagatgacgtcccagctctggctgacagagtccggcactccatgctcactgttttccgggaaatctccactgatggccggggtggtggtgactatctgaagaagcctgggggcggtgggtgaaccctggctctgagctctcctcccatctgtccccatcttcctccccacacctacccacccagtgggccctgaagcagggccaaaccctcttccttgtctcccctctccccacttattctcctctttggaatcttcaacttctgaagtgaatgtggatacagcgccactcctgccccctcttggccccatccatggactcttgcctcggtgcagtttccactcttgacccccacctcctactgtcttgtctgtgggacagttgcctccccctcatctccagtgactcagcctacacaagggaggggaacattccatccccagtggagtctcttcctatgtggtcttctctacccctctaccccacattggccagtggactcatccattctttggaacaaatcccccccactccaaagtccatggattcaatggactcatccatttgtgaggaggacttctcgccctctggctggaagctgatacctgaagcactcccaggctcatcctgggagctttcctcagcaccttcaccttccctcccagtgtagcctcctgtcagtgggggctggacccttctaattcagaggtctcatgcctgcccttgcccagatgcccagggtcgtgcactctctgggataccagttcagtctccacatttctggttttctgtccccatagtacagttcttcagtggacatgaccccacccagccccctgcagccctgctgcaccatctcaccagacacaaggggaagaagcagacatcaggtgctgcactcacttctgccccctggggagttggggaaaggaacgaaccctggctggaggggataggagggcttttaatttatttctttttctgttgaggcttccccctctctgagccagttttcatttcttcctggtggcattagccactccctgcctctcactccagacctgttcccacaactggggaggtaggctgggagcaaaaggagagggtgggacccagttttgcgtggttggtttttattaattatctggataacagcaaaaaaactgaaaataaagagagagagaga

SEQ ID NO: 102472 - DNA, 2168 bp, Homo sapiens; identical to SEQ ID NO: 102467
  Payload ID: 2
  Gene Symbol: AGPAT1
  Gene Name: 1-acylglycerol-3-phosphate O-acyltransferase 1
  Uniprot ID: Q99943
  ENST ID: ENST00000436149
  CDS Start-End: 253-1104

SEQ ID NO: 102473 - DNA, 2021 bp, Homo sapiens; identical to SEQ ID NO: 102461
  Payload ID: 2
  Gene Symbol: AGPAT1
  Gene Name: 1-acylglycerol-3-phosphate O-acyltransferase 1
  Uniprot ID: Q99943
  ENST ID: ENST00000425204
  CDS Start-End: 106-957

SEQ ID NO: 102474 - DNA, 2021 bp, Homo sapiens
  Payload ID: 2
  Gene Symbol: AGPAT1
  Gene Name: 1-acylglycerol-3-phosphate O-acyltransferase 1
  Uniprot ID: Q99943
  ENST ID: ENST00000456679
  CDS Start-End: 106-957
tcctcttttagagaatgtccggattgctattggactttggagcgtatggctccaaatcaactcattggctaaaacttgacggaaaatggtggttaggtggccagaatggatttgtggccaggggcatggatgctgctgctgctgctcttcctgctgctgctcttcctgctgcccaccctgtggttctgcagccccagtgccaagtacttcttcaagatggccttctacaatggctggatcctcttcctggctgtgctcgccatccctgtgtgtgccgtgcgaggacgcaacgtcgagaacatgaagatcttgcgtctaatgctgctccacatcaaatacctgtacgggatccgagtggaggtgcgaggggctcaccacttccctccctcgcagccctatgttgttgtctccaaccaccagagctctctcgatctgcttgggatgatggaggtactgccaggccgctgtgtgcccattgccaagcgcgagctactgtgggctggctctgccgggctggcctgctggctggcaggagtcatcttcatcgaccggaagcgcacgggggatgccatcagtgtcatgtctgaggtcgcccagaccctgctcacccaggacgtgagggtctgggtgtttcctgagggaacgagaaaccacaatggctccatgctgcccttcaaacgtggcgccttccatcttgcagtgcaggcccaggttcccattgtccccatagtcatgtcctcctaccaagacttctactgcaagaaggagcgtcgcttcacctcgggacaatgtcaggtgcgggtgctgcccccagtgcccacggaagggctgacaccagatgacgtcccagctctggctgacagagtccggcactccatgctcactgttttccgggaaatctccactgatggccggggtggtggtgactatctgaagaagcctgggggcggtgggtgaaccctggctctgagctctcctcccatctgtccccatcttcctccccacacctacccacccagtgggccctgaagcagggccaaaccctcttccttgtctcccctctccccacttattctcctatttggaatcttcaacttctgaagtgaatgtggatacagcgccactcctgccccctcttggccccatccatggactcttgcctcggtgcagtctccactcttgacccccacctcctactgtcttgtctgtgggacagttgcctccccctcatctccagtgactcagcctacacaagggaggggaacattccatccccagtggagtctcttcctatgtggtcttctctacccctctaccccacattggccagtggactcatccattctttggaacaaatcccccccactccaaagtccatggattcaatggactcatccatttgtgaggaggacttctcgccctctggctggaagctgatacctgaagcactcccaggctcatcctgggagctttcctcagcaccttcaccttccctcccagtgtagcctcctgtcagtgggggctggacccttctaattcagaggtctcatgcctgcccttgcccagatgcccagggtcgtgcactctctgggataccagttcagtctccacatttctggttttctgtccccatagtacagttcttcagtggacatgaccccacccagccccctgcagccctgctgcaccatctcaccagacacaaggggaagaagcagacatcaggtgctgcactcacttctgccccctggggagttggggaaaggaacgaaccctggctggaggggataggagggcttttaatttatttctttttctgttgaggcttccccctctctgagccagttttcatttcttcctggtggcattagccactccctgcctctcactccagacctgttcccacaactggggaggtaggctgggagcaaaaggagagggtgggacccagttttgcgtggttggtttttattaattatctggataacagcaaaaaaactgaaaataaagagagagagaga

SEQ ID NO: 102475 - DNA, 2234 bp, Homo sapiens
  Payload ID: 2
  Gene Symbol: AGPAT1
  Gene Name: 1-acylglycerol-3-phosphate O-acyltransferase 1
  Uniprot ID: Q99943
  ENST ID: ENST00000414933
  CDS Start-End: 319-1170
ggaaaccagcaggcgttggggaggggtggcgggggaatagcggcggcagcagccccagccctcagagagacagcagaaagggagggagggagggtgctggggggacagccccccaccattcctaccgctatgggcccaacctcccactcccacctcccctccatcggccggggctaggacacccccaaatcccgtcgcccccttggcaccgacaccccgacagagacagagacacagccatccgccaccaccgctgccgcagcctggctggggagggggccagccccccaggccccctacccctctgaggtggccagaatggatttgtggccaggggcatggatgctgctgctgctgctcttcctgctgctgctcttcctgctgcccaccctgtggttctgcagccccagtgccaagtacttcttcaagatggccttctacaatggctggatcctcttcctggctgtgctcgccatccctgtgtgtgccgtgcgaggacgcaacgtcgagaacatgaagatcttgcgtctaatgctgctccacatcaaatacctgtacgggatccgagtggaggtgcgaggggctcaccacttccctccctcgcagccctatgttgttgtctccaaccaccagagctctctcgatctgcttgggatgatggaggtactgccaggccgctgtgtgcccattgccaagcgcgagctactgtgggctggctctgccgggctggcctgctggctggcaggagtcatcttcatcgaccggaagcgcacgggggatgccatcagtgtcatgtctgaggtcgcccagaccctgctcacccaggacgtgagggtctgggtgtttcctgagggaacgagaaaccacaatggctccatgctgcccttcaaacgtggcgccttccatcttgcagtgcaggcccaggttcccattgtccccatagtcatgtcctcctaccaagacttctactgcaagaaggagcgtcgcttcacctcgggacaatgtcaggtgcgggtgctgcccccagtgcccacggaagggctgacaccagatgacgtcccagctctggctgacagagtccggcactccatgctcactgttttccgggaaatctccactgatggccggggtggtggtgactatctgaagaagcctgggggcggtgggtgaaccctggctctgagctctcctcccatctgtccccatcttcctccccacacctacccacccagtgggccctgaagcagggccaaaccctcttccttgtctcccctctccccacttattctcctatttggaatcttcaacttctgaagtgaatgtggatacagcgccactcctgccccctcttggccccatccatggactcttgcctcggtgcagtctccactcttgacccccacctcctactgtcttgtctgtgggacagttgcctccccctcatctccagtgactcagcctacacaagggaggggaacattccatccccagtggagtctcttcctatgtggtcttctctacccctctaccccacattggccagtggactcatccattctttggaacaaatcccccccactccaaagtccatggattcaatggactcatccatttgtgaggaggacttctcgccctctggctggaagctgatacctgaagcactcccaggctcatcctgggagctttcctcagcaccttcaccttccctcccagtgtagcctcctgtcagtgggggctggacccttctaattcagaggtctcatgcctgcccttgcccagatgcccagggtcgtgcactctctgggataccagttcagtctccacatttctggttttctgtccccatagtacagttcttcagtggacatgaccccacccagccccctgcagccctgctgcaccatctcaccagacacaaggggaagaagcagacatcaggtgctgcactcacttctgccccctggggagttggggaaaggaacgaaccctggctggaggggataggagggcttttaatttatttctttttctgttgaggcttccccctctctgagccagttttcatttcttcctggtggcattagccactccctgcctctcactccagacctgttcccacaactggggaggtaggctgggagcaaaaggagagggtgggacccagttttgcgtggttggtttttattaattatctggataacagcaaaaaaactgaaaataaagagagagagaga

SEQ ID NO: 102476 - DNA, 2017 bp, Homo sapiens
  Payload ID: 2
  Gene Symbol: AGPAT1
  Gene Name: 1-acylglycerol-3-phosphate O-acyltransferase 1
  Uniprot ID: Q99943
  ENST ID: ENST00000456421
  CDS Start-End: 102-953
gaaatagggtcttcttcccaggttggaccccggggagtttgggcttttcctacaatcactgaccctcactgtgactaaaggagcagaattaggtggccagaatggatttgtggccaggggcatggatgctgctgctgctgctcttcctgctgctgctcttcctgctgcccaccctgtggttctgcagccccagtgccaagtacttcttcaagatggccttctacaatggctggatcctcttcctggctgtgctcgccatccctgtgtgtgccgtgcgaggacgcaacgtcgagaacatgaagatcttgcgtctaatgctgctccacatcaaatacctgtacgggatccgagtggaggtgcgaggggctcaccacttccctccctcgcagccctatgttgttgtctccaaccaccagagctctctcgatctgcttgggatgatggaggtactgccaggccgctgtgtgcccattgccaagcgcgagctactgtgggctggctctgccgggctggcctgctggctggcaggagtcatcttcatcgaccggaagcgcacgggggatgccatcagtgtcatgtctgaggtcgcccagaccctgctcacccaggacgtgagggtctgggtgtttcctgagggaacgagaaaccacaatggctccatgctgcccttcaaacgtggcgccttccatcttgcagtgcaggcccaggttcccattgtccccatagtcatgtcctcctaccaagacttctactgcaagaaggagcgtcgcttcacctcgggacaatgtcaggtgcgggtgctgcccccagtgcccacggaagggctgacaccagatgacgtcccagctctggctgacagagtccggcactccatgctcactgttttccgggaaatctccactgatggccggggtggtggtgactatctgaagaagcctgggggcggtgggtgaaccctggctctgagctctcctcccatctgtccccatcttcctccccacacctacccacccagtgggccctgaagcagggccaaaccctcttccttgtctcccctctccccacttattctcctatttggaatcttcaacttctgaagtgaatgtggatacagcgccactcctgccccctcttggccccatccatggactcttgcctcggtgcagtctccactcttgacccccacctcctactgtcttgtctgtgggacagttgcctccccctcatctccagtgactcagcctacacaagggaggggaacattccatccccagtggagtctcttcctatgtggtcttctctacccctctaccccacattggccagtggactcatccattctttggaacaaatcccccccactccaaagtccatggattcaatggactcatccatttgtgaggaggacttctcgccctctggctggaagctgatacctgaagcactcccaggctcatcctgggagctttcctcagcaccttcaccttccctcccagtgtagcctcctgtcagtgggggctggacccttctaattcagaggtctcatgcctgcccttgcccagatgcccagggtcgtgcactctctgggataccagttcagtctccacatttctggttttctgtccccatagtacagttcttcagtggacatgaccccacccagccccctgcagccctgctgcaccatctcaccagacacaaggggaagaagcagacatcaggtgctgcactcacttctgccccctggggagttggggaaaggaacgaaccctggctggaggggataggagggcttttaatttatttctttttctgttgaggcttccccctctctgagccagttttcatttcttcctggtggcattagccactccctgcctctcactccagacctgttcccacaactggggaggtaggctgggagcaaaaggagagggtgggacccagttttgcgtggttggtttttattaattatctggataacagcaaaaaaactgaaaataaagagagagagaga

SEQ ID NO: 102477 - DNA, 2168 bp, Homo sapiens
  Payload ID: 2
  Gene Symbol: AGPAT1
  Gene Name: 1-acylglycerol-3-phosphate O-acyltransferase 1
  Uniprot ID: Q99943
  ENST ID: ENST00000454929
  CDS Start-End: 253-1104
tggccgacatcgggaaagacggcgaagagctaggaaaagagggaaaacactagggtcgcagggttcaaaatggctccaacctcctttggtgacgtagagagcagaacttgggtctgcccctcccttttagttaagggagcagaactgggattagcccgacgtttggatagtgggaacatcgatctgcggcgctggtgttaacccaactcattcggctggacgactcagccctccccatattaggtggccagaatggatttgtggccaggggcatggatgctgctgctgctgctcttcctgctgctgctcttcctgctgcccaccctgtggttctgcagccccagtgccaagtacttcttcaagatggccttctacaatggctggatcctcttcctggctgtgctcgccatccctgtgtgtgccgtgcgaggacgcaacgtcgagaacatgaagatcttgcgtctaatgctgctccacatcaaatacctgtacgggatccgagtggaggtgcgaggggctcaccacttccctccctcgcagccctatgttgttgtctccaaccaccagagctctctcgatctgcttgggatgatggaggtactgccaggccgctgtgtgcccattgccaagcgcgagctactgtgggctggctctgccgggctggcctgctggctggcaggagtcatcttcatcgaccggaagcgcacgggggatgccatcagtgtcatgtctgaggtcgcccagaccctgctcacccaggacgtgagggtctgggtgtttcctgagggaacgagaaaccacaatggctccatgctgcccttcaaacgtggcgccttccatcttgcagtgcaggcccaggttcccattgtccccatagtcatgtcctcctaccaagacttctactgcaagaaggagcgtcgcttcacctcgggacaatgtcaggtgcgggtgctgcccccagtgcccacggaagggctgacaccagatgacgtcccagctctggctgacagagtccggcactccatgctcactgttttccgggaaatctccactgatggccggggtggtggtgactatctgaagaagcctgggggcggtgggtgaaccctggctctgagctctcctcccatctgtccccatcttcctccccacacctacccacccagtgggccctgaagcagggccaaaccctcttccttgtctcccctctccccacttattctcctatttggaatcttcaacttctgaagtgaatgtggatacagcgccactcctgccccctcttggccccatccatggactcttgcctcggtgcagtctccactcttgacccccacctcctactgtcttgtctgtgggacagttgcctccccctcatctccagtgactcagcctacacaagggaggggaacattccatccccagtggagtctcttcctatgtggtcttctctacccctctaccccacattggccagtggactcatccattctttggaacaaatcccccccactccaaagtccatggattcaatggactcatccatttgtgaggaggacttctcgccctctggctggaagctgatacctgaagcactcccaggctcatcctgggagctttcctcagcaccttcaccttccctcccagtgtagcctcctgtcagtgggggctggacccttctaattcagaggtctcatgcctgcccttgcccagatgcccagggtcgtgcactctctgggataccagttcagtctccacatttctggttttctgtccccatagtacagttcttcagtggacatgaccccacccagccccctgcagccctgctgcaccatctcaccagacacaaggggaagaagcagacatcaggtgctgcactcacttctgccccctggggagttggggaaaggaacgaaccctggctggaggggataggagggcttttaatttatttctttttctgttgaggcttccccctctctgagccagttttcatttcttcctggtggcattagccactccctgcctctcactccagacctgttcccacaactggggaggtaggctgggagcaaaaggagagggtgggacccagttttgcgtggttggtttttattaattatctggataacagcaaaaaaactgaaaataaagagagagagaga

SEQ ID NO: 102478 - DNA, 2168 bp, Homo sapiens; identical to SEQ ID NO: 102467
  Payload ID: 2
  Gene Symbol: AGPAT1
  Gene Name: 1-acylglycerol-3-phosphate O-acyltransferase 1
  Uniprot ID: Q99943
  ENST ID: ENST00000446323
  CDS Start-End: 253-1104

SEQ ID NO: 102479 - DNA, 2021 bp, Homo sapiens
  Payload ID: 2
  Gene Symbol: AGPAT1
  Gene Name: 1-acylglycerol-3-phosphate O-acyltransferase 1
  Uniprot ID: Q99943
  ENST ID: ENST00000430777
  CDS Start-End: 106-957
tcctcttttagagaatgtccggattgctattggactttggagcgtatggctccaaatcaactcattggctaaaacttgacggaaaatggtggttaggtggccagaatggatttgtggccaggggcatggatgctgctgctgctgctcttcctgctgctgctcttcctgctgcccaccctgtggttctgcagccccagtgccaagtacttcttcaagatggccttctacaatggctggatcctcttcctggctgtgctcgccatccctgtgtgtgccgtgcgaggacgcaacgtcgagaacatgaagatcttgcgtctaatgctgctccacatcaaatacctgtacgggatccgagtggaggtgcgaggggctcaccacttccctccctcgcagccctatgttgttgtctccaaccaccagagctctctcgatctgcttgggatgatggaggtactgccaggccgctgtgtgcccattgccaagcgcgagctactgtgggctggctctgccgggctggcctgctggctggcaggagtcatcttcatcgaccggaagcgcacgggggatgccatcagtgtcatgtctgaggtcgcccagaccctgctcacccaggacgtgagggtctgggtgtttcctgagggaacgagaaaccacaatggctccatgctgcccttcaaacgtggcgccttccatcttgcagtgcaggcccaggttcccattgtccccatagtcatgtcctcctaccaagacttctactgcaagaaggagcgtcgcttcacctcgggacaatgtcaggtgcgggtgctgcccccagtgcccacggaagggctgacaccagatgacgtcccagctctggctgacagagtccggcactccatgctcactgttttccgggaaatctccactgatggccggggtggtggtgactatctgaagaagcctgggggcggtgggtgaaccctggctctgagctctcctcccatctgtccccatcttcctccccacacctacccacccagtgggccctgaagcagggccaaaccctcttccttgtctcccctctccccacttattctcctctttggaatcttcaacttctgaagtgaatgtggatacagcgccactcctgccccctcttggccccatccatggactcttgcctcggtgcagtttccactcttgacccccacctcctactgtcttgtctgtgggacagttgcctccccctcatctccagtgactcagcctacacaagggaggggaacattccatccccagtggagtctcttcctatgtggtcttctctacccctctaccccacattggccagtggactcatccattctttggaacaaatcccccccactccaaagtccatggattcaatggactcatccatttgtgaggaggacttctcgccctctggctggaagctgatacctgaagcactcccaggctcatcctgggagctttcctcagcaccttcaccttccctcccagtgtagcctcctgtcagtgggggctggacccttctaattcagaggtctcatgcctgcccttgcccagatgcccagggtcgtgcactctctgggataccagttcagtctccacatttctggttttctgtccccatagtacagttcttcagtggacatgaccccacccagccccctgcagccctgctgcaccatctcaccagacacaaggggaagaagcagacatcaggtgctgcactcacttctgccccctggggagttggggaaaggaacgaaccctggctggaggggataggagggcttttaatttatttctttttctgttgaggcttccccctctctgagccagttttcatttcttcctggtggcattagccactccctgcctctcactccagacctgttcccacaactggggaggtaggctgggagcaaaaggagagggtgggacccagttttgcgtggttggtttttattaattatctggataacagcaaaaaaactgaaaataaagagagagagaga

SEQ ID NO: 102480 - DNA, 2017 bp, Homo sapiens; identical to SEQ ID NO: 102468
  Payload ID: 2
  Gene Symbol: AGPAT1
  Gene Name: 1-acylglycerol-3-phosphate O-acyltransferase 1
  Uniprot ID: Q99943
  ENST ID: ENST00000425572
  CDS Start-End: 102-953

SEQ ID NO: 102481 - DNA, 2017 bp, Homo sapiens
  Payload ID: 2
  Gene Symbol: AGPAT1
  Gene Name: 1-acylglycerol-3-phosphate O-acyltransferase 1
  Uniprot ID: Q99943
  ENST ID: ENST00000455898
  CDS Start-End: 102-953
gaaatagggtcttcttcccaggttggaccccggggagtttgggcttttcctacaatcactgaccctcactgtgactaaaggagcagaattaggtggccagaatggatttgtggccaggggcatggatgctgctgctgctgctcttcctgctgctgctcttcctgctgcccaccctgtggttctgcagccccagtgccaagtacttcttcaagatggccttctacaatggctggatcctcttcctggctgtgctcgccatccctgtgtgtgccgtgcgaggacgcaacgtcgagaacatgaagatcttgcgtctaatgctgctccacatcaaatacctgtacgggatccgagtggaggtgcgaggggctcaccacttccctccctcgcagccctatgttgttgtctccaaccaccagagctctctcgatctgcttgggatgatggaggtactgccaggccgctgtgtgcccattgccaagcgcgagctactgtgggctggctctgccgggctggcctgctggctggcaggagtcatcttcatcgaccggaagcgcacgggggatgccatcagtgtcatgtctgaggtcgcccagaccctgctcacccaggacgtgagggtctgggtgtttcctgagggaacgagaaaccacaatggctccatgctgcccttcaaacgtggcgccttccatcttgcagtgcaggcccaggttcccattgtccccatagtcatgtcctcctaccaagacttctactgcaagaaggagcgtcgcttcacctcgggacaatgtcaggtgcgggtgctgcccccagtgcccacggaagggctgacaccagatgacgtcccagctctggctgacagagtccggcactccatgctcactgttttccgggaaatctccactgatggccggggtggtggtgactatctgaagaagcctgggggcggtgggtgaaccctggctctgagctctcctcccatctgtccccatcttcctccccacacctacccacccagtgggccctgaagcagggccaaaccctcttccttgtctcccctctccccacttattctcctctttggaatcttcaacttctgaagtgaatgtggatacagcgccactcctgccccctcttggccccatccatggactcttgcctcggtgcagtttccactcttgacccccacctcctactgtcttgtctgtgggacagttgcctccccctcatctccagtgactcagcctacacaagggaggggaacattccatccccagtggagtctcttcctatgtggtcttctctacccctctaccccacattggccagtggactcatccattctttggaacaaatcccccccactccaaagtccatggattcaatggactcatccatttgtgaggaggacttctcgccctctggctggaagctgatacctgaagcactcccaggctcatcctgggagctttcctcagcaccttcaccttccctcccagtgtagcctcctgtcagtgggggctggacccttctaattcagaggtctcatgcctgcccttgcccagatgcccagggtcgtgcactctctgggataccagttcagtctccacatttctggttttctgtccccatagtacagttcttcagtggacatgaccccacccagccccctgcagccctgctgcaccatctcaccagacacaaggggaagaagcagacatcaggtgctgcactcacttctgccccctggggagttggggaaaggaacgaaccctggctggaggggataggagggcttttaatttatttctttttctgttgaggcttccccctctctgagccagttttcatttcttcctggtggcattagccactccctgcctctcactccagacctgttcccacaactggggaggtaggctgggagcaaaaggagagggtgggacccagttttgcgtggttggtttttattaattatctggataacagcaaaaaaactgaaaataaagagagagagaga

SEQ ID NO: 102482 - DNA, 2168 bp, Homo sapiens
  Payload ID: 2
  Gene Symbol: AGPAT1
  Gene Name: 1-acylglycerol-3-phosphate O-acyltransferase 1
  Uniprot ID: Q99943
  ENST ID: ENST00000440840
  CDS Start-End: 253-1104
tggccgacatcgggaaagacggcgaagagctaggaaaagagggaaaacactagggtcgcagggttcaaaatggctccaacctcctttggtgacgtagagagcagaacttgggtctgcccctcccttttagttaagggagcagaactgggattagcccgacgtttggatagtgggaacatcgatctgcggcgctggtgttaacccaactcattcggctggacgactcagccctccccatattaggtggccagaatggatttgtggccaggggcatggatgctgctgctgctgctcttcctgctgctgctcttcctgctgcccaccctgtggttctgcagccccagtgccaagtacttcttcaagatggccttctacaatggctggatcctcttcctggctgtgctcgccatccctgtgtgtgccgtgcgaggacgcaacgtcgagaacatgaagatcttgcgtctaatgctgctccacatcaaatacctgtacgggatccgagtggaggtgcgaggggctcaccacttccctccctcgcagccctatgttgttgtctccaaccaccagagctctctcgatctgcttgggatgatggaggtactgccaggccgctgtgtgcccattgccaagcgcgagctactgtgggctggctctgccgggctggcctgctggctggcaggagtcatcttcatcgaccggaagcgcacgggggatgccatcagtgtcatgtctgaggtcgcccagaccctgctcacccaggacgtgagggtctgggtgtttcctgagggaacgagaaaccacaatggctccatgctgcccttcaaacgtggcgccttccatcttgcagtgcaggcccaggttcccattgtccccatagtcatgtcctcctaccaagacttctactgcaagaaggagcgtcgcttcacctcgggacaatgtcaggtgcgggtgctgcccccagtgcccacggaagggctgacaccagatgacgtcccagctctggctgacagagtccggcactccatgctcactgttttccgggaaatctccactgatggccggggtggtggtgactatctgaagaagcctgggggcggtgggtgaaccctggctctgagctctcctcccatctgtccccatcttcctccccacacctacccacccagtgggccctgaagcagggccaaaccctcttccttgtctcccctctccccacttattctcctctttggaatcttcaacttctgaagtgaatgtggatacagcgccactcctgccccctcttggccccatccatggactcttgcctcggtgcagtttccactcttgacccccacctcctactgtcttgtctgtgggacagttgcctccccctcatctccagtgactcagcctacacaagggaggggaacattccatccccagtggagtctcttcctatgtggtcttctctacccctctaccccacattggccagtggactcatccattctttggaacaaatcccccccactccaaagtccatggattcaatggactcatccatttgtgaggaggacttctcgccctctggctggaagctgatacctgaagcactcccaggctcatcctgggagctttcctcagcaccttcaccttccctcccagtgtagcctcctgtcagtgggggctggacccttctaattcagaggtctcatgcctgcccttgcccagatgcccagggtcgtgcactctctgggataccagttcagtctccacatttctggttttctgtccccatagtacagttcttcagtggacatgaccccacccagccccctgcagccctgctgcaccatctcaccagacacaaggggaagaagcagacatcaggtgctgcactcacttctgccccctggggagttggggaaaggaacgaaccctggctggaggggataggagggcttttaatttatttctttttctgttgaggcttccccctctctgagccagttttcatttcttcctggtggcattagccactccctgcctctcactccagacctgttcccacaactggggaggtaggctgggagcaaaaggagagggtgggacccagttttgcgtggttggtttttattaattatctggataacagcaaaaaaactgaaaataaagagagagagaga

SEQ ID NO: 102483 - DNA, 2496 bp, Homo sapiens
  Payload ID: 2
  Gene Symbol: AGPAT1
  Gene Name: 1-acylglycerol-3-phosphate O-acyltransferase 1
  Uniprot ID: Q99943
  ENST ID: ENST00000424030
  CDS Start-End: 581-1432
ggcagatgaggattcaggaagcttgaggtttaggaaggaagatattgagagggaaaggtggaaatgaaggagagtgaagtgatggaatgatcctagtaaagggataatgggagtggaggaagagaagagggggtggaaaactagatacatggctaccaaattaaggaggcacgcgcattccagaggaatcggcattcttcctcactttttatttttctagaaagcacccctgaagccaaatttccattggaagaaaagatgtacccatattgtatgttgtgagaaggggttgtctcagcttgggcaagtaaggagactgatacgaaggaagtaggaaagaaaaggtacagaggtaaaagagcatggaaaaggaaagggtcagggataaggccaaagagatctcttctctttaaaggccagagaaggcaggtggaggggggagctggactgctgggagatagtgagggacaaagggcaaaggaaaccagaccagaggactggagagtgagatggagtgagatggagtcctggagagaaaaagaagagaggtgaacttaatgcttgtcatatggtggccagaatggatttgtggccaggggcatggatgctgctgctgctgctcttcctgctgctgctcttcctgctgcccaccctgtggttctgcagccccagtgccaagtacttcttcaagatggccttctacaatggctggatcctcttcctggctgtgctcgccatccctgtgtgtgccgtgcgaggacgcaacgtcgagaacatgaagatcttgcgtctaatgctgctccacatcaaatacctgtacgggatccgagtggaggtgcgaggggctcaccacttccctccctcgcagccctatgttgttgtctccaaccaccagagctctctcgatctgcttgggatgatggaggtactgccaggccgctgtgtgcccattgccaagcgcgagctactgtgggctggctctgccgggctggcctgctggctggcaggagtcatcttcatcgaccggaagcgcacgggggatgccatcagtgtcatgtctgaggtcgcccagaccctgctcacccaggacgtgagggtctgggtgtttcctgagggaacgagaaaccacaatggctccatgctgcccttcaaacgtggcgccttccatcttgcagtgcaggcccaggttcccattgtccccatagtcatgtcctcctaccaagacttctactgcaagaaggagcgtcgcttcacctcgggacaatgtcaggtgcgggtgctgcccccagtgcccacggaagggctgacaccagatgacgtcccagctctggctgacagagtccggcactccatgctcactgttttccgggaaatctccactgatggccggggtggtggtgactatctgaagaagcctgggggcggtgggtgaaccctggctctgagctctcctcccatctgtccccatcttcctccccacacctacccacccagtgggccctgaagcagggccaaaccctcttccttgtctcccctctccccacttattctcctctttggaatcttcaacttctgaagtgaatgtggatacagcgccactcctgccccctcttggccccatccatggactcttgcctcggtgcagtttccactcttgacccccacctcctactgtcttgtctgtgggacagttgcctccccctcatctccagtgactcagcctacacaagggaggggaacattccatccccagtggagtctcttcctatgtggtcttctctacccctctaccccacattggccagtggactcatccattctttggaacaaatcccccccactccaaagtccatggattcaatggactcatccatttgtgaggaggacttctcgccctctggctggaagctgatacctgaagcactcccaggctcatcctgggagctttcctcagcaccttcaccttccctcccagtgtagcctcctgtcagtgggggctggacccttctaattcagaggtctcatgcctgcccttgcccagatgcccagggtcgtgcactctctgggataccagttcagtctccacatttctggttttctgtccccatagtacagttcttcagtggacatgaccccacccagccccctgcagccctgctgcaccatctcaccagacacaaggggaagaagcagacatcaggtgctgcactcacttctgccccctggggagttggggaaaggaacgaaccctggctggaggggataggagggcttttaatttatttctttttctgttgaggcttccccctctctgagccagttttcatttcttcctggtggcattagccactccctgcctctcactccagacctgttcccacaactggggaggtaggctgggagcaaaaggagagggtgggacccagttttgcgtggttggtttttattaattatctggataacagcaaaaaaactgaaaataaagagagagagaga

SEQ ID NO: 102484 - DNA, 2017 bp, Homo sapiens; identical to SEQ ID NO: 102481
  Payload ID: 2
  Gene Symbol: AGPAT1
  Gene Name: 1-acylglycerol-3-phosphate O-acyltransferase 1
  Uniprot ID: Q99943
  ENST ID: ENST00000439774
  CDS Start-End: 102-953

SEQ ID NO: 102485 - DNA, 2103 bp, Homo sapiens; identical to SEQ ID NO: 102466
  Payload ID: 2
  Gene Symbol: AGPAT1
  Gene Name: 1-acylglycerol-3-phosphate O-acyltransferase 1
  Uniprot ID: Q99943
  ENST ID: ENST00000434614
  CDS Start-End: 188-1039

SEQ ID NO: 102486 - DNA, 2017 bp, Homo sapiens; identical to SEQ ID NO: 102468
  Payload ID: 2
  Gene Symbol: AGPAT1
  Gene Name: 1-acylglycerol-3-phosphate O-acyltransferase 1
  Uniprot ID: Q99943
  ENST ID: ENST00000427763
  CDS Start-End: 102-953

SEQ ID NO: 102487 - DNA, 2021 bp, Homo sapiens; identical to SEQ ID NO: 102461
  Payload ID: 2
  Gene Symbol: AGPAT1
  Gene Name: 1-acylglycerol-3-phosphate O-acyltransferase 1
  Uniprot ID: Q99943
  ENST ID: ENST00000448196
  CDS Start-End: 106-957

SEQ ID NO: 102488 - DNA, 2103 bp, Homo sapiens; identical to SEQ ID NO: 102466
  Payload ID: 2
  Gene Symbol: AGPAT1
  Gene Name: 1-acylglycerol-3-phosphate O-acyltransferase 1
  Uniprot ID: Q99943
  ENST ID: ENST00000457923
  CDS Start-End: 188-1039

SEQ ID NO: 102489 - DNA, 2234 bp, Homo sapiens; identical to SEQ ID NO: 102469
  Payload ID: 2
  Gene Symbol: AGPAT1
  Gene Name: 1-acylglycerol-3-phosphate O-acyltransferase 1
  Uniprot ID: Q99943
  ENST ID: ENST00000446463
  CDS Start-End: 319-1170

SEQ ID NO: 102490 - DNA, 2168 bp, Homo sapiens; identical to SEQ ID NO: 102482
  Payload ID: 2
  Gene Symbol: AGPAT1
  Gene Name: 1-acylglycerol-3-phosphate O-acyltransferase 1
  Uniprot ID: Q99943
  ENST ID: ENST00000451833
  CDS Start-End: 253-1104

SEQ ID NO: 102491 - DNA, 2103 bp, Homo sapiens
  Payload ID: 2
  Gene Symbol: AGPAT1
  Gene Name: 1-acylglycerol-3-phosphate O-acyltransferase 1
  Uniprot ID: Q99943
  ENST ID: ENST00000452393
  CDS Start-End: 188-1039
ctttcctctcccagggcaagtgctgttaggtcacctttactccattccctccttttttcacttggtgaggcctcacacactgtacctgcccacgcaaagtgtcactagaaggaagggaaagggtagtaggattcgtttgcctgtctggaggtaggattggtctttgtagctattccaggtggccagaatggatttgtggccaggggcatggatgctgctgctgctgctcttcctgctgctgctcttcctgctgcccaccctgtggttctgcagccccagtgccaagtacttcttcaagatggccttctacaatggctggatcctcttcctggctgtgctcgccatccctgtgtgtgccgtgcgaggacgcaacgtcgagaacatgaagatcttgcgtctaatgctgctccacatcaaatacctgtacgggatccgagtggaggtgcgaggggctcaccacttccctccctcgcagccctatgttgttgtctccaaccaccagagctctctcgatctgcttgggatgatggaggtactgccaggccgctgtgtgcccattgccaagcgcgagctactgtgggctggctctgccgggctggcctgctggctggcaggagtcatcttcatcgaccggaagcgcacgggggatgccatcagtgtcatgtctgaggtcgcccagaccctgctcacccaggacgtgagggtctgggtgtttcctgagggaacgagaaaccacaatggctccatgctgcccttcaaacgtggcgccttccatcttgcagtgcaggcccaggttcccattgtccccatagtcatgtcctcctaccaagacttctactgcaagaaggagcgtcgcttcacctcgggacaatgtcaggtgcgggtgctgcccccagtgcccacggaagggctgacaccagatgacgtcccagctctggctgacagagtccggcactccatgctcactgttttccgggaaatctccactgatggccggggtggtggtgactatctgaagaagcctgggggcggtgggtgaaccctggctctgagctctcctcccatctgtccccatcttcctccccacacctacccacccagtgggccctgaagcagggccaaaccctcttccttgtctcccctctccccacttattctcctctttggaatcttcaacttctgaagtgaatgtggatacagcgccactcctgccccctcttggccccatccatggactcttgcctcggtgcagtttccactcttgacccccacctcctactgtcttgtctgtgggacagttgcctccccctcatctccagtgactcagcctacacaagggaggggaacattccatccccagtggagtctcttcctatgtggtcttctctacccctctaccccacattggccagtggactcatccattctttggaacaaatcccccccactccaaagtccatggattcaatggactcatccatttgtgaggaggacttctcgccctctggctggaagctgatacctgaagcactcccaggctcatcctgggagctttcctcagcaccttcaccttccctcccagtgtagcctcctgtcagtgggggctggacccttctaattcagaggtctcatgcctgcccttgcccagatgcccagggtcgtgcactctctgggataccagttcagtctccacatttctggttttctgtccccatagtacagttcttcagtggacatgaccccacccagccccctgcagccctgctgcaccatctcaccagacacaaggggaagaagcagacatcaggtgctgcactcacttctgccccctggggagttggggaaaggaacgaaccctggctggaggggataggagggcttttaatttatttctttttctgttgaggcttccccctctctgagccagttttcatttcttcctggtggcattagccactccctgcctctcactccagacctgttcccacaactggggaggtaggctgggagcaaaaggagagggtgggacccagttttgcgtggttggtttttattaattatctggataacagcaaaaaaactgaaaataaagagagagagaga

SEQ ID NO: 102492 - DNA, 2103 bp, Homo sapiens
  Payload ID: 2
  Gene Symbol: AGPAT1
  Gene Name: 1-acylglycerol-3-phosphate O-acyltransferase 1
  Uniprot ID: Q99943
  ENST ID: ENST00000414520
  CDS Start-End: 188-1039
ctttcctctcccagggcaagtgctgttaggtcacctttactccattccctccttttttcacttggtgaggcctcacacactgtacctgcccacgcaaagtgtcactagaaggaagggaaagggtagtaggattcgtttgcctgtctggaggtaggattggtctttgtagctattccaggtggccagaatggatttgtggccaggggcatggatgctgctgctgctgctcttcctgctgctgctcttcctgctgcccaccctgtggttctgcagccccagtgccaagtacttcttcaagatggccttctacaatggctggatcctcttcctggctgtgctcgccatccctgtgtgtgccgtgcgaggacgcaacgtcgagaacatgaagatcttgcgtctaatgctgctccacatcaaatacctgtacgggatccgagtggaggtgcgaggggctcaccacttccctccctcgcagccctatgttgttgtctccaaccaccagagctctctcgatctgcttgggatgatggaggtactgccaggccgctgtgtgcccattgccaagcgcgagctactgtgggctggctctgccgggctggcctgctggctggcaggagtcatcttcatcgaccggaagcgcacgggggatgccatcagtgtcatgtctgaggtcgcccagaccctgctcacccaggacgtgagggtctgggtgtttcctgagggaacgagaaaccacaatggctccatgctgcccttcaaacgtggcgccttccatcttgcagtgcaggcccaggttcccattgtccccatagtcatgtcctcctaccaagacttctactgcaagaaggagcgtcgcttcacctcgggacaatgtcaggtgcgggtgctgcccccagtgcccacggaagggctgacaccagatgacgtcccagctctggctgacagagtccggcactccatgctcactgttttccgggaaatctccactgatggccggggtggtggtgactatctgaagaagcctgggggcggtgggtgaaccctggctctgagctctcctcccatctgtccccatcttcctccccacacctacccacccagtgggccctgaagcagggccaaaccctcttccttgtctcccctctccccacttattctcctatttggaatcttcaacttctgaagtgaatgtggatacagcgccactcctgccccctcttggccccatccatggactcttgcctcggtgcagtctccactcttgacccccacctcctactgtcttgtctgtgggacagttgcctccccctcatctccagtgactcagcctacacaagggaggggaacattccatccccagtggagtctcttcctatgtggtcttctctacccctctaccccacattggccagtggactcatccattctttggaacaaatcccccccactccaaagtccatggattcaatggactcatccatttgtgaggaggacttctcgccctctggctggaagctgatacctgaagcactcccaggctcatcctgggagctttcctcagcaccttcaccttccctcccagtgtagcctcctgtcagtgggggctggacccttctaattcagaggtctcatgcctgcccttgcccagatgcccagggtcgtgcactctctgggataccagttcagtctccacatttctggttttctgtccccatagtacagttcttcagtggacatgaccccacccagccccctgcagccctgctgcaccatctcaccagacacaaggggaagaagcagacatcaggtgctgcactcacttctgccccctggggagttggggaaaggaacgaaccctggctggaggggataggagggcttttaatttatttctttttctgttgaggcttccccctctctgagccagttttcatttcttcctggtggcattagccactccctgcctctcactccagacctgttcccacaactggggaggtaggctgggagcaaaaggagagggtgggacccagttttgcgtggttggtttttattaattatctggataacagcaaaaaaactgaaaataaagagagagagaga

SEQ ID NO: 102493 - DNA, 2234 bp, Homo sapiens; identical to SEQ ID NO: 102471
  Payload ID: 2
  Gene Symbol: AGPAT1
  Gene Name: 1-acylglycerol-3-phosphate O-acyltransferase 1
  Uniprot ID: Q99943
  ENST ID: ENST00000416363
  CDS Start-End: 319-1170

SEQ ID NO: 102494 - DNA, 2496 bp, Homo sapiens
  Payload ID: 2
  Gene Symbol: AGPAT1
  Gene Name: 1-acylglycerol-3-phosphate O-acyltransferase 1
  Uniprot ID: Q99943
  ENST ID: ENST00000444369
  CDS Start-End: 581-1432
ggcagatgaggattcaggaagcttgaggtttaggaaggaagatattgagagggaaaggtggaaatgaaggagagtgaagtgatggaatgatcctagtaaagggataatgggagtggaggaagagaagagggggtggaaaactagatacatggctaccaaattaaggaggcacgcgcattccagaggaatcggcattcttcctcactttttatttttctagaaagcacccctgaagccaaatttccattggaagaaaagatgtacccatattgtatgttgtgagaaggggttgtctcagcttgggcaagtaaggagactgatacgaaggaagtaggaaagaaaaggtacagaggtaaaagagcatggaaaaggaaagggtcagggataaggccaaagagatctcttctctttaaaggccagagaaggcaggtggaggggggagctggactgctgggagatagtgagggacaaagggcaaaggaaaccagaccagaggactggagagtgagatggagtgagatggagtcctggagagaaaaagaagagaggtgaacttaatgcttgtcatatggtggccagaatggatttgtggccaggggcatggatgctgctgctgctgctcttcctgctgctgctcttcctgctgcccaccctgtggttctgcagccccagtgccaagtacttcttcaagatggccttctacaatggctggatcctcttcctggctgtgctcgccatccctgtgtgtgccgtgcgaggacgcaacgtcgagaacatgaagatcttgcgtctaatgctgctccacatcaaatacctgtacgggatccgagtggaggtgcgaggggctcaccacttccctccctcgcagccctatgttgttgtctccaaccaccagagctctctcgatctgcttgggatgatggaggtactgccaggccgctgtgtgcccattgccaagcgcgagctactgtgggctggctctgccgggctggcctgctggctggcaggagtcatcttcatcgaccggaagcgcacgggggatgccatcagtgtcatgtctgaggtcgcccagaccctgctcacccaggacgtgagggtctgggtgtttcctgagggaacgagaaaccacaatggctccatgctgcccttcaaacgtggcgccttccatcttgcagtgcaggcccaggttcccattgtccccatagtcatgtcctcctaccaagacttctactgcaagaaggagcgtcgcttcacctcgggacaatgtcaggtgcgggtgctgcccccagtgcccacggaagggctgacaccagatgacgtcccagctctggctgacagagtccggcactccatgctcactgttttccgggaaatctccactgatggccggggtggtggtgactatctgaagaagcctgggggcggtgggtgaaccctggctctgagctctcctcccatctgtccccatcttcctccccacacctacccacccagtgggccctgaagcagggccaaaccctcttccttgtctcccctctccccacttattctcctatttggaatcttcaacttctgaagtgaatgtggatacagcgccactcctgccccctcttggccccatccatggactcttgcctcggtgcagtctccactcttgacccccacctcctactgtcttgtctgtgggacagttgcctccccctcatctccagtgactcagcctacacaagggaggggaacattccatccccagtggagtctcttcctatgtggtcttctctacccctctaccccacattggccagtggactcatccattctttggaacaaatcccccccactccaaagtccatggattcaatggactcatccatttgtgaggaggacttctcgccctctggctggaagctgatacctgaagcactcccaggctcatcctgggagctttcctcagcaccttcaccttccctcccagtgtagcctcctgtcagtgggggctggacccttctaattcagaggtctcatgcctgcccttgcccagatgcccagggtcgtgcactctctgggataccagttcagtctccacatttctggttttctgtccccatagtacagttcttcagtggacatgaccccacccagccccctgcagccctgctgcaccatctcaccagacacaaggggaagaagcagacatcaggtgctgcactcacttctgccccctggggagttggggaaaggaacgaaccctggctggaggggataggagggcttttaatttatttctttttctgttgaggcttccccctctctgagccagttttcatttcttcctggtggcattagccactccctgcctctcactccagacctgttcccacaactggggaggtaggctgggagcaaaaggagagggtgggacccagttttgcgtggttggtttttattaattatctggataacagcaaaaaaactgaaaataaagagagagagaga

SEQ ID NO: 102495 - DNA, 2103 bp, Homo sapiens; identical to SEQ ID NO: 102491
  Payload ID: 2
  Gene Symbol: AGPAT1
  Gene Name: 1-acylglycerol-3-phosphate O-acyltransferase 1
  Uniprot ID: Q99943
  ENST ID: ENST00000433896
  CDS Start-End: 188-1039

SEQ ID NO: 102496 - DNA, 2496 bp, Homo sapiens; identical to SEQ ID NO: 102465
  Payload ID: 2
  Gene Symbol: AGPAT1
  Gene Name: 1-acylglycerol-3-phosphate O-acyltransferase 1
  Uniprot ID: Q99943
  ENST ID: ENST00000449776
  CDS Start-End: 581-1432

SEQ ID NO: 102497 - DNA, 2496 bp, Homo sapiens; identical to SEQ ID NO: 102465
  Payload ID: 2
  Gene Symbol: AGPAT1
  Gene Name: 1-acylglycerol-3-phosphate O-acyltransferase 1
  Uniprot ID: Q99943
  ENST ID: ENST00000430226
  CDS Start-End: 581-1432

SEQ ID NO: 102498 - DNA, 2496 bp, Homo sapiens; identical to SEQ ID NO: 102483
  Payload ID: 2
  Gene Symbol: AGPAT1
  Gene Name: 1-acylglycerol-3-phosphate O-acyltransferase 1
  Uniprot ID: Q99943
  ENST ID: ENST00000415173
  CDS Start-End: 581-1432

SEQ ID NO: 102499 - DNA, 2021 bp, Homo sapiens; identical to SEQ ID NO: 102479
  Payload ID: 2
  Gene Symbol: AGPAT1
  Gene Name: 1-acylglycerol-3-phosphate O-acyltransferase 1
  Uniprot ID: Q99943
  ENST ID: ENST00000417388
  CDS Start-End: 106-957

SEQ ID NO: 102500 - DNA, 1391 bp, Homo sapiens
  Payload ID: 3
  Gene Symbol: AGPAT2
  Gene Name: 1-acylglycerol-3-phosphate O-acyltransferase 2
  Uniprot ID: O15120
  ENST ID: ENST00000371694
  CDS Start-End: 42-782
cgggagcgagctggcggcgccgtcgggcgccgggccgggccatggagctgtggccgtgtctggccgcggcgctgctgttgctgctgctgctggtgcagctgagccgcgcggccgagttctacgccaaggtcgccctgtactgcgcgctgtgcttcacggtgtccgccgtggcctcgctcgtctgcctgctgcgccacggcggccggacggtggagaacatgagcatcatcggctggttcgtgcgaagcttcaagtacttttacgggctccgcttcgaggtgcgggacccgcgcaggctgcaggaggcccgtccctgtgtcatcgtctccaaccaccagagcatcctggacatgatgggcctcatggaggtccttccggagcgctgcgtgcagatcgccaagcgggagctgctcttcctggggcccgtgggcctcatcatgtacctcgggggcgtcttcttcatcaaccggcagcgctctagcactgccatgacagtgatggccgacctgggcgagcgcatggtcagggagaacgtgcccatcgtccccgtggtgtactcttccttctcctccttctacaacaccaagaagaagttcttcacttcaggaacagtcacagtgcaggtgctggaagccatccccaccagcggcctcactgcggcggacgtccctgcgctcgtggacacctgccaccgggccatgaggaccaccttcctccacatctccaagaccccccaggagaacggggccactgcggggtctggcgtgcagccggcccagtagcccagaccacggcagggcatgacctggggagggcaggtggaagccgatggctggaggatgggcagaggggactcctcccggcttccaaataccactctgtccggctcccccagctctcactcagcccgggaagcaggaagccccttctgtcactggcctcagacacaggcccctggtgtcccctgcagggggctcagctggaccctccccgggctcgagggcagggactcgcgcccacggcacctctgggagctgggatgataaagatgaggcttgcggctgtggcccgctggtgggctgagccacaaggcccccgatggcccaggagcagatgggaggaccccgaggccagacgcacactgtccgagccctctgctcagccgcctgggacccaccagggtgcagctgggctccagggtccagcccacaagctgcatcaggctctctgggagaggaggggcctggagggccaggagtcccagactcacgcaccctgggccacagggagccgggaatcggggcctgctgctcctgctggcctggaagactctgtggggtcagcactgtactccgttgctgtttttttataaacacactcttggaagtggc

SEQ ID NO: 102501 - DNA, 1512 bp, Homo sapiens
  Payload ID: 3
  Gene Symbol: AGPAT2
  Gene Name: 1-acylglycerol-3-phosphate O-acyltransferase 2
  Uniprot ID: O15120
  ENST ID: ENST00000371696
  CDS Start-End: 67-903
cgcgggggagaagcgggagcgggagcgggagcgagctggcggcgccgtcgggcgccgggccgggccatggagctgtggccgtgtctggccgcggcgctgctgttgctgctgctgctggtgcagctgagccgcgcggccgagttctacgccaaggtcgccctgtactgcgcgctgtgcttcacggtgtccgccgtggcctcgctcgtctgcctgctgcgccacggcggccggacggtggagaacatgagcatcatcggctggttcgtgcgaagcttcaagtacttttacgggctccgcttcgaggtgcgggacccgcgcaggctgcaggaggcccgtccctgtgtcatcgtctccaaccaccagagcatcctggacatgatgggcctcatggaggtccttccggagcgctgcgtgcagatcgccaagcgggagctgctcttcctggggcccgtgggcctcatcatgtacctcgggggcgtcttcttcatcaaccggcagcgctctagcactgccatgacagtgatggccgacctgggcgagcgcatggtcagggagaacctcaaagtgtggatctatcccgagggtactcgcaacgacaatggggacctgctgccttttaagaagggcgccttctacctggcagtccaggcacaggtgcccatcgtccccgtggtgtactcttccttctcctccttctacaacaccaagaagaagttcttcacttcaggaacagtcacagtgcaggtgctggaagccatccccaccagcggcctcactgcggcggacgtccctgcgctcgtggacacctgccaccgggccatgaggaccaccttcctccacatctccaagaccccccaggagaacggggccactgcggggtctggcgtgcagccggcccagtagcccagaccacggcagggcatgacctggggagggcaggtggaagccgatggctggaggatgggcagaggggactcctcccggcttccaaataccactctgtccggctcccccagctctcactcagcccgggaagcaggaagccccttctgtcactggcctcagacacaggcccctggtgtcccctgcagggggctcagctggaccctccccgggctcgagggcagggactcgcgcccacggcacctctgggagctgggatgataaagatgaggcttgcggctgtggcccgctggtgggctgagccacaaggcccccgatggcccaggagcagatgggaggaccccgaggccagacgcacactgtccgagccctctgctcagccgcctgggacccaccagggtgcagctgggctccagggtccagcccacaagctgcatcaggctctctgggagaggaggggcctggagggccaggagtcccagactcacgcaccctgggccacagggagccgggaatcggggcctgctgctcctgctggcctggaagactctgtggggtcagcactgtactccgttgctgtttttttataaacacactcttggaagtggc

SEQ ID NO: 102502 - DNA, 1357 bp, Homo sapiens
  Payload ID: 3
  Gene Symbol: AGPAT2
  Gene Name: 1-acylglycerol-3-phosphate O-acyltransferase 2
  Uniprot ID: O15120
  ENST ID: ENST00000538402
  CDS Start-End: 40-876
ggagcgagctggcggcgccgtcgggcgccgggccgggccatggagctgtggccgtgtctggccgcggcgctgctgttgctgctgctgctggtgcagctgagccgcgcggccgagttctacgccaaggtcgccctgtactgcgcgctgtgcttcacggtgtccgccgtggcctcgctcgtctgcctgctgcgccacggcggccggacggtggagaacatgagcatcatcggctggttcgtgcgaagcttcaagtacttttacgggctccgcttcgaggtgcgggacccgcgcaggctgcaggaggcccgtccctgtgtcatcgtctccaaccaccagagcatcctggacatgatgggcctcatggaggtccttccggagcgctgcgtgcagatcgccaagcgggagctgctcttcctggggcccgtgggcctcatcatgtacctcgggggcgtcttcttcatcaaccggcagcgctctagcactgccatgacagtgatggccgacctgggcgagcgcatggtcagggagaacctcaaagtgtggatctatcccgagggtactcgcaacgacaatggggacctgctgccttttaagaagggcgccttctacctggcagtccaggcacaggtgcccatcgtccccgtggtgtactcttccttctcctccttctacaacaccaagaagaagttcttcacttcaggaacagtcacagtgcaggtgctggaagccatccccaccagcggcctcactgcggcggacgtccctgcgctcgtggacacctgccaccgggccatgaggaccaccttcctccacatctccaagaccccccaggagaacggggccactgcggggtctggcgtgcagccggcccagtagcccagaccacggcagggcatgacctggggagggcaggtggaagccgatggctggaggatgggcagaggggactcctcccggcttccaaataccactctgtccggctcccccagctctcactcagcccgggaagcaggaagccccttctgtcactggcctcagacacaggcccctggtgtcccctgcagggggctcagctggaccctccccgggctcgagggcagggactcgcgcccacggcacctctgggagctgggatgataaagatgaggcttgcggctgtggcccgctggtgggctgagccacaaggcccccgatggcccaggagcagatgggaggaccccgaggccaggagtcccagactcacgcaccctgggccacagggagccgggaatcggggcctgctgctcctgctggcctggaagactctgtggggtcagcactgtactccgttgctgtttttttataaacacactcttgg

SEQ ID NO: 102503 - DNA, 5546 bp, Homo sapiens
  Payload ID: 4
  Gene Symbol: AGPAT3
  Gene Name: 1-acylglycerol-3-phosphate O-acyltransferase 3
  Uniprot ID: Q9NRZ7
  ENST ID: ENST00000291572
  CDS Start-End: 272-1402
gggcggcgggatgggggccgggggcggcgggcgccgcactcgctgaggccccgacgcagggccgggccgggcccagggccgaggagcgcggcggccagagcggggccgcggaggcgacgccggggacgcccgcgcgacgagcaggtggcggcggctgcaggcttgtccagccggaagccctgagggcagctgttcccactggctctgctgaccttgtgccttggacggctgtcctcagcgaggggccgtgcacccgctcctgagcagcgccatgggcctgctggccttcctgaagacccagttcgtgctgcacctgctggtcggctttgtcttcgtggtgagtggtctggtcatcaacttcgtccagctgtgcacgctggcgctctggccggtcagcaagcagctctaccgccgcctcaactgccgcctcgcctactcactctggagccaactggtcatgctgctggagtggtggtcctgcacggagtgtacactgttcacggaccaggccacggtagagcgctttgggaaggagcacgcagtcatcatcctcaaccacaacttcgagatcgacttcctctgtgggtggaccatgtgtgagcgcttcggagtgctggggagctccaaggtcctcgctaagaaggagctgctctacgtgcccctcatcggctggacgtggtactttctggagattgtgttctgcaagcggaagtgggaggaggaccgggacaccgtggtcgaagggctgaggcgcctgtcggactaccccgagtacatgtggtttctcctgtactgcgaggggacgcgcttcacggagaccaagcaccgcgttagcatggaggtggcggctgctaaggggcttcctgtcctcaagtaccacctgctgccgcggaccaagggcttcaccaccgcagtcaagtgcctccgggggacagtcgcagctgtctatgatgtaaccctgaacttcagaggaaacaagaacccgtccctgctggggatcctctacgggaagaagtacgaggcggacatgtgcgtgaggagatttcctctggaagacatcccgctggatgaaaaggaagcagctcagtggcttcataaactgtaccaggagaaggacgcgctccaggagatatataatcagaagggcatgtttccaggggagcagtttaagcctgcccggaggccgtggaccctcctgaacttcctgtcctgggccaccattctcctgtctcccctcttcagttttgtcttgggcgtctttgccagcggatcacctctcctgatcctgactttcttggggtttgtgggagcagcttcctttggagttcgcagactgataggagtaactgagatagaaaaaggctccagctacggaaaccaagagtttaagaaaaaggaataattaatggctgtgactgaacacacgcggccctgacggtggtatccagttaactcaaaaccaacacacagagtgcaggaaaagacaattagaaactatttttcttattaactggtgactaatattaacaaaacttgagccaagagtaaagaattcagaaggcctgtcaggtgaagtcttcagcctcccacagcgcagggtcccagcatctccacgcgcgcccgtgggaggtgggtccggccggagaggcctcccgcggacgccgtctctccagaactccgcttccaagagggagcctttggctgctttctctccttaaacttagatcaaattttttggtttttaatcagttatcttgggaacttaacctggcccctcacctcttctgcaccccccgcccccgaaactgtctcgtaatgaatttctgctgtcctcctgggagtggacggccgggtcccgtcccccgggagcatcgctcggctcagcaccttggctcccagtgggggccccgtggagggcgcccgtagtgataagcacaccggcacgaacgtcaggtccattcctcgaagtcggagccctcactctgccctgtcctggggctggctgagggcgaacgccccacctcactttctagagccctgtctgtcctagctcctatctgaccttgtgtgtaaatacgtacatctgtttttaaagtggatgggcccctgagaactcagtgaaatgcagagttctccatgcacctaaagctcctttgtcgctctcatggctgtcagatcctggtccctccacactgggtgctggggagggaggaccctcggggctaccgcgcgcccccccatcccacagatcaggagccaaggagggagaacagggcagcctgtgggactctaggatgcttcagaagaagcgacggcaccgtcaaccctctgttttttaaaggtggttggagactgttaacactgagctcattgacttctagagattttatttttactggttgatctcttggtggttttcaacttcctgctggaaactagaggtggggcaccccccaccccccagcctcgcactgtgtccttggggaaggcccgcccccatcctggccggtgtcactgtggcccggccacccctgagcgcccagctccctacctcctggacgtctctgagagtccaggcagagcagagggcagcgctcggccggtcatgctggctcccttggccttgcagcgagcccctggcccacgccgagcgagggatgcttctccctacagcatgtccactcccccggcatggccaggtggggcccctggggcaatggcagtggtagaacgctcaacttggttgcggtaccatcagcccacctgcatttggctttcgacttgcttgttctaagtcacagcgccctcatctttttagcaaggtaaaaaaaccaaaatgggtgttatctctgatatcttgaaaccagcgttctgaatagaggtaggttgagttttctaggggaaaacaaatggagaaaagaggcatgaagaaaagtaaaccgagaacataattaggcatcgggcctaagtgtcctggggagattggaggggacggcagcgttctgcatgatggaggcgctgccgggccccgggtctgtgggggccgtgctctcagggcgtgtgcgggacgccacctgtgcacacctgctcagagcacggctcctcgcaggggtgaaggggcagaccaacgaaaccagatgagaccaacgacaccatgcgagacacgcttgcagacactgttgttttggaaatgtgcttccctccatctgaaatctcatccctccacccgcccactcgggcagctgtgccgtgggcagggcatgcgctcccctggctgagcaccccagagattctcctgcaccttcctcatgccgcacgctgctcatccgtctccatgtgtgtttagatccatgccattcactgactcactaacacctgcaaaatctttaaggaaaaaagctgaagggtacgaccatgcacatatgtgacctggaaaatgcaaatttagatcttttatgatttaattattattgtttcccatagaagttccctccctttgaaattaatatataatgtataaattctgcactgagccatggcggagctgggcagcccctaggttagagtggagacggaggcccaggcgcaggggtcacacctcatctggtttccttcccatctcacagcttagcttgtgcttctcaacaccaagtctttaagagcaataaaaactacaccatgaatgtttgaattttttttttttgggggggggagggtggattttgcttttcatccagaaggaaaaggggaggagagctcctttacattttttaaattaaattcataaatcccagaacagtcttttttttttctttttcctttacaccctacttctgagcttaattcagttgatgttatgtccaaattcaggctgagtgctcaggctgaagcaactctgtagcccacagtccgtgctggccactgtcggggtgaggcacattctaggcctggcatcgctgatgccctctgcacccagtccttgagccaggccgaggacaggaagggcattgctggcctgtagctcctgttacccacccagagccaggcgccacactggaggctcccaggcgggagggcccaggcccacccacgggcgtctggccggtcaagctcccagcctgggccgtggtctcctggggacgccgctggcctcccagcttaggcccaggtgccaggtgtcatggggtctcctgcccatcttcccaaggatgccattgctgtcttcatcgtcttcccccgtgtgagacactggttgtctggtactcggcgacagtgtaccagacgcgcaccctatgtgaggtgctttaaggtccctgtcctcaggaagcgcagtctggtggaagagatgagcgctgaacaaatcactaaataacacaaaacaacaatgtaagcagcactttcttgtgtaaaaaaaaaaaaaaagcacgtcctgtcgatgaattttgagtctctctgccttgcctgtcccgactccctttcgcgcaccgtggcatgagaatctttcctcacgctgttcgttgcggtattgctgagcattgatgttgatttgaaggaaaagccgtggttggacccagctgtgtgtttcactcacgtgcaattgagtagctgttgccaggctgtccatgcctgttgtgactaccggttggggtcagatttggggtgaagaatgagtaagtttctgcatgctttgtctctacctgagacacttctacaacaagccaagtataatctctccagccctgcagattttcacctgacttgttcagccccatgcgtagactcccgctgcaggcctctggcctgtggctcactgcatgcagcccctggcgtgcaatactagtgctccacggcgcgatgtgcttctagcccttgcactgcacctaggctcagggttcaaacggccagcccgaaaagcctgcctgccttctttctggaaacagcacgtccccggccgtgtgcctgcccctttctctactgagctagtccccaaaccaaaggcaagccccctcgggcctcgggggatggggccggccacacccctgactccgccctggctctgccccatacccctgccgtggggccgacctgggggatgcagacatccggctccgtattcctgcctatcggggccaggatgcaaaaacaatttttgcgtaaaagatgtcacactgatctgctggagtggggtggacacatgaattcagttttatcatgaacactcgccactggctgcttgttaattcagggataatggtggcattcttacaaactgctcgggaaatagaatgacgggaacacttttagggagcccaggaagttaccagggacattggtgtcgccggcccaggcaacagcagcgtacgcttttcaaagatcattgagttgtcttagaatttgaagctgtgtaatgacaatgtcacctggagttcgtctccatttcttaactttttgttgcacaagtatttggacagaagtcgaactgtgaatgagatactgaaatgcactaaattgtattacattaaactggagttacttgatacaatgaa

SEQ ID NO: 102504 - DNA, 3589 bp, Homo sapiens
  Payload ID: 4
  Gene Symbol: AGPAT3
  Gene Name: 1-acylglycerol-3-phosphate O-acyltransferase 3
  Uniprot ID: Q9NRZ7
  ENST ID: ENST00000327505
  CDS Start-End: 178-1308
atttggtcacacggcgtctctccagtcctgcgcaagcacgttgacatgtgtgcctttcactttcaggcttgtccagccggaagccctgagggcagctgttcccactggctctgctgaccttgtgccttggacggctgtcctcagcgaggggccgtgcacccgctcctgagcagcgccatgggcctgctggccttcctgaagacccagttcgtgctgcacctgctggtcggctttgtcttcgtggtgagtggtctggtcatcaacttcgtccagctgtgcacgctggcgctctggccggtcagcaagcagctctaccgccgcctcaactgccgcctcgcctactcactctggagccaactggtcatgctgctggagtggtggtcctgcacggagtgtacactgttcacggaccaggccacggtagagcgctttgggaaggagcacgcagtcatcatcctcaaccacaacttcgagatcgacttcctctgtgggtggaccatgtgtgagcgcttcggagtgctggggagctccaaggtcctcgctaagaaggagctgctctacgtgcccctcatcggctggacgtggtactttctggagattgtgttctgcaagcggaagtgggaggaggaccgggacaccgtggtcgaagggctgaggcgcctgtcggactaccccgagtacatgtggtttctcctgtactgcgaggggacgcgcttcacggagaccaagcaccgcgttagcatggaggtggcggctgctaaggggcttcctgtcctcaagtaccacctgctgccgcggaccaagggcttcaccaccgcagtcaagtgcctccgggggacagtcgcagctgtctatgatgtaaccctgaacttcagaggaaacaagaacccgtccctgctggggatcctctacgggaagaagtacgaggcggacatgtgcgtgaggagatttcctctggaagacatcccgctggatgaaaaggaagcagctcagtggcttcataaactgtaccaggagaaggacgcgctccaggagatatataatcagaagggcatgtttccaggggagcagtttaagcctgcccggaggccgtggaccctcctgaacttcctgtcctgggccaccattctcctgtctcccctcttcagttttgtcttgggcgtctttgccagcggatcacctctcctgatcctgactttcttggggtttgtgggagcagcttcctttggagttcgcagactgataggagtaactgagatagaaaaaggctccagctacggaaaccaagagtttaagaaaaaggaataattaatggctgtgactgaacacacgcggccctgacggtggtatccagttaactcaaaaccaacacacagagtgcaggaaaagacaattagaaactatttttcttattaactggtgactaatattaacaaaacttgagccaagagtaaagaattcagaaggcctgtcaggtgaagtcttcagcctcccacagcgcagggtcccagcatctccacgcgcgcccgtgggaggtgggtccggccggagaggcctcccgcggacgccgtctctccagaactccgcttccaagagggagcctttggctgctttctctccttaaacttagatcaaattttttggtttttaatcagttatcttgggaacttaacctggcccctcacctcttctgcaccccccgcccccgaaactgtctcgtaatgaatttctgctgtcctcctgggagtggacggccgggtcccgtcccccgggagcatcgctcggctcagcaccttggctcccagtgggggccccgtggagggcgcccgtagtgataagcacaccggcacgaacgtcaggtccattcctcgaagtcggagccctcactctgccctgtcctggggctggctgagggcgaacgccccacctcactttctagagccctgtctgtcctagctcctatctgaccttgtgtgtaaatacgtacatctgtttttaaagtggatgggcccctgagaactcagtgaaatgcagagttctccatgcacctaaagctcctttgtcgctctcatggctgtcagatcctggtccctccacactgggtgctggggagggaggaccctcggggctaccgcgcgcccccccatcccacagatcaggagccaaggagggagaacagggcagcctgtgggactctaggatgcttcagaagaagcgacggcaccgtcaaccctctgttttttaaaggtggttggagactgttaacactgagctcattgacttctagagattttatttttactggttgatctcttggtggttttcaacttcctgctggaaactagaggtggggcaccccccaccccccagcctcgcactgtgtccttggggaaggcccgcccccatcctggccggtgtcactgtggcccggccacccctgagcgcccagctccctacctcctggacgtctctgagagtccaggcagagcagagggcagcgctcggccggtcatgctggctcccttggccttgcagcgagcccctggcccacgccgagcgagggatgcttctccctacagcatgtccactcccccggcatggccaggtggggcccctggggcaatggcagtggtagaacgctcaacttggttgcggtaccatcagcccacctgcatttggctttcgacttgcttgttctaagtcacagcgccctcatctttttagcaaggtaaaaaaaccaaaatgggtgttatctctgatatcttgaaaccagcgttctgaatagaggtaggttgagttttctaggggaaaacaaatggagaaaagaggcatgaagaaaagtaaaccgagaacataattaggcatcgggcctaagtgtcctggggagattggaggggacggcagcgttctgcatgatggaggcgctgccgggccccgggtctgtgggggccgtgctctcagggcgtgtgcgggacgccacctgtgcacacctgctcagagcacggctcctcgcaggggtgaaggggcagaccaacgaaaccagatgagaccaacgacaccatgcgagacacgcttgcagacactgttgttttggaaatgtgcttccctccatctgaaatctcatccctccacccgcccactcgggcagctgtgccgtgggcagggcatgcgctcccctggctgagcaccccagagattctcctgcaccttcctcatgccgcacgctgctcatccgtctccatgtgtgtttagatccatgccattcactgactcactaacacctgcaaaatctttaaggaaaaaagctgaagggtacgaccatgcacatatgtgacctggaaaatgcaaatttagatcttttatgatttaattattattgtttcccatagaagttccctccctttgaaattaatatataatgtataaattctgcactgagccatggcggagctgggcagcccctaggttagagtggagacggaggcccaggcgcaggggtcacacctcatctggtttccttcccatctcacagcttagcttgtgcttctcaacaccaagtctttaagagcaataaaaactacaccatgaa

SEQ ID NO: 102505 - DNA, 4338 bp, Homo sapiens
  Payload ID: 4
  Gene Symbol: AGPAT3
  Gene Name: 1-acylglycerol-3-phosphate O-acyltransferase 3
  Uniprot ID: Q9NRZ7
  ENST ID: ENST00000398058
  CDS Start-End: 927-2057
attgtgcagtcatcaggccctgggagctttccacatccctccacctcccacccaacatcaccactctccggccagtgagaccatcacagcaccccagaggagacaaattctggagctcagagagctgggtggctcctgcaccttcagacactgcctcctcaccgagggagggaagaacgacaaaggacctccaggacgtagaggttgatgatccgggcaggtggccttcagcgagggagcacgtcaaaaggctgtgggccgtgcagacagctgggggacaccgtcccgggtgtgaccttgggccacacggcagggtggtggacttgctcctagaattgggctccagggctgaagccagcccctctgatctggcactggccggctccattcaccctttttggggcttactgccgcagagacttcctttgaggagagctggacccaagacgccagagttccgggggcactgagtgctgtgtggcacccgggccaggagaaacatgtgccagagggcaggcgtgggctctccggggagtctctgcgtagactttctagcccagaggttcaggtgatggaccagagactggccgctttgtgacaccgaggacggttgataaagtggattctcgaggggaagctgcatccacacagaggctgggacgtgaatgtgcatcacggctctatctgtggcccccaaaggctgggtgccagctgcctgtcggcagggagcgtatcaccgtggcacgtccatgccgtgggggtcactcagcagccacggatgcgccctgggtgctgtcccggggccgtctcagaagcaccgcgctggaccggctgggccagatgccatgggattctgtgtttgtgaacctctagaaaaggacggctgtcctcagcgaggggccgtgcacccgctcctgagcagcgccatgggcctgctggccttcctgaagacccagttcgtgctgcacctgctggtcggctttgtcttcgtggtgagtggtctggtcatcaacttcgtccagctgtgcacgctggcgctctggccggtcagcaagcagctctaccgccgcctcaactgccgcctcgcctactcactctggagccaactggtcatgctgctggagtggtggtcctgcacggagtgtacactgttcacggaccaggccacggtagagcgctttgggaaggagcacgcagtcatcatcctcaaccacaacttcgagatcgacttcctctgtgggtggaccatgtgtgagcgcttcggagtgctggggagctccaaggtcctcgctaagaaggagctgctctacgtgcccctcatcggctggacgtggtactttctggagattgtgttctgcaagcggaagtgggaggaggaccgggacaccgtggtcgaagggctgaggcgcctgtcggactaccccgagtacatgtggtttctcctgtactgcgaggggacgcgcttcacggagaccaagcaccgcgttagcatggaggtggcggctgctaaggggcttcctgtcctcaagtaccacctgctgccgcggaccaagggcttcaccaccgcagtcaagtgcctccgggggacagtcgcagctgtctatgatgtaaccctgaacttcagaggaaacaagaacccgtccctgctggggatcctctacgggaagaagtacgaggcggacatgtgcgtgaggagatttcctctggaagacatcccgctggatgaaaaggaagcagctcagtggcttcataaactgtaccaggagaaggacgcgctccaggagatatataatcagaagggcatgtttccaggggagcagtttaagcctgcccggaggccgtggaccctcctgaacttcctgtcctgggccaccattctcctgtctcccctcttcagttttgtcttgggcgtctttgccagcggatcacctctcctgatcctgactttcttggggtttgtgggagcagcttcctttggagttcgcagactgataggagtaactgagatagaaaaaggctccagctacggaaaccaagagtttaagaaaaaggaataattaatggctgtgactgaacacacgcggccctgacggtggtatccagttaactcaaaaccaacacacagagtgcaggaaaagacaattagaaactatttttcttattaactggtgactaatattaacaaaacttgagccaagagtaaagaattcagaaggcctgtcaggtgaagtcttcagcctcccacagcgcagggtcccagcatctccacgcgcgcccgtgggaggtgggtccggccggagaggcctcccgcggacgccgtctctccagaactccgcttccaagagggagcctttggctgctttctctccttaaacttagatcaaattttttggtttttaatcagttatcttgggaacttaacctggcccctcacctcttctgcaccccccgcccccgaaactgtctcgtaatgaatttctgctgtcctcctgggagtggacggccgggtcccgtcccccgggagcatcgctcggctcagcaccttggctcccagtgggggccccgtggagggcgcccgtagtgataagcacaccggcacgaacgtcaggtccattcctcgaagtcggagccctcactctgccctgtcctggggctggctgagggcgaacgccccacctcactttctagagccctgtctgtcctagctcctatctgaccttgtgtgtaaatacgtacatctgtttttaaagtggatgggcccctgagaactcagtgaaatgcagagttctccatgcacctaaagctcctttgtcgctctcatggctgtcagatcctggtccctccacactgggtgctggggagggaggaccctcggggctaccgcgcgcccccccatcccacagatcaggagccaaggagggagaacagggcagcctgtgggactctaggatgcttcagaagaagcgacggcaccgtcaaccctctgttttttaaaggtggttggagactgttaacactgagctcattgacttctagagattttatttttactggttgatctcttggtggttttcaacttcctgctggaaactagaggtggggcaccccccaccccccagcctcgcactgtgtccttggggaaggcccgcccccatcctggccggtgtcactgtggcccggccacccctgagcgcccagctccctacctcctggacgtctctgagagtccaggcagagcagagggcagcgctcggccggtcatgctggctcccttggccttgcagcgagcccctggcccacgccgagcgagggatgcttctccctacagcatgtccactcccccggcatggccaggtggggcccctggggcaatggcagtggtagaacgctcaacttggttgcggtaccatcagcccacctgcatttggctttcgacttgcttgttctaagtcacagcgccctcatctttttagcaaggtaaaaaaaccaaaatgggtgttatctctgatatcttgaaaccagcgttctgaatagaggtaggttgagttttctaggggaaaacaaatggagaaaagaggcatgaagaaaagtaaaccgagaacataattaggcatcgggcctaagtgtcctggggagattggaggggacggcagcgttctgcatgatggaggcgctgccgggccccgggtctgtgggggccgtgctctcagggcgtgtgcgggacgccacctgtgcacacctgctcagagcacggctcctcgcaggggtgaaggggcagaccaacgaaaccagatgagaccaacgacaccatgcgagacacgcttgcagacactgttgttttggaaatgtgcttccctccatctgaaatctcatccctccacccgcccactcgggcagctgtgccgtgggcagggcatgcgctcccctggctgagcaccccagagattctcctgcaccttcctcatgccgcacgctgctcatccgtctccatgtgtgtttagatccatgccattcactgactcactaacacctgcaaaatctttaaggaaaaaagctgaagggtacgaccatgcacatatgtgacctggaaaatgcaaatttagatcttttatgatttaattattattgtttcccatagaagttccctccctttgaaattaatatataatgtataaattctgcactgagccatggcggagctgggcagcccctaggttagagtggagacggaggcccaggcgcaggggtcacacctcatctggtttccttcccatctcacagcttagcttgtgcttctcaacaccaagtctttaagagcaataaaaactacaccatgaa

SEQ ID NO: 102506 - DNA, 3595 bp, Homo sapiens
  Payload ID: 4
  Gene Symbol: AGPAT3
  Gene Name: 1-acylglycerol-3-phosphate O-acyltransferase 3
  Uniprot ID: Q9NRZ7
  ENST ID: ENST00000398061
  CDS Start-End: 184-1314
tctatgaaaccaacatacatggcgtttgcatcacagttggagtcagatgtgagcccggagggcaggtgtctggcttgtccagccggaagccctgagggcagctgttcccactggctctgctgaccttgtgccttggacggctgtcctcagcgaggggccgtgcacccgctcctgagcagcgccatgggcctgctggccttcctgaagacccagttcgtgctgcacctgctggtcggctttgtcttcgtggtgagtggtctggtcatcaacttcgtccagctgtgcacgctggcgctctggccggtcagcaagcagctctaccgccgcctcaactgccgcctcgcctactcactctggagccaactggtcatgctgctggagtggtggtcctgcacggagtgtacactgttcacggaccaggccacggtagagcgctttgggaaggagcacgcagtcatcatcctcaaccacaacttcgagatcgacttcctctgtgggtggaccatgtgtgagcgcttcggagtgctggggagctccaaggtcctcgctaagaaggagctgctctacgtgcccctcatcggctggacgtggtactttctggagattgtgttctgcaagcggaagtgggaggaggaccgggacaccgtggtcgaagggctgaggcgcctgtcggactaccccgagtacatgtggtttctcctgtactgcgaggggacgcgcttcacggagaccaagcaccgcgttagcatggaggtggcggctgctaaggggcttcctgtcctcaagtaccacctgctgccgcggaccaagggcttcaccaccgcagtcaagtgcctccgggggacagtcgcagctgtctatgatgtaaccctgaacttcagaggaaacaagaacccgtccctgctggggatcctctacgggaagaagtacgaggcggacatgtgcgtgaggagatttcctctggaagacatcccgctggatgaaaaggaagcagctcagtggcttcataaactgtaccaggagaaggacgcgctccaggagatatataatcagaagggcatgtttccaggggagcagtttaagcctgcccggaggccgtggaccctcctgaacttcctgtcctgggccaccattctcctgtctcccctcttcagttttgtcttgggcgtctttgccagcggatcacctctcctgatcctgactttcttggggtttgtgggagcagcttcctttggagttcgcagactgataggagtaactgagatagaaaaaggctccagctacggaaaccaagagtttaagaaaaaggaataattaatggctgtgactgaacacacgcggccctgacggtggtatccagttaactcaaaaccaacacacagagtgcaggaaaagacaattagaaactatttttcttattaactggtgactaatattaacaaaacttgagccaagagtaaagaattcagaaggcctgtcaggtgaagtcttcagcctcccacagcgcagggtcccagcatctccacgcgcgcccgtgggaggtgggtccggccggagaggcctcccgcggacgccgtctctccagaactccgcttccaagagggagcctttggctgctttctctccttaaacttagatcaaattttttggtttttaatcagttatcttgggaacttaacctggcccctcacctcttctgcaccccccgcccccgaaactgtctcgtaatgaatttctgctgtcctcctgggagtggacggccgggtcccgtcccccgggagcatcgctcggctcagcaccttggctcccagtgggggccccgtggagggcgcccgtagtgataagcacaccggcacgaacgtcaggtccattcctcgaagtcggagccctcactctgccctgtcctggggctggctgagggcgaacgccccacctcactttctagagccctgtctgtcctagctcctatctgaccttgtgtgtaaatacgtacatctgtttttaaagtggatgggcccctgagaactcagtgaaatgcagagttctccatgcacctaaagctcctttgtcgctctcatggctgtcagatcctggtccctccacactgggtgctggggagggaggaccctcggggctaccgcgcgcccccccatcccacagatcaggagccaaggagggagaacagggcagcctgtgggactctaggatgcttcagaagaagcgacggcaccgtcaaccctctgttttttaaaggtggttggagactgttaacactgagctcattgacttctagagattttatttttactggttgatctcttggtggttttcaacttcctgctggaaactagaggtggggcaccccccaccccccagcctcgcactgtgtccttggggaaggcccgcccccatcctggccggtgtcactgtggcccggccacccctgagcgcccagctccctacctcctggacgtctctgagagtccaggcagagcagagggcagcgctcggccggtcatgctggctcccttggccttgcagcgagcccctggcccacgccgagcgagggatgcttctccctacagcatgtccactcccccggcatggccaggtggggcccctggggcaatggcagtggtagaacgctcaacttggttgcggtaccatcagcccacctgcatttggctttcgacttgcttgttctaagtcacagcgccctcatctttttagcaaggtaaaaaaaccaaaatgggtgttatctctgatatcttgaaaccagcgttctgaatagaggtaggttgagttttctaggggaaaacaaatggagaaaagaggcatgaagaaaagtaaaccgagaacataattaggcatcgggcctaagtgtcctggggagattggaggggacggcagcgttctgcatgatggaggcgctgccgggccccgggtctgtgggggccgtgctctcagggcgtgtgcgggacgccacctgtgcacacctgctcagagcacggctcctcgcaggggtgaaggggcagaccaacgaaaccagatgagaccaacgacaccatgcgagacacgcttgcagacactgttgttttggaaatgtgcttccctccatctgaaatctcatccctccacccgcccactcgggcagctgtgccgtgggcagggcatgcgctcccctggctgagcaccccagagattctcctgcaccttcctcatgccgcacgctgctcatccgtctccatgtgtgtttagatccatgccattcactgactcactaacacctgcaaaatctttaaggaaaaaagctgaagggtacgaccatgcacatatgtgacctggaaaatgcaaatttagatcttttatgatttaattattattgtttcccatagaagttccctccctttgaaattaatatataatgtataaattctgcactgagccatggcggagctgggcagcccctaggttagagtggagacggaggcccaggcgcaggggtcacacctcatctggtttccttcccatctcacagcttagcttgtgcttctcaacaccaagtctttaagagcaataaaaactacaccatgaa

SEQ ID NO: 102507 - DNA, 5767 bp, Homo sapiens
  Payload ID: 4
  Gene Symbol: AGPAT3
  Gene Name: 1-acylglycerol-3-phosphate O-acyltransferase 3
  Uniprot ID: Q9NRZ7
  ENST ID: ENST00000398063
  CDS Start-End: 493-1623
cgccgacacatggtcgttcgacttctggcttggcctcttttgtgagtgtggggcctggtcatatcctcttggtcagtgtctctgtgatgatgagaacgggaagacggccacggtgcccaccctggcaggactctctcccctcgctggcgctggctcagctgccgtgagcggccgtaggcactgtcccgggccctcctgtggttgctcccagccatgctgctggctgcttctgccgtcctggcttgcagagactctgggtcatgcggggaagagggcagagtcctcctccctgctcaggcaagagaggatccagcaagatttcttcctccccaccctcctgcccctcccagtctgggcagcagataaaagccagggccccacacttctgccacctcctgctgctcacacactccagccagggacctgcccccggggtccaacaaggacggctgtcctcagcgaggggccgtgcacccgctcctgagcagcgccatgggcctgctggccttcctgaagacccagttcgtgctgcacctgctggtcggctttgtcttcgtggtgagtggtctggtcatcaacttcgtccagctgtgcacgctggcgctctggccggtcagcaagcagctctaccgccgcctcaactgccgcctcgcctactcactctggagccaactggtcatgctgctggagtggtggtcctgcacggagtgtacactgttcacggaccaggccacggtagagcgctttgggaaggagcacgcagtcatcatcctcaaccacaacttcgagatcgacttcctctgtgggtggaccatgtgtgagcgcttcggagtgctggggagctccaaggtcctcgctaagaaggagctgctctacgtgcccctcatcggctggacgtggtactttctggagattgtgttctgcaagcggaagtgggaggaggaccgggacaccgtggtcgaagggctgaggcgcctgtcggactaccccgagtacatgtggtttctcctgtactgcgaggggacgcgcttcacggagaccaagcaccgcgttagcatggaggtggcggctgctaaggggcttcctgtcctcaagtaccacctgctgccgcggaccaagggcttcaccaccgcagtcaagtgcctccgggggacagtcgcagctgtctatgatgtaaccctgaacttcagaggaaacaagaacccgtccctgctggggatcctctacgggaagaagtacgaggcggacatgtgcgtgaggagatttcctctggaagacatcccgctggatgaaaaggaagcagctcagtggcttcataaactgtaccaggagaaggacgcgctccaggagatatataatcagaagggcatgtttccaggggagcagtttaagcctgcccggaggccgtggaccctcctgaacttcctgtcctgggccaccattctcctgtctcccctcttcagttttgtcttgggcgtctttgccagcggatcacctctcctgatcctgactttcttggggtttgtgggagcagcttcctttggagttcgcagactgataggagtaactgagatagaaaaaggctccagctacggaaaccaagagtttaagaaaaaggaataattaatggctgtgactgaacacacgcggccctgacggtggtatccagttaactcaaaaccaacacacagagtgcaggaaaagacaattagaaactatttttcttattaactggtgactaatattaacaaaacttgagccaagagtaaagaattcagaaggcctgtcaggtgaagtcttcagcctcccacagcgcagggtcccagcatctccacgcgcgcccgtgggaggtgggtccggccggagaggcctcccgcggacgccgtctctccagaactccgcttccaagagggagcctttggctgctttctctccttaaacttagatcaaattttttggtttttaatcagttatcttgggaacttaacctggcccctcacctcttctgcaccccccgcccccgaaactgtctcgtaatgaatttctgctgtcctcctgggagtggacggccgggtcccgtcccccgggagcatcgctcggctcagcaccttggctcccagtgggggccccgtggagggcgcccgtagtgataagcacaccggcacgaacgtcaggtccattcctcgaagtcggagccctcactctgccctgtcctggggctggctgagggcgaacgccccacctcactttctagagccctgtctgtcctagctcctatctgaccttgtgtgtaaatacgtacatctgtttttaaagtggatgggcccctgagaactcagtgaaatgcagagttctccatgcacctaaagctcctttgtcgctctcatggctgtcagatcctggtccctccacactgggtgctggggagggaggaccctcggggctaccgcgcgcccccccatcccacagatcaggagccaaggagggagaacagggcagcctgtgggactctaggatgcttcagaagaagcgacggcaccgtcaaccctctgttttttaaaggtggttggagactgttaacactgagctcattgacttctagagattttatttttactggttgatctcttggtggttttcaacttcctgctggaaactagaggtggggcaccccccaccccccagcctcgcactgtgtccttggggaaggcccgcccccatcctggccggtgtcactgtggcccggccacccctgagcgcccagctccctacctcctggacgtctctgagagtccaggcagagcagagggcagcgctcggccggtcatgctggctcccttggccttgcagcgagcccctggcccacgccgagcgagggatgcttctccctacagcatgtccactcccccggcatggccaggtggggcccctggggcaatggcagtggtagaacgctcaacttggttgcggtaccatcagcccacctgcatttggctttcgacttgcttgttctaagtcacagcgccctcatctttttagcaaggtaaaaaaaccaaaatgggtgttatctctgatatcttgaaaccagcgttctgaatagaggtaggttgagttttctaggggaaaacaaatggagaaaagaggcatgaagaaaagtaaaccgagaacataattaggcatcgggcctaagtgtcctggggagattggaggggacggcagcgttctgcatgatggaggcgctgccgggccccgggtctgtgggggccgtgctctcagggcgtgtgcgggacgccacctgtgcacacctgctcagagcacggctcctcgcaggggtgaaggggcagaccaacgaaaccagatgagaccaacgacaccatgcgagacacgcttgcagacactgttgttttggaaatgtgcttccctccatctgaaatctcatccctccacccgcccactcgggcagctgtgccgtgggcagggcatgcgctcccctggctgagcaccccagagattctcctgcaccttcctcatgccgcacgctgctcatccgtctccatgtgtgtttagatccatgccattcactgactcactaacacctgcaaaatctttaaggaaaaaagctgaagggtacgaccatgcacatatgtgacctggaaaatgcaaatttagatcttttatgatttaattattattgtttcccatagaagttccctccctttgaaattaatatataatgtataaattctgcactgagccatggcggagctgggcagcccctaggttagagtggagacggaggcccaggcgcaggggtcacacctcatctggtttccttcccatctcacagcttagcttgtgcttctcaacaccaagtctttaagagcaataaaaactacaccatgaatgtttgaattttttttttttgggggggggagggtggattttgcttttcatccagaaggaaaaggggaggagagctcctttacattttttaaattaaattcataaatcccagaacagtcttttttttttctttttcctttacaccctacttctgagcttaattcagttgatgttatgtccaaattcaggctgagtgctcaggctgaagcaactctgtagcccacagtccgtgctggccactgtcggggtgaggcacattctaggcctggcatcgctgatgccctctgcacccagtccttgagccaggccgaggacaggaagggcattgctggcctgtagctcctgttacccacccagagccaggcgccacactggaggctcccaggcgggagggcccaggcccacccacgggcgtctggccggtcaagctcccagcctgggccgtggtctcctggggacgccgctggcctcccagcttaggcccaggtgccaggtgtcatggggtctcctgcccatcttcccaaggatgccattgctgtcttcatcgtcttcccccgtgtgagacactggttgtctggtactcggcgacagtgtaccagacgcgcaccctatgtgaggtgctttaaggtccctgtcctcaggaagcgcagtctggtggaagagatgagcgctgaacaaatcactaaataacacaaaacaacaatgtaagcagcactttcttgtgtaaaaaaaaaaaaaaagcacgtcctgtcgatgaattttgagtctctctgccttgcctgtcccgactccctttcgcgcaccgtggcatgagaatctttcctcacgctgttcgttgcggtattgctgagcattgatgttgatttgaaggaaaagccgtggttggacccagctgtgtgtttcactcacgtgcaattgagtagctgttgccaggctgtccatgcctgttgtgactaccggttggggtcagatttggggtgaagaatgagtaagtttctgcatgctttgtctctacctgagacacttctacaacaagccaagtataatctctccagccctgcagattttcacctgacttgttcagccccatgcgtagactcccgctgcaggcctctggcctgtggctcactgcatgcagcccctggcgtgcaatactagtgctccacggcgcgatgtgcttctagcccttgcactgcacctaggctcagggttcaaacggccagcccgaaaagcctgcctgccttctttctggaaacagcacgtccccggccgtgtgcctgcccctttctctactgagctagtccccaaaccaaaggcaagccccctcgggcctcgggggatggggccggccacacccctgactccgccctggctctgccccatacccctgccgtggggccgacctgggggatgcagacatccggctccgtattcctgcctatcggggccaggatgcaaaaacaatttttgcgtaaaagatgtcacactgatctgctggagtggggtggacacatgaattcagttttatcatgaacactcgccactggctgcttgttaattcagggataatggtggcattcttacaaactgctcgggaaatagaatgacgggaacacttttagggagcccaggaagttaccagggacattggtgtcgccggcccaggcaacagcagcgtacgcttttcaaagatcattgagttgtcttagaatttgaagctgtgtaatgacaatgtcacctggagttcgtctccatttcttaactttttgttgcacaagtatttggacagaagtcgaactgtgaatgagatactgaaatgcactaaattgtattacattaaactggagttacttgatacaatgaa

SEQ ID NO: 102508 - DNA, 454 bp, Homo sapiens
  Payload ID: 4
  Gene Symbol: AGPAT3
  Gene Name: 1-acylglycerol-3-phosphate O-acyltransferase 3
  ENST ID: ENST00000448287
  CDS Start-End: 217-454
cggaacggcagggccgcctttaggcttacatccctggaactcccacctccacagacccgtccgggtgctgaaagtccacggatgctatccctggtcaaatcagaggcttgtccagccggaagccctgagggcagctgttcccactggctctgctgaccttgtgccttggacggctgtcctcagcgaggggccgtgcacccgctcctgagcagcgccatgggcctgctggccttcctgaagacccagttcgtgctgcacctgctggtcggctttgtcttcgtggtgagtggtctggtcatcaacttcgtccagctgtgcacgctggcgctctggccggtcagcaagcagctctaccgccgcctcaactgccgcctcgcctactcactctggagccaactggtcatgctgctggagtggtggtcctgcacggagtgtacactgttcacggaccagg

SEQ ID NO: 102509 - DNA, 392 bp, Homo sapiens
  Payload ID: 4
  Gene Symbol: AGPAT3
  Gene Name: 1-acylglycerol-3-phosphate O-acyltransferase 3
  ENST ID: ENST00000448845
  CDS Start-End: 278-392
gagaccatcacagcaccccagaggagacaaattctggagctcagagagctgggagggcagctgctggtgtgacctcagctgctccccagaccctaaggggatctgggaccttccaccttctaccaacggtgttggtcttctgtcctcacgcctatggtttcacgctcccacagtggctcctgcaccttcagacactgcctcctcaccgagggagggaagaacgacaaaggacggctgtcctcagcgaggggccgtgcacccgctcctgagcagcgccatgggcctgctggccttcctgaagacccagttcgtgctgcacctgctggtcggctttgtcttcgtggtgagtggtctggtcatcaacttcgtccagctgtgcacgctggcgctct

SEQ ID NO: 102510 - DNA, 582 bp, Homo sapiens
  Payload ID: 4
  Gene Symbol: AGPAT3
  Gene Name: 1-acylglycerol-3-phosphate O-acyltransferase 3
  ENST ID: ENST00000445582
  CDS Start-End: 199-582
atatgtctgacagccttgtgtgcttatttcttgcccgcgtgttctgtctcgggttggaagggacacgcacgtctcctgccttcacatgctgagatgggtttctgtagcatccccagaatttctgctgaatgaagtgtgtcgggttatttggacggctgtcctcagcgaggggccgtgcacccgctcctgagcagcgccatgggcctgctggccttcctgaagacccagttcgtgctgcacctgctggtcggctttgtcttcgtggtgagtggtctggtcatcaacttcgtccagctgtgcacgctggcgctctggccggtcagcaagcagctctaccgccgcctcaactgccgcctcgcctactcactctggagccaactggtcatgctgctggagtggtggtcctgcacggagtgtacactgttcacggaccaggccacggtagagcgctttgggaaggagcacgcagtcatcatcctcaaccacaacttcgagatcgacttcctctgtgggtggaccatgtgtgagcgcttcggagtgctggggagctccaaggtcctcgctaagaaggagctgctctac

SEQ ID NO: 102511 - DNA, 924 bp, Homo sapiens
  Payload ID: 4
  Gene Symbol: AGPAT3
  Gene Name: 1-acylglycerol-3-phosphate O-acyltransferase 3
  ENST ID: ENST00000457068
  CDS Start-End: 158-924
tgggagctttccacatccctccacctcccacccaacatcaccactctccggccagtgagaccatcacagcaccccagaggagacaaattctggagctcagagagctggggacggctgtcctcagcgaggggccgtgcacccgctcctgagcagcgccatgggcctgctggccttcctgaagacccagttcgtgctgcacctgctggtcggctttgtcttcgtggtgagtggtctggtcatcaacttcgtccagctgtgcacgctggcgctctggccggtcagcaagcagctctaccgccgcctcaactgccgcctcgcctactcactctggagccaactggtcatgctgctggagtggtggtcctgcacggagtgtacactgttcacggaccaggccacggtagagcgctttgggaaggagcacgcagtcatcatcctcaaccacaacttcgagatcgacttcctctgtgggtggaccatgtgtgagcgcttcggagtgctggggagctccaaggtcctcgctaagaaggagctgctctacgtgcccctcatcggctggacgtggtactttctggagattgtgttctgcaagcggaagtgggaggaggaccgggacaccgtggtcgaagggctgaggcgcctgtcggactaccccgagtacatgtggtttctcctgtactgcgaggggacgcgcttcacggagaccaagcaccgcgttagcatggaggtggcggctgctaaggggcttcctgtcctcaagtaccacctgctgccgcggaccaagggcttcaccaccgcagtcaagtgcctccgggggacagtcgcagctgtctatgatgtaaccctgaacttcagaggaaacaagaacccgtccctgctggggatcctctacgggaagaagtacgaggcggacatgtgcgtgag

SEQ ID NO: 102512 - DNA, 1003 bp, Homo sapiens
  Payload ID: 4
  Gene Symbol: AGPAT3
  Gene Name: 1-acylglycerol-3-phosphate O-acyltransferase 3
  ENST ID: ENST00000422850
  CDS Start-End: 237-1003
tcctgggctcgtttctgccccaggtagtgctgtcagcggcatgcctgccttctgcaagcccctcttccctgttccccagcccgcacttccaatgagctgtgggccaggaaaccagcccgtcacacttgtccacgctgcgtttaaagcgggaggaaggaggacccaatgcagggcccgaaaggtccactgacggctgtcctcagcgaggggccgtgcacccgctcctgagcagcgccatgggcctgctggccttcctgaagacccagttcgtgctgcacctgctggtcggctttgtcttcgtggtgagtggtctggtcatcaacttcgtccagctgtgcacgctggcgctctggccggtcagcaagcagctctaccgccgcctcaactgccgcctcgcctactcactctggagccaactggtcatgctgctggagtggtggtcctgcacggagtgtacactgttcacggaccaggccacggtagagcgctttgggaaggagcacgcagtcatcatcctcaaccacaacttcgagatcgacttcctctgtgggtggaccatgtgtgagcgcttcggagtgctggggagctccaaggtcctcgctaagaaggagctgctctacgtgcccctcatcggctggacgtggtactttctggagattgtgttctgcaagcggaagtgggaggaggaccgggacaccgtggtcgaagggctgaggcgcctgtcggactaccccgagtacatgtggtttctcctgtactgcgaggggacgcgcttcacggagaccaagcaccgcgttagcatggaggtggcggctgctaaggggcttcctgtcctcaagtaccacctgctgccgcggaccaagggcttcaccaccgcagtcaagtgcctccgggggacagtcgcagctgtctatgatgtaaccctgaacttcagaggaaacaagaacccgtccctgctggggatcctctacgggaagaagtacgaggcggacatgtgcgtgag

SEQ ID NO: 102513 - DNA, 2199 bp, Homo sapiens
  Payload ID: 4
  Gene Symbol: AGPAT3
  Gene Name: 1-acylglycerol-3-phosphate O-acyltransferase 3
  Uniprot ID: Q9NRZ7
  ENST ID: ENST00000546158
  CDS Start-End: 744-1874
aggacctccaggacgtagaggttgatgatccgggcaggtggccttcagcgagggagcacgtcaaaaggctgtgggccgtgcagacagctgggggacaccgtcccgggtgtgaccttgggccacacggcagggtggtggacttgctcctagaattgggctccagggctgaagccagcccctctgatctggcactggccggctccattcaccctttttggggcttactgccgcagagacttcctttgaggagagctggacccaagacgccagagttccgggggcactgagtgctgtgtggcacccgggccaggagaaacatgtgccagagggcaggcgtgggctctccggggagtctctgcgtagactttctagcccagaggttcaggtgatggaccagagactggccgctttgtgacaccgaggacggttgataaagtggattctcgaggggaagctgcatccacacagaggctgggacgtgaatgtgcatcacggctctatctgtggcccccaaaggctgggtgccagctgcctgtcggcagggagcgtatcaccgtggcacgtccatgccgtgggggtcactcagcagccacggatgcgccctgggtgctgtcccggggccgtctcagaagcaccgcgctggaccggctgggccagatgccatgggattctgtgtttgtgaacctctagaaaaggacggctgtcctcagcgaggggccgtgcacccgctcctgagcagcgccatgggcctgctggccttcctgaagacccagttcgtgctgcacctgctggtcggctttgtcttcgtggtgagtggtctggtcatcaacttcgtccagctgtgcacgctggcgctctggccggtcagcaagcagctctaccgccgcctcaactgccgcctcgcctactcactctggagccaactggtcatgctgctggagtggtggtcctgcacggagtgtacactgttcacggaccaggccacggtagagcgctttgggaaggagcacgcagtcatcatcctcaaccacaacttcgagatcgacttcctctgtgggtggaccatgtgtgagcgcttcggagtgctggggagctccaaggtcctcgctaagaaggagctgctctacgtgcccctcatcggctggacgtggtactttctggagattgtgttctgcaagcggaagtgggaggaggaccgggacaccgtggtcgaagggctgaggcgcctgtcggactaccccgagtacatgtggtttctcctgtactgcgaggggacgcgcttcacggagaccaagcaccgcgttagcatggaggtggcggctgctaaggggcttcctgtcctcaagtaccacctgctgccgcggaccaagggcttcaccaccgcagtcaagtgcctccgggggacagtcgcagctgtctatgatgtaaccctgaacttcagaggaaacaagaacccgtccctgctggggatcctctacgggaagaagtacgaggcggacatgtgcgtgaggagatttcctctggaagacatcccgctggatgaaaaggaagcagctcagtggcttcataaactgtaccaggagaaggacgcgctccaggagatatataatcagaagggcatgtttccaggggagcagtttaagcctgcccggaggccgtggaccctcctgaacttcctgtcctgggccaccattctcctgtctcccctcttcagttttgtcttgggcgtctttgccagcggatcacctctcctgatcctgactttcttggggtttgtgggagcagcttcctttggagttcgcagactgataggagtaactgagatagaaaaaggctccagctacggaaaccaagagtttaagaaaaaggaataattaatggctgtgactgaacacacgcggccctgacggtggtatccagttaactcaaaaccaacacacagagtgcaggaaaagacaattagaaactatttttcttattaactggtgactaatattaacaaaacttgagccaagagtaaagaattcagaaggcctgtcaggtgaagtcttcagcctcccacagcgcagggtcccagcatctccacgcgcgcccgtgggaggtgggtccggccggagaggcctcccgcggacgccgtctctccagaactccgcttccaagagggagcctttggctgctttctctccttaaacttagatc

SEQ ID NO: 102514 - DNA, 7865 bp, Homo sapiens
  Payload ID: 5
  Gene Symbol: AGPAT4
  Gene Name: 1-acylglycerol-3-phosphate O-acyltransferase 4
  Uniprot ID: Q9NRZ5
  ENST ID: ENST00000320285
  CDS Start-End: 214-1350
gctttttctttccagtgttggctgacttacagctcttataaactagtggcaatttctgaacccagccggctccatctcagcttctggtttctaagtccatgtgccaaaggctgccaggaaggagacgccttcctgagtcctggatctttcttccttctggaaatctttgactgtgggtagttatttatttctgaataagagcgtccacgcatcatggacctcgcgggactgctgaagtctcagttcctgtgccacctggtcttctgctacgtctttattgcctcagggctaatcatcaacaccattcagctcttcactctcctcctctggcccattaacaagcagctcttccggaagatcaactgcagactgtcctattgcatctcaagccagctggtgatgctgctggagtggtggtcgggcacggaatgcaccatcttcacggacccgcgcgcctacctcaagtatgggaaggaaaatgccatcgtggttctcaaccacaagtttgaaattgactttctgtgtggctggagcctgtccgaacgctttgggctgttagggggctccaaggtcctggccaagaaagagctggcctatgtcccaattatcggctggatgtggtacttcaccgagatggtcttctgttcgcgcaagtgggagcaggatcgcaagacggttgccaccagtttgcagcacctccgggactaccccgagaagtattttttcctgattcactgtgagggcacacggttcacggagaagaagcatgagatcagcatgcaggtggcccgggccaaggggctgcctcgcctcaagcatcacctgttgccacgaaccaagggcttcgccatcaccgtgaggagcttgagaaatgtagtttcagctgtatatgactgtacactcaatttcagaaataatgaaaatccaacactgctgggagtcctaaacggaaagaaataccatgcagatttgtatgttaggaggatcccactggaagacatccctgaagacgatgacgagtgctcggcctggctgcacaagctctaccaggagaaggatgcctttcaggaggagtactacaggacgggcaccttcccagagacgcccatggtgcccccccggcggccctggaccctcgtgaactggctgttttgggcctcgctggtgctctaccctttcttccagttcctggtcagcatgatcaggagcgggtcttccctgacgctggccagcttcatcctcgtcttctttgtggcctccgtgggagttcgatggatgattggtgtgacggaaattgacaagggctctgcctacggcaactctgacagcaagcagaaactgaatgactgactcagggaggtgtcaccatccgaagggaaccttggggaactggtggcctctgcatatcctccttagtgggacacggtgacaaaggctgggtgagcccctgctgggcacggcggaagtcacgacctctccagccagggagtctggtctcaaggccggatggggaggaagatgttttgtaatctttttttccccatgtgctttagtgggctttggttttctttttgtgcgagtgtgtgtgagaatggctgtgtggtgagtgtgaactttgttctgtgatcatagaaagggtattttaggctgcaggggagggcagggctggggaccgaaggggacaagttcccctttcatcctttggtgctgagttttctgtaacccttggttgccagagataaagtgaaaagtgctttaggtgagatgactaaattatgcctccaagaaaaaaaaattaaagtgcttttctgggtcatctgtggtgtatgttgacatggaccgctgcccctccatcctgcccttgcccgtggctttggtgtttcagatcctactcacgggaggcagctgccgcggaggtgtgggcagctgagaggggtgggcaggccagcacagctcctggcaggagacacaggtccaggagcccgtgagcatttgtgagagcagagatggcaagcacgtgcgtggagaccaacgaagcgtgtccctggcacacagcaagggagagtttcgctcggtctctgcagtgcagtctcctggcgtaagtcttgaagatggacccaactccctgaagaaatggatcttgaaattgaacacaaacatcatgaacgtacagcctgggcattctgcagtgatttgtgagatgagcttgcatcgactgttcctctcagcagtgacagccaaagtcacccctgataaaatgcagtttcactttataaaatgcctcgccccttcccagcatgtagagcttgtctgcagccctaaaggagccaggtcctgctctgatgagggtcaaatcagagccgacatcccatgtacaaaaaacccccaggcttctgccttccttccgggctcctgtctgctcccattttactccacggaatagttctgccctgtagcatctccagcggcctttgcagactgctgtcagccaacaggtgccaaaaatgcaaaagaagaagaaactaaaagcagtgctatttttgcagaacaaatgctagctattaaatcatcttaggccaagacaccaatggcacttggaccgataggtatttggagcatgagttaggaaggatatgtctttctccaggtgcgcagctgaaagttgctgagaaaagctgcctgtgttgctgtggtaacatgagaaggaatgaacagctctatacaaaaactggccacacattataaggcctattctatgcagttatgtttttggctatttgctcatttagtcattgtttatcaaccaaactaggtaagccaaggagttacaagacagctctagagaagctccctctgcttacaggacaataatgcattgtttgtttgttgatacaaatgaattatttgaatccacagaagtgaaaaagggaaaaaatcctggctgacttgtgggaagagcgtactgcagagcctagggcctgagttaactcgctggcggccctgcaggcaggcttgatgggagcgcccagcacatctgcccaccctgcacagggcatgaagcaccgtgtgcagagatctgtgggcaaaagcccaggacgtgaccttaggcaagaggggtccttggagaagtggaggtgtgcatggtgtgtagccttgcgtgtctgtgagcacgccctagtggacctgcgcctggattatcgggccagtctctcggaggggtccgtgatgctgagttacgccattcacctgaactctgcagctcatcggctgtaggatttgggtgagacacttttccttgctgactcatttccccatctgcaaaatgggggtgacgatatctacctcttggggtgtgtcaagggtaaaagagcacactttaagaatcctaaagcactaagccaaggatgaaagactagaaagctgcctctatgttgctactctcaaaaatgctcagaaattttcttgtcgtactaaaaatgtgttatttttctcattttcattcttccattcaacacagaagtaatctaagtaagttctaaaaacatagatccgggggcccacagacattcaattttcttctgaattggctctggtatcacacaacacacaagcaagcaaacagcctgcctgctagggccttgggttccaggctggaggaatgcaggcagaaatctcttaggaaataactaagtgagcgccaagttttgaattgccttagagccgaaagagaatgtggcgtgctggggagagatctggacctctttctcatcagtcatttgacctgtccacgaagaacaattttgttatgcagcctgggaacctggtttccttacaccctgcgcccttaatgacacagacaaccacgggtactcctggacggaagctcatcacgcctcctcaaataccttcacccatgttcaggtcacacggaggtcaccatctcctcagcacacaacaactgctttggttcccagggttattttttctacgagttgaaaacccacggagcctaagccatctttttgtcccctaaggagagccccatagactaagagctacacttcctgtctgtctttcccacctttccatctcattctagcttaaagcttatcacgctactgagagcctgttctgtagttcaaggtggcagagaaaaatacgaaccttgagtgaaatctggagagcagtgcagggtcatccccagacgtgacgggccatatcctaggcgactcctgcagcttatagaagcagggaatttaatggacttcttccaggaaagccagcccacggggactcttaaaaagacaccaaccatttggaagatgcagcttgaggtctgggggactggactgattctgccaccatatagtgaacacgattaatcgggaggaagaagtaaggcactctgtgagttagtctaccaccctattgactttgacagagagaaaaccaacttttttcatatgatcacacagtagtactggaatatctcgactgcaatatcctctaaacaaatgcatgcaaagctttgtaaaagcagctgatgattaaaaaaattttaaaacattagggtttttctaatatatccatatgtgggacagtgatttaaatgtcattaattgtccagccacaacttgtaacagtgatgtgaaagacacaaaaaaggccccactggagtggaggagtggtctggctggtccccaagcaaaacagaatgggcttcgcataggctttagaacttattcataaatattgaccaaagtgtgaagcaaggtatccagtgaagattctctagggtctctacttctgctcaagagatttaatccagctttctctaaagcagtggtccagacttgccacatactaggttaaagataaagtgagaaaaacaaatactttggtttgcacgtctcttgaggggccctaggctgtatggaggaatatttagaggaatatttgtgagctgccatttgtgtttaaaagaacatgaaagcaagacgggccctaacccgcctgtgtctgtagctgaccaggaggccactgcttccttcccccagagcttctaggagagccccccaaaatgcaactctccaaggtcctgtggagtagtcccctcataatgcctccaccacacctgtgtctcacgatgccttaactgacgtagctcctaagtgatgttcacagagaaggaaatacttaggcaagcccatgtgtaacatgctcacagatgtgctggctttgccaatgctttcggactccaccatgctttctgattcttctggtcctagtcacgccttggcacggggcagaagcggccgagctatgctgacaggtgctgctgagagccaacagccattcagccgagaaggcgtttctaggtgagggcatgagagctggcattccaggctgctgagtgcggcatctgcaggtgcaccacattgctccacggtgtgttcagaagagaccagcatcttgaatctcaggctctgggctcattctttgcctctgccaagggaccattcaggggcttcaagccagctgctgaaaatcccccttttctggatttttccccatctatataaggatatggtggctgtgtggacaagaaattggtttcatctcagaagggtgcttccctacaaagatcttcagaaatttaattgaaaacaattttttgaactttttttgtttggccaggatgaatgaagctgaagtcacatcctgaatgtgcatgccagacaaagggtaagcaagcagtctttacaaatgccaatccctctgcactccaaaaccggagcccgtaatgaaggcccaggttccagtcatcacaggatcccccaagccagcacagtgcctgatgcctccctaggcattagcacatcccagcactctaattcacatcctcagcatccctgcctcctgcatccagggcttaggttgagtgtttccagagtgtcaagtacatttaaacacaaaccaaatactccagggttttgacctgtcacaatggcttttgaaaacaacagacgtacaatttgagagaaggactcgatggacttcttaggctgaggactaaggacatgttgctgttcctcttggtccaggacattcaataccattcacagcattcatcaccaactgacatagtatcgatcacgacattcaactgtttgaaattactgctattttggtcaaaaactaagaaatcagaaattgcacctacatagtgtgtctcctcattggagtcccatctctctgagcacagggatgggctcctgagctcacagccctgccctgcccccccagcagggcctcaccctcatggccctcagtgaatagtgactacatgaagggggcacttactagaggcctgagtaatggaatttcaattagcttctgcttcccttttctaaaaaagaaccacctttcttaagaataattaggccaaaataaacttgagtaatttgtacagtcaatattttgaagtttcggagttaccagtgaaatagcaaagctgttctccaggaaaggacatccaggttcccacccaggccttccttcctcagctcctgcagcctcatcctagtttaatatgaaggttgtgaatgggttaaaaagcagttcttaagcacctacttagatcttttcagtatctggaaatagcacccagggctgtgttagtaaagcttttcactgggtaagagtcatacaatttttacatttaatttgtttttttaaaacaaggcagtcttgttttacatattggaatgactagatattttttgacatttctggcacctctggttctgctgaattttaagggaggtgagtggtatgtacacaaagttaagattgctgcataataattcctttgcatttccaaaataaattacacaaatgtcacttttccttttctattccatagtactagttttagccagatctttgccaaacattctaggacattcagaaaagtcatccatggaattttggaatgccattctctctgtatctttgcagatcatgaggaaggaaagttgatgaactagtacgggatggctcagacttgtaaagtgtctaagtcacaacgctgcagagccagcttccgggtagcaatggcatggcctcagctgtgccaaggctacaactggagcttccttactcgcatctgaggcaaacacagcaaggctggcccaggccgcccacagtcaacagatgttcacgggagatggatcagcccctcttttgcttgttctatcaaggaaagagatctaaccatgggcaagggtggaacacacccggttcaggtcagggaatgagttgctctaagtgaacagtgaattcttacttctcagcctgtatcaattgtacccagggttcatgattactgtgacccactaagggatgatctttgaggaaacagacctggagggaggtaatttaaggagggaaagcgagtgggttttacagactgctttgtggcgacattcaggaacagaccattcaatggatgacttttcagtacataaaagcaagcagtaatggccaggagagagcaaagatgccctaagaatgacatcagactgaccaaatgtgccttttcaaataagttatgagaacgaatgaattggaattagagcaaggtattggacagaaccatgctagtctttgagagaacgtgtggattgggtggatgtttggaccgaatgaatggtaactttttaatgtgaaacagagaactgatatatgggctgtcatgtcaccctagggtactgtcgctctgtcatgtgtagcaatctttccaaatttttgttggtgggctgaacaaagataaaactaataaagtatgtgtggataccactaga

SEQ ID NO: 102515 - DNA, 942 bp, Homo sapiens
  Payload ID: 5
  Gene Symbol: AGPAT4
  Gene Name: 1-acylglycerol-3-phosphate O-acyltransferase 4
  ENST ID: ENST00000366905
  CDS Start-End: 185-664
cagctcttataaactagtggcaatttctgaacccagccggctccatctcagcttctggtttctaagtccatgtgccaaaggctgccaggaaggagacgccttcctgagtcctggatctttcttccttctggaaatctttgactgtgggtagttatttatttctgaataagagcgtccacgcatcatggacctcgcgggactgctgaagtctcagttcctgtgccacctggtcttctgctacgtctttattgcctcagggctaatcatcaacaccattcagctcttcactctcctcctctggcccattaacaagcagctcttccggaagatcaactgcagactgtcctattgcatctcaagccagctggtgatgctgctggagtggtggtcgggcacggaatgcaccatcttcacggacccgcgcgcctacctcaagtatgggaaggaaaatgccatcgtggttctcaaccacaagtttgaaattgactttctgtgtggctggagcctgtccgaacgctttgggctgttaggggtaagtcagaagtgcattcccccctgcctcacacatttctctggttcagccccaccacttgtctttttgctcctggtcattcagaacttgcagaagaatcaacagagtttctacttgatgaaatggtcctaataaactgctttttattcttgctgggagtcagtcttaacagcttcttatgggcaatcataagaggtactcaacaattgctacctgccggccattttacatatgattcatttatttaatccttacagcaacatgaatagatgatgtgccacactccattttttaaaaactaagttatatagagcttaatattcggctcagagtcacacagctgtaattagatttggatttcactcccatccatatttcttaattccatgctctactgcctccttggctaa

SEQ ID NO: 102516 - DNA, 7705 bp, Homo sapiens
  Payload ID: 5
  Gene Symbol: AGPAT4
  Gene Name: 1-acylglycerol-3-phosphate O-acyltransferase 4
  ENST ID: ENST00000366911
  CDS Start-End: 178-534
tataaactagtggcaatttctgaacccagccggctccatctcagcttctggtttctaagtccatgtgccaaaggctgccaggaaggagacgccttcctgagtcctggatctttcttccttctggaaatctttgactgtgggtagttatttatttctgaataagagcgtccacgcatcatggacctcgcgggactgctgaagtctcagttcctgtgccacctggtcttctgctacgtctttattgcctcagggctaatcatcaacaccattcagctcttcactctcctcctctggcccattaacaagcagctcttccggaagatcaactgcagactgtcctattgcatctcaagccggctccaaggtcctggccaagaaagagctggcctatgtcccaattatcggctggatgtggtacttcaccgagatggtcttctgttcgcgcaagtgggagcaggatcgcaagacggttgccaccagtttgcagcacctccgggactaccccgagaagtattttttcctgattcactgtgagggcacacggttcacggagaagaagcatgagatcagcatgcaggtggcccgggccaaggggctgcctcgcctcaagcatcacctgttgccacgaaccaagggcttcgccatcaccgtgaggagcttgagaaatgtagtttcagctgtatatgactgtacactcaatttcagaaataatgaaaatccaacactgctgggagtcctaaacggaaagaaataccatgcagatttgtatgttaggaggatcccactggaagacatccctgaagacgatgacgagtgctcggcctggctgcacaagctctaccaggagaaggatgcctttcaggaggagtactacaggacgggcaccttcccagagacgcccatggtgcccccccggcggccctggaccctcgtgaactggctgttttgggcctcgctggtgctctaccctttcttccagttcctggtcagcatgatcaggagcgggtcttccctgacgctggccagcttcatcctcgtcttctttgtggcctccgtgggagttcgatggatgattggtgtgacggaaattgacaagggctctgcctacggcaactctgacagcaagcagaaactgaatgactgactcagggaggtgtcaccatccgaagggaaccttggggaactggtggcctctgcatatcctccttagtgggacacggtgacaaaggctgggtgagcccctgctgggcacggcggaagtcacgacctctccagccagggagtctggtctcaaggccggatggggaggaagatgttttgtaatctttttttccccatgtgctttagtgggctttggttttctttttgtgcgagtgtgtgtgagaatggctgtgtggtgagtgtgaactttgttctgtgatcatagaaagggtattttaggctgcaggggagggcagggctggggaccgaaggggacaagttcccctttcatcctttggtgctgagttttctgtaacccttggttgccagagataaagtgaaaagtgctttaggtgagatgactaaattatgcctccaagaaaaaaaaattaaagtgcttttctgggtcatctgtggtgtatgttgacatggaccgctgcccctccatcctgcccttgcccgtggctttggtgtttcagatcctactcacgggaggcagctgccgcggaggtgtgggcagctgagaggggtgggcaggccagcacagctcctggcaggagacacaggtccaggagcccgtgagcatttgtgagagcagagatggcaagcacgtgcgtggagaccaacgaagcgtgtccctggcacacagcaagggagagtttcgctcggtctctgcagtgcagtctcctggcgtaagtcttgaagatggacccaactccctgaagaaatggatcttgaaattgaacacaaacatcatgaacgtacagcctgggcattctgcagtgatttgtgagatgagcttgcatcgactgttcctctcagcagtgacagccaaagtcacccctgataaaatgcagtttcactttataaaatgcctcgccccttcccagcatgtagagcttgtctgcagccctaaaggagccaggtcctgctctgatgagggtcaaatcagagccgacatcccatgtacaaaaaacccccaggcttctgccttccttccgggctcctgtctgctcccattttactccacggaatagttctgccctgtagcatctccagcggcctttgcagactgctgtcagccaacaggtgccaaaaatgcaaaagaagaagaaactaaaagcagtgctatttttgcagaacaaatgctagctattaaatcatcttaggccaagacaccaatggcacttggaccgataggtatttggagcatgagttaggaaggatatgtctttctccaggtgcgcagctgaaagttgctgagaaaagctgcctgtgttgctgtggtaacatgagaaggaatgaacagctctatacaaaaactggccacacattataaggcctattctatgcagttatgtttttggctatttgctcatttagtcattgtttatcaaccaaactaggtaagccaaggagttacaagacagctctagagaagctccctctgcttacaggacaataatgcattgtttgtttgttgatacaaatgaattatttgaatccacagaagtgaaaaagggaaaaaatcctggctgacttgtgggaagagcgtactgcagagcctagggcctgagttaactcgctggcggccctgcaggcaggcttgatgggagcgcccagcacatctgcccaccctgcacagggcatgaagcaccgtgtgcagagatctgtgggcaaaagcccaggacgtgaccttaggcaagaggggtccttggagaagtggaggtgtgcatggtgtgtagccttgcgtgtctgtgagcacgccctagtggacctgcgcctggattatcgggccagtctctcggaggggtccgtgatgctgagttacgccattcacctgaactctgcagctcatcggctgtaggatttgggtgagacacttttccttgctgactcatttccccatctgcaaaatgggggtgacgatatctacctcttggggtgtgtcaagggtaaaagagcacactttaagaatcctaaagcactaagccaaggatgaaagactagaaagctgcctctatgttgctactctcaaaaatgctcagaaattttcttgtcgtactaaaaatgtgttatttttctcattttcattcttccattcaacacagaagtaatctaagtaagttctaaaaacatagatccgggggcccacagacattcaattttcttctgaattggctctggtatcacacaacacacaagcaagcaaacagcctgcctgctagggccttgggttccaggctggaggaatgcaggcagaaatctcttaggaaataactaagtgagcgccaagttttgaattgccttagagccgaaagagaatgtggcgtgctggggagagatctggacctctttctcatcagtcatttgacctgtccacgaagaacaattttgttatgcagcctgggaacctggtttccttacaccctgcgcccttaatgacacagacaaccacgggtactcctggacggaagctcatcacgcctcctcaaataccttcacccatgttcaggtcacacggaggtcaccatctcctcagcacacaacaactgctttggttcccagggttattttttctacgagttgaaaacccacggagcctaagccatctttttgtcccctaaggagagccccatagactaagagctacacttcctgtctgtctttcccacctttccatctcattctagcttaaagcttatcacgctactgagagcctgttctgtagttcaaggtggcagagaaaaatacgaaccttgagtgaaatctggagagcagtgcagggtcatccccagacgtgacgggccatatcctaggcgactcctgcagcttatagaagcagggaatttaatggacttcttccaggaaagccagcccacggggactcttaaaaagacaccaaccatttggaagatgcagcttgaggtctgggggactggactgattctgccaccatatagtgaacacgattaatcgggaggaagaagtaaggcactctgtgagttagtctaccaccctattgactttgacagagagaaaaccaacttttttcatatgatcacacagtagtactggaatatctcgactgcaatatcctctaaacaaatgcatgcaaagctttgtaaaagcagctgatgattaaaaaaattttaaaacattagggtttttctaatatatccatatgtgggacagtgatttaaatgtcattaattgtccagccacaacttgtaacagtgatgtgaaagacacaaaaaaggccccactggagtggaggagtggtctggctggtccccaagcaaaacagaatgggcttcgcataggctttagaacttattcataaatattgaccaaagtgtgaagcaaggtatccagtgaagattctctagggtctctacttctgctcaagagatttaatccagctttctctaaagcagtggtccagacttgccacatactaggttaaagataaagtgagaaaaacaaatactttggtttgcacgtctcttgaggggccctaggctgtatggaggaatatttagaggaatatttgtgagctgccatttgtgtttaaaagaacatgaaagcaagacgggccctaacccgcctgtgtctgtagctgaccaggaggccactgcttccttcccccagagcttctaggagagccccccaaaatgcaactctccaaggtcctgtggagtagtcccctcataatgcctccaccacacctgtgtctcacgatgccttaactgacgtagctcctaagtgatgttcacagagaaggaaatacttaggcaagcccatgtgtaacatgctcacagatgtgctggctttgccaatgctttcggactccaccatgctttctgattcttctggtcctagtcacgccttggcacggggcagaagcggccgagctatgctgacaggtgctgctgagagccaacagccattcagccgagaaggcgtttctaggtgagggcatgagagctggcattccaggctgctgagtgcggcatctgcaggtgcaccacattgctccacggtgtgttcagaagagaccagcatcttgaatctcaggctctgggctcattctttgcctctgccaagggaccattcaggggcttcaagccagctgctgaaaatcccccttttctggatttttccccatctatataaggatatggtggctgtgtggacaagaaattggtttcatctcagaagggtgcttccctacaaagatcttcagaaatttaattgaaaacaattttttgaactttttttgtttggccaggatgaatgaagctgaagtcacatcctgaatgtgcatgccagacaaagggtaagcaagcagtctttacaaatgccaatccctctgcactccaaaaccggagcccgtaatgaaggcccaggttccagtcatcacaggatcccccaagccagcacagtgcctgatgcctccctaggcattagcacatcccagcactctaattcacatcctcagcatccctgcctcctgcatccagggcttaggttgagtgtttccagagtgtcaagtacatttaaacacaaaccaaatactccagggttttgacctgtcacaatggcttttgaaaacaacagacgtacaatttgagagaaggactcgatggacttcttaggctgaggactaaggacatgttgctgttcctcttggtccaggacattcaataccattcacagcattcatcaccaactgacatagtatcgatcacgacattcaactgtttgaaattactgctattttggtcaaaaactaagaaatcagaaattgcacctacatagtgtgtctcctcattggagtcccatctctctgagcacagggatgggctcctgagctcacagccctgccctgcccccccagcagggcctcaccctcatggccctcagtgaatagtgactacatgaagggggcacttactagaggcctgagtaatggaatttcaattagcttctgcttcccttttctaaaaaagaaccacctttcttaagaataattaggccaaaataaacttgagtaatttgtacagtcaatattttgaagtttcggagttaccagtgaaatagcaaagctgttctccaggaaaggacatccaggttcccacccaggccttccttcctcagctcctgcagcctcatcctagtttaatatgaaggttgtgaatgggttaaaaagcagttcttaagcacctacttagatcttttcagtatctggaaatagcacccagggctgtgttagtaaagcttttcactgggtaagagtcatacaatttttacatttaatttgtttttttaaaacaaggcagtcttgttttacatattggaatgactagatattttttgacatttctggcacctctggttctgctgaattttaagggaggtgagtggtatgtacacaaagttaagattgctgcataataattcctttgcatttccaaaataaattacacaaatgtcacttttccttttctattccatagtactagttttagccagatctttgccaaacattctaggacattcagaaaagtcatccatggaattttggaatgccattctctctgtatctttgcagatcatgaggaaggaaagttgatgaactagtacgggatggctcagacttgtaaagtgtctaagtcacaacgctgcagagccagcttccgggtagcaatggcatggcctcagctgtgccaaggctacaactggagcttccttactcgcatctgaggcaaacacagcaaggctggcccaggccgcccacagtcaacagatgttcacgggagatggatcagcccctcttttgcttgttctatcaaggaaagagatctaaccatgggcaagggtggaacacacccggttcaggtcagggaatgagttgctctaagtgaacagtgaattcttacttctcagcctgtatcaattgtacccagggttcatgattactgtgacccactaagggatgatctttgaggaaacagacctggagggaggtaatttaaggagggaaagcgagtgggttttacagactgctttgtggcgacattcaggaacagaccattcaatggatgacttttcagtacataaaagcaagcagtaatggccaggagagagcaaagatgccctaagaatgacatcagactgaccaaatgtgccttttcaaataagttatgagaacgaatgaattggaattagagcaaggtattggacagaaccatgctagtctttgagagaacgtgtggattgggtggatgtttggaccgaatgaatggtaactttttaatgtgaaacagagaactgatatatgggctgtcatgtcaccctagggtactgtcgctctgtcatgtgtagcaatctttccaaatttttgttggtgggctgaacaaagataaaactaataaagtatgtgtggataccactagacagcacagcttactggactggatgtaataaaactgactgaaacttt

SEQ ID NO: 102517 - DNA, 490 bp, Homo sapiens
  Payload ID: 5
  Gene Symbol: AGPAT4
  Gene Name: 1-acylglycerol-3-phosphate O-acyltransferase 4
  ENST ID: ENST00000437165
  CDS Start-End: 1-317
tttcagctgtatatgactgtacactcaatttcagaaataatgaaaatccaacactgctgggagtcctaaacggaaagaaataccatgcagatttgtatgttaggaggatcccactggaagacatccctgaagacgatgacgagtgctcggcctggctgcacaagctctaccaggagaagggctggggcgacaccgagttctctaagcagtatgtgtctgtgagcaggcctgggaggctggccctttgcccttccgagaagatcgctgagcagcaagtggaagtggtgcatggtttctccaagcagagtggtgaatagacatcaagggacaattcctttctgtatcagcctattttgctaggagcctagatctaaagctttacgtgccccaaatctgggtgcccgacccagtttgtcaaagtgggatttcattttaatgatcaaccttgcagtcagaagtgtggtgtatgtcaaaagacagttctgttgat

SEQ ID NO: 102518 - DNA, 875 bp, Homo sapiens
  Payload ID: 5
  Gene Symbol: AGPAT4
  Gene Name: 1-acylglycerol-3-phosphate O-acyltransferase 4
  ENST ID: ENST00000436279
  CDS Start-End: 24-425
ctgaataagagcgtccacgcatcatggacctcgcgggactgctgaagtctcagttcctgtgccacctggtcttctgctacgtctttattgcctcagggctaatcatcaacaccattcagctcttcactctcctcctctggcccattaacaagcagctcttccggaagatcaactgcagactgtcctattgcatctcaagccagctggtgatgctgctggagtggtggtcgggcacggaatgcaccatcttcacggacccgcgcgcctacctcaagtatgggaaggaaaatgccatcgtggttctcaaccacaagtttgaaattgactttctgtgtggctggagcctgtccgaacgctttgggctgttagggtttgacctcttgcacgtagcttgcatgcctttggaactgggtctcttcagttgacttttgtcgtcttcaacacactgcagcgtgtagcggttgagcctgtgtcacatagctgaatcagagtcatctgcggtactcagggctccaaggtcctggccaagaaagagctggcctatgtcccaattatcggctggatgtggtacttcaccgagatggtcttctgttcgcgcaagtgggagcaggatcgcaagacggttgccaccagtttgcagcacctccgggactaccccgagaagtattttttcctgattcactgtgagggcacacggttcacggagaagaagcatgagatcagcatgcaggtggcccgggccaaggggctgcctcgcctcaagcatcacctgttgccacgaaccaagggcttcgccatcaccgtgaggagcttgagaaatgtagaaataatgaaaatccaacactgctgggagtcctaaacggaaagaaatacca

SEQ ID NO: 102519 - DNA, 3685 bp, Homo sapiens
  Payload ID: 6
  Gene Symbol: AGPAT5
  Gene Name: 1-acylglycerol-3-phosphate O-acyltransferase 5
  Uniprot ID: Q9NUQ2
  ENST ID: ENST00000285518
  CDS Start-End: 313-1407
cggagccccctgccccggcagggggatgtggcgatgggtgagggtcatggggtgtgagcatccctgagccatcgatccgggagggccgcgggttcccttgctttgccgccgggagcggcgcacgcagccccgcactcgcctacccggccccgggcggcggcgcggcccatgcggctgggggcggaggctgggagcgggtggcgggcgcggcggcccgggcccgggcggtgattggccgcctgctggccgcgactgaggcccgggaggcgggcggggagcgcaggcggagctcgctgccgccgagctgagaagatgctgctgtccctggtgctccacacgtactccatgcgctacctgctgcccagcgtcgtgctcctgggcacggcgcccacctacgtgttggcctggggggtctggcggctgctctccgccttcctgcccgcccgcttctaccaagcgctggacgaccggctctactgcgtctaccagagcatggtgctcttcttcttcgagaattacaccggggtccagatattgctatatggagatttgccaaaaaataaagaaaatataatatatttagcaaatcatcaaagcacagttgactggattgttgctgacatcttggccatcaggcagaatgcgctaggacatgtgcgctacgtgctgaaagaagggttaaaatggctgccattgtatgggtgttactttgctcagcatggaggaatctatgtaaagcgcagtgccaaatttaacgagaaagagatgcgaaacaagttgcagagctacgtggacgcaggaactccaatgtatcttgtgatttttccagaaggtacaaggtataatccagagcaaacaaaagtcctttcagctagtcaggcatttgctgcccaacgtggccttgcagtattaaaacatgtgctaacaccacgaataaaggcaactcacgttgcttttgattgcatgaagaattatttagatgcaatttatgatgttacggtggtttatgaagggaaagacgatggagggcagcgaagagagtcaccgaccatgacggaatttctctgcaaagaatgtccaaaaattcatattcacattgatcgtatcgacaaaaaagatgtcccagaagaacaagaacatatgagaagatggctgcatgaacgtttcgaaatcaaagataagatgcttatagaattttatgagtcaccagatccagaaagaagaaaaagatttcctgggaaaagtgttaattccaaattaagtatcaagaagactttaccatcaatgttgatcttaagtggtttgactgcaggcatgcttatgaccgatgctggaaggaagctgtatgtgaacacctggatatatggaaccctacttggctgcctgtgggttactattaaagcatagacaagtagctgtctccagacagtgggatgtgctacattgtctatttttggcggctgcacatgacatcaaattgtttcctgaatttattaaggagtgtaaataaagccttgttgattgaagattggataatagaatttgtgacgaaagctgatatgcaatggtcttgggcaaacatacctggttgtacaactttagcatcggggctgctggaagggtaaaagctaaatggagtttctcctgctctgtccatttcctatgaactaatgacaacttgagaaggctgggaggattgtgtattttgcaagtcagatggctgcatttttgagcattaatttgcagcgtatttcactttttctgttattttcaatttattacaacttgacagctccaagctcttattactaaagtatttagtatcttgcagctagttaatatttcatcttttgcttatttctacaagtcagtgaaataaattgtatttaggaagtgtcaggatgttcaaaggaaagggtaaaaagtgttcatggggaaaaagctctgtttagcacatgattttattgtattgcgttattagctgattttactcattttatatttgcaaaataaatttctaatatttattgaaattgcttaatttgcacaccctgtacacacagaaaatggtataaaatatgagaacgaagtttaaaattgtgactctgattcattatagcagaactttaaatttcccagctttttgaagatttaagctacactattagtacttccctttgtctgtgccataagtgcttgaaaacgttaaggttttctgttttgttttgtttttttaatatcaaaagagtcggtgtgaaccttggttggaccccaagttcacaagatttttaaggtgatgagagcctgcagacattctgcctagatttactagcgtgtgccttttgcctgcttctctttgatttcacagaatattcattcagaagtcgcgtttctgtagtgtggtggattcccactgggctctggtccttcccttggatcccgtcagtggtgctgctcagcggcttgcacgcagacttgctaggaagaaatgcagagccagcctgtgctgcccactttcagagttgaactctttaagcccttgtgagtgggcttcaccagctactgcagaggcattttgcatttgtctgtgtcaagaagttcaccttctcaagccagtgaaatacagacttaatttgtcatgactgaacgaatttgtttatttcccattaggtttagtggagctacacattaatatgtatcgccttagagcaagagctgtgttccaggaaccagatcacgatttttagccatggaacaatatatcccatgggagaagacctttcagtgtgaactgttctatttttgtgttataatttaaacttcgatttcctcatagtcctttaagttgacatttctgcttactgctactggatttttgctgcagaaatatatcagtggcccacattaaacataccagttggatcatgataagcaaaatgaaagaaataatgattaagggaaaattaagtgactgtgttacactgcttctcccatgccagagaataaactctttcaagcatcatctttgaagagtcgtgtggtgtgaattggtttgtgtacattagaatgtatgcacacatccatggacactcaggatatagttggcctaataatcggggcatgggtaaaacttatgaaaatttcctcatgctgaattgtaattttctcttacctgtaaagtaaaatttagatcaattccatgtctttgttaagtacagggatttaatatattttgaatataatgggtatgttctaaatttgaactttgagaggcaatactgttggaattatgtggattctaactcattttaacaaggtagcctgacctgcataagatcacttgaatgttaggtttcatagaactatactaatcttctcacaaaaggtctataaaatacagtcgttgaaaaaaattttgtatcaaaatgtttggaaaattagaagcttctccttaacctgtattgatactgacttgaattattttctaaaattaagagccgtatacctacctgtaagtcttttcacatatcatttaaacttttgtttgtattattactgatttacagcttagttattaatttttctttataagaatgccgtcgatgtgcatgcttttatgtttttcagaaaagggtgtgtttggatgaaagtaaaaaaaaaaataaaatctttcactgtctctaat

SEQ ID NO: 102520 - DNA, 468 bp, Homo sapiens
  Payload ID: 6
  Gene Symbol: AGPAT5
  Gene Name: 1-acylglycerol-3-phosphate O-acyltransferase 5
  ENST ID: ENST00000523586
  CDS Start-End: 1-214
cttcttcgagaattacaccggggtccaggtgagccgcctcccgctcccgggtctcggcgtccacccgagctcccgggggcgcggacctctccgctcccccacagctggcgagggtcacccggccggcccggcggacccagcacggagagcacgtgccgcctccccgccttcctctccgcatgcttcctgccgttctgccgagatcgctctctaggaagctgtggctgcgtcgtcctgaggctacgagtgggacccgccgcccctttccccgcccctcgcctgggtctgatgctgcttagcaaaagattggattcgtagattaaacttgagaaacaaaccataaaagtggaaggccctctttaacaatattgctatatggagatttgccaaaaaataaagaaaatataatatatttagcaaatcatcaaagcacagttgactggattgttgctgacatcttggccatca

SEQ ID NO: 102521 - DNA, 2525 bp, Homo sapiens
  Payload ID: 6
  Gene Symbol: AGPAT5
  Gene Name: 1-acylglycerol-3-phosphate O-acyltransferase 5
  ENST ID: ENST00000523234
  CDS Start-End: 4-270
aagatgctgctgtccctggtgctccacacgtactccatgcgctacctgctgcccagcgtcgtgctcctgggcacggcgcccacctacgtgttggcctggggggtctggcggctgctctccgccttcctgcccgcccgcttctaccaagcgctggacgaccggctctactgcgtctaccagagcatggtgctcttcttcttcgagaattacaccggggtccagttgactggattgttgctgacatcttggccatcaggcagaatgcgctaggacatgtgcgctacgtgctgaaagaagggttaaaatggctgccattgtatgggtgttactttgctcagcatggaggaatctatgtaaagcgcagtgccaaatttaacgagaaagagatgcgaaacaagttgcagagctacgtggacgcaggaactccaatgtatcttgtgatttttccagaaggtacaaggtataatccagagcaaacaaaagtcctttcagctagtcaggcatttgctgcccaacgtggccttgcagtattaaaacatgtgctaacaccacgaataaaggcaactcacgttgcttttgattgcatgaagaattatttagatgcaatttatgatgttacggtggtttatgaagggaaagacgatggagggcagcgaagagagtcaccgaccatgacggaatttctctgcaaagaatgtccaaaaattcatattcacattgatcgtatcgacaaaaaagatgtcccagaagaacaagaacatatgagaagatggctgcatgaacgtttcgaaatcaaagataagatgcttatagaattttatgagtcaccagatccagaaagaagaaaaagatttcctgggaaaagtgttaattccaaattaagtatcaagaagactttaccatcaatgttgatcttaagtggtttgactgcaggcatgcttatgaccgatgctggaaggaagctgtatgtgaacacctggatatatggaaccctacttggctgcctgtgggttactattaaagcatagacaagtagctgtctccagacagtgggatgtgctacattgtctatttttggcggctgcacatgacatcaaattgtttcctgaatttattaaggagtgtaaataaagccttgttgattgaagattggataatagaatttgtgacgaaagctgatatgcaatggtcttgggcaaacatacctggttgtacaactttagcatcggggctgctggaagggtaaaagctaaatggagtttctcctgctctgtccatttcctatgaactaatgacaacttgagaaggctgggaggattgtgtattttgcaagtcagatggctgcatttttgagcattaatttgcagcgtatttcactttttctgttattttcaatttattacaacttgacagctccaagctcttattactaaagtatttagtatcttgcagctagttaatatttcatcttttgcttatttctacaagtcagtgaaataaattgtatttaggaagtgtcaggatgttcaaaggaaagggtaaaaagtgttcatggggaaaaagctctgtttagcacatgattttattgtattgcgttattagctgattttactcattttatatttgcaaaataaatttctaatatttattgaaattgcttaatttgcacaccctgtacacacagaaaatggtataaaatatgagaacgaagtttaaaattgtgactctgattcattatagcagaactttaaatttcccagctttttgaagatttaagctacactattagtacttccctttgtctgtgccataagtgcttgaaaacgttaaggttttctgttttgttttgtttttttaatatcaaaagagtcggtgtgaaccttggttggaccccaagttcacaagatttttaaggtgatgagagcctgcagacattctgcctagatttactagcgtgtgccttttgcctgcttctctttgatttcacagaatattcattcagaagtcgcgtttctgtagtgtggtggattcccactgggctctggtccttcccttggatcccgtcagtggtgctgctcagcggcttgcacgcagacttgctaggaagaaatgcagagccagcctgtgctgcccactttcagagttgaactctttaagcccttgtgagtgggcttcaccagctactgcagaggcattttgcatttgtctgtgtcaagaagttcaccttctcaagccagtgaaatacagacttaatttgtcatgactgaacgaatttgtttatttcccattaggtttagtggagctacacattaatatgtatcgccttagagcaagagctgtgttccaggaaccagatcacgatttttagccatggaacaatatatcccatgggagaagacctttcagtgtgaactgttctatttttgtgttataatttaaacttcgatttcctcatagtcctttaagttgacatttctgcttactgctactggatttttgctgcagaaatatatcagtggcccaca

SEQ ID NO: 102522 - DNA, 852 bp, Homo sapiens
  Payload ID: 6
  Gene Symbol: AGPAT5
  Gene Name: 1-acylglycerol-3-phosphate O-acyltransferase 5
  ENST ID: ENST00000518327
  CDS Start-End: 1-545
acgtactccatgcgctacctgctgcccagcgtcgtgctcctgggcacggcgcccacctacgtgttggcctggggggtctggcggctgctctccgccttcctgcccgcccgcttctaccaagcgctggacgaccggctctactgcgtctaccagagcatggtgctcttcttcttcgagaattacaccggggtccagaatttctctgcaaagaatgtccaaaaattcatattcacattgatcgtatcgacaaaaaagatgtcccagaagaacaagaacatatgagaagatggctgcatgaacgtttcgaaatcaaagataagatgcttatagaattttatgagtcaccagatccagaaagaagaaaaagatttcctgggaaaagtgttaattccaaattaagtatcaagaagactttaccatcaatgttgatcttaagtggtttgactgcaggcatgcttatgaccgatgctggaaggaagctgtatgtgaacacctggatatatggaaccctacttggctgcctgtgggttactattaaagcatagacaagtagctgtctccagacagtgggatgtgctacattgtctatttttggcggctgcacatgacatcaaattgtttcctgaatttattaaggagtgtaaataaagccttgttgattgaagattggataatagaatttgtgacgaaagctgatatgcaatggtcttgggcaaacatacctggttgtacaactttagcatcggggctgctggaagggtaaaagctaaatggagtttctcctgctctgtccatttcctatgaactaatgacaacttgagaaggctgggaggattgtgtattttgcaagtc

SEQ ID NO: 102523 - DNA, 2362 bp, Homo sapiens
  Payload ID: 7
  Gene Symbol: ACCS
  Gene Name: 1-aminocyclopropane-1-carboxylate synthase homolog (Arabidopsis)(non-functional)
  Uniprot ID: Q96QU6
  ENST ID: ENST00000263776
  CDS Start-End: 435-1940
ctacacgtgatgggcgcccaccgagtgccagcaccgcctcctccagctccgccaagtaggtgggatccactactttgcagaggaggaagccgttcaggcctccctctgtgcactttgcaaaagcctctgcccttccatctcgaatcccttggcgccgatcacacttcctctgcctggaaacctggagccgtctctcgcgagacgtcctccgccctgtagaaggccgtttcggttcttcgtgcgcggtagccgccccacttgcgggattccaaggcctcatcgagtgcgggtatctggctgtggattcgccgccgtcctgctggacgcctggaggctcgaaccccgccgcccccctaccccaggctttactcccaccccggcttccgcccactgtgctgcccttcctcggacctgggctgtcgggagagctggagatgttcacccttcctcaaaaggacttcagggctcccaccacctgtctgggccccacctgcatgcaggacctgggcagtagccatggggaagatctggaaggagaatgctccagaaaactggaccagaagctgccagagctccgtggagtgggtgatcctgccatgatctcctctgatacctcctacctgtcctctagaggaagaatgattaaatggttctgggattcagctgaggagggctacaggacctaccacatggatgagtatgatgaggacaagaaccccagtggcatcattaacttgggcaccagtgagaacaaactctgctttgacctgctgtcctggcggctgagtcagcgcgacatgcagagggtggagccatccctgctgcagtatgctgactggaggggacatctgttcctccgggaggaagtggccaagttcctgtctttctactgcaagagcccagtacccctcagaccagagaatgtggttgtcctgaatggtggtgcctcgctcttctctgctctggccacggtgctgtgtgaggccggggaggctttcctgatccccaccccttactatggcgctatcacacagcacgtgtgtctctatggcaacatccggctggcctatgtctacctggacagtgaggtcactgggctagacacacgccccttccagctcacagtggagaagctggagatggccctgagagaagctcactctgagggtgtgaaggtcaaaggcctcatcctcatcagcccccagaaccctctgggtgatgtatactcccctgaagagctacaggagtacctggtatttgccaagaggcacaggctgcatgtgattgtggatgaggtctacatgctgtccgtgtttgagaagtctgttgggtaccgcagtgtcctaagcctggaaaggctccctgacccccagaggacccatgtgatgtgggcaaccagcaaggacttcgggatgtctgggctccgctttggcacgctgtacacagaaaaccaggatgtggccactgccgtggcttccctctgccgctaccacggcctcagtggcttggtccagtaccagatggcacagctgctccgggaccgtgactggatcaaccaggtgtacctgccggaaaaccatgcccggctcaaggctgcccacacctatgtctcagaagagcttagggcattggggatccccttcttgagtcgtggggctggcttcttcatctgggttgacttgagaaagtacctgcccaagggcacctttgaggaggaaatgctgctctggcgccgctttttggacaacaaggtgctgctgtcctttggcaaggccttcgagtgtaaagagcctggttggtttcgctttgtcttctcagaccaggtccaccggctttgcctggggatgcagagggtccagcaggtgcttgcaggcaaatcccaagtggcagaagacccccgtccctctcagagccaggagccaagtgaccaacgcaggtgagctggtcattgtctcgtggccagagggcccagcagccactgtggacctggggcgttctggggctgcagaagactgactgtggatgtgccatttgccaggaaggtatctaacttggctttgtgcctgaagaactgtttcttgtctttcgctgtagcagtgggaaactccttaagctgtggttcagcctgggccctccctctctcctattaaacaaaactaggagagtccatatgtctccattgtgagttatttagaatggaggagtcgtgactgcttctaaccagagcctcagcccccctgaggatgtgaaaagaaaacaaacaacttgtaccttctttctgatatcaccgtcattcctctttctttgtcaccaaggaaacgagtcaaaggaacagcacatacaggagagtttgtagaaaaat

SEQ ID NO: 102524 - DNA, 563 bp, Homo sapiens
  Payload ID: 7
  Gene Symbol: ACCS
  Gene Name: 1-aminocyclopropane-1-carboxylate synthase homolog (Arabidopsis)(non-functional)
  ENST ID: ENST00000524990
  CDS Start-End: 145-563
agtctcctagtccgggcgcgctgagcgcaggggggcgctgtcctcacccacgcgtaagtcgccgcagggcgtttccgggcggagaaaacctacacgtgatgggcgcccaccgagtgccagcaccgcctcctccagctccgccaaatgttcacccttcctcaaaaggacttcagggctcccaccacctgtctgggccccacctgcatgcaggacctgggcagtagccatggggaagatctggaaggagaatgctccagaaaactggaccagaagctgccagagctccgtggagtgggtgatcctgccatgatctcctctgatacctcctacctgtcctctagaggaagaatgattaaatggttctgggattcagctgaggagggctacaggacctaccacatggatgagtatgatgaggacaagaaccccagtggcatcattaacttgggcaccagtgagaacaaactctgctttgacctgctgtcctggcggctgagtcagcgcgacatgcagagggtggagccatccctgctgcagtatgctgactggaggggacatctgtt

SEQ ID NO: 102525 - DNA, 400 bp, Homo sapiens
  Payload ID: 7
  Gene Symbol: ACCS
  Gene Name: 1-aminocyclopropane-1-carboxylate synthase homolog (Arabidopsis)(non-functional)
  ENST ID: ENST00000533404
  CDS Start-End: 169-400
ctgcacttgtggaggttcccattcctcccttccctcagttcctacccgccatctgcctcagaacaccacataatctcatcctaccctttacaccacaagacccccaggactcccaggcaatactctgctttaactcaggaaattttaacctggcatttggtaattgagatgttcacccttcctcaaaaggacttcagggctcccaccacctgtctgggccccacctgcatgcaggacctgggcagtagccatggggaagatctggaaggagaatgctccagaaaactggaccagaagctgccagagctccgtggagtgggtgatcctgccatgatctcctctgatacctcctacctgtcctctagaggaagaatgattaaatggttctgggattcagctg

SEQ ID NO: 102526 - DNA, 1820 bp, Homo sapiens
  Payload ID: 8
  Gene Symbol: ACCSL
  Gene Name: 1-aminocyclopropane-1-carboxylate synthase homolog (Arabidopsis)(non-functional)-like
  Uniprot ID: Q4AC99
  ENST ID: ENST00000378832
  CDS Start-End: 57-1763
tctctttctccataggtgccaggcagccttcagaggccagtaaagatacccggagtatgagtcatcggtcagacacccttcctgtgccctctggtcagaggagaggccgggtccccagagaccacagcatctatacccagctgttggagataacgctgcacttgcagcaggccatgacggagcacttcgtgcagctgacgagcagacagggcctgtcgctggaggaaaggaggcacactgaggccatctgtgagcatgaagcccttctgagtcgcttaatatgccggatgatcaacctcctacagtctggggccgcgagtggcctggagctccaagtgcctcttccttctgaggactctaggggtgatgtcagatatgggcagagggcccaactctctgggcagcctgatccagttccccaactgagtgattgtgaagctgcctttgtcaaccgcgacctatccatccgtgggattgacatctctgtcttttatcagtcgagcttccaggactacaatgcctaccaaaaagataaatatcataaggacaagaacaccttgggtttcattaaccttggcaccagtgagaacaagctctgcatggatctgatgactgaaagattgcaagaaagtgacatgaactgcattgaggacaccttgcttcagtaccctgattggagagggcagccattcctgcgggaagaagtggcccggttcctgacctactactgcagggcacctacccgacttgacccagaaaatgtggtggttctaaatggctgctgctctgtcttctgtgccctggccatggttctgtgtgatccaggcgaggccttcctggtccctgctcccttctatggtggctttgcctttagctcccgcctgtatgcaaaggttgagttgattcctgtccacctggagagtgaggtcactgttacaaacacccatcctttccagctcactgtggacaagttagaggaagccctgcttgaagctaggcttgaggggaaaaaggtccgaggccttgtgctaatcaaccctcagaatcctctgggtgacatctactccccagactcactgatgaaatacctggaatttgccaagaggtataacctacatgtgatcatagatgagatttacatgctgtctgtgtttgatgaatccatcacattccacagcattctgagcatgaaaagtttgcctgatagcaacaggacccatgtgatctggggtaccagtaaggattttggcatctctggcttccgctttggtgctctgtatacccacaacaaggaggtggcctctgctgtgagtgcctttggctacctccacagtatttctggcatcacccagcacaagctgtgtcaactgctccagaacacagaatggattgacaaagtatacctacccaccaattgctaccggctccgggaagctcacaagtacatcactgctgagctgaaggcattggagatcccttttcacaaccgcagctctggcctctatgtctggatcaacttgaaaaagtacctggatccctgtacatttgaagaagaacggctcctctattgccgcttcctggacaacaagctattgttatcccgtggcaaaacctacatgtgtaaggagccaggctggttctgcctcatctttgcagatgagctcccccggctaaaattggctatgcgtcggttctgtgatgtgctgcaggagcagaaggaggctttgatagtgaagcagttggaggatgcaatgagggagtaggccgtctgcctcccaaccagcagttccagcccatcacttgctcagggaccccctaat

SEQ ID NO: 102527 - DNA, 1806 bp, Homo sapiens
  Payload ID: 8
  Gene Symbol: ACCSL
  Gene Name: 1-aminocyclopropane-1-carboxylate synthase homolog (Arabidopsis)(non-functional)-like
  ENST ID: ENST00000527145
  CDS Start-End: 23-550
ggccagtaaagatacccggagtatgagtcatcggtcagacacccttcctgtgccctctggtcagaggagaggccgggtccccagagaccacagcatctatacccagctgttggagataacgctgcacttgcagcaggccatgacggagcacttcgtgcagctgacgagcagacagggcctgtcgctggaggaaaggaggcacactgaggccatctgtgagcatgaagcccttctgagtcgcttaatatgccggatgatcaacctcctacagtctggggccgcgagtggcctggagctccaagtgcctcttccttctgaggactctaggggtgatgtcagatatgggcagagggcccaactctctgggcagcctgatccagttccccaactgagtgattgtgaagctgcctttgtcaaccgcgacctatccatccgtgggattgacatctctgtcttttatcagtcgagcttccaggactacaatgcctaccaaaaagataaatatcataaggacaagaacaccttgggtggagcaagaggactgacctgatcttggattccttccatctccagggtttcattaaccttggcaccagtgagaacaagctctgcatggatctgatgactgaaagattgcaagaaagtgacatgaactgcattgaggacaccttgcttcagtaccctgattggagagggcagccattcctgcgggaagaagtggcccggttcctgacctactactgcagggcacctacccgacttgacccagaaaatgtggtggttctaaatggctgctgctctgtcttctgtgccctggccatggttctgtgtgatccaggcgaggccttcctggtccctgctcccttctatggtggctttgcctttagctcccgcctgtatgcaaaggttgagttgattcctgtccacctggagagtgaggtcactgttacaaacacccatcctttccagctcactgtggacaagttagaggaagccctgcttgaagctaggcttgaggggaaaaaggtccgaggccttgtgctaatcaaccctcagaatcctctgggtgacatctactccccagactcactgatgaaatacctggaatttgccaagaggtataacctacatgtgatcatagatgagatttacatgctgtctgtgtttgatgaatccatcacattccacagcattctgagcatgaaaagtttgcctgatagcaacaggacccatgtgatctggggtaccagtaaggattttggcatctctggcttccgctttggtgctctgtatacccacaacaaggaggtggcctctgctgtgagtgcctttggctacctccacagtatttctggcatcacccagcacaagctgtgtcaactgctccagaacacagaatggattgacaaagtatacctacccaccaattgctaccggctccgggaagctcacaagtacatcactgctgagctgaaggcattggagatcccttttcacaaccgcagctctggcctctatgtctggatcaacttgaaaaagtacctggatccctgtacatttgaagaagaacggctcctctattgccgcttcctggacaacaagctattgttatcccgtggcaaaacctacatgtgtaaggagccaggctggttctgcctcatctttgcagatgagctcccccggctaaaattggctatgcgtcggttctgtgatgtgctgcaggagcagaaggaggctttgatagtgaagcagttggaggatgcaatgagggagtaggccgtctgcctcccaaccagcagttccagc

SEQ ID NO: 102528 - DNA, 1753 bp, Homo sapiens
  Payload ID: 9
  Gene Symbol: BPGM
  Gene Name: 2,3-bisphosphoglycerate mutase
  Uniprot ID: P07738
  ENST ID: ENST00000344924
  CDS Start-End: 192-971
cgtctggttcaggggctagaaaagagcgtcgatgccggcggcagtgatgagtcctaggaggcgctggctctttggcggctcggaggagcggctgctgctgctgctgctgctgctggtggcccctttgcagatgtattgctgtccttgaatattagcccatttgaaaacgcctgggaagttcagccatcagtatgtccaagtacaaacttattatgttaagacatggagagggtgcttggaataaggagaaccgtttttgtagctgggtggatcagaaactcaacagcgaaggaatggaggaagctcggaactgtgggaagcaactcaaagcgttaaactttgagtttgatcttgtattcacatctgtccttaatcggtccattcacacagcctggctgatcctggaagagctaggccaggaatgggtgcctgtggaaagctcctggcgtctaaatgagcgtcactatggggccttgatcggtctcaacagggagcagatggctttgaatcatggtgaagaacaagtgaggctctggagaagaagctacaatgtaaccccgcctcccattgaggagtctcatccttactaccaagaaatctacaacgaccggaggtataaagtatgcgatgtgcccttggatcaactgccacggtcggaaagcttaaaggatgttctggagagactccttccctattggaatgaaaggattgctcccgaagtattacgtggcaaaaccattctgatatctgctcatggaaatagcagtagggcactcctaaaacacctggaaggtatctcagatgaagacatcatcaacattactcttcctactggagtccccattcttctggaattggatgaaaacctgcgtgctgttgggcctcatcagttcctgggtgaccaagaggcgatccaagcagccattaagaaagtagaagatcaaggaaaagtgaaacaagctaaaaaatagtctttctcaactgttggctaagaagaaatgcaaaagaagtggcataggagtgtgttatgggtgctgaactctctctctttttccccgattttccagagctaggctgtggagtagagtttgtataggtaactaggtaacttattgtggcccagataaggctttaggatgcctcagtgcttatgtcatagccttatgagttagctttcttgctagccccctagtcggtcaccaaactagtaactagtggggcttaatgaaggtcataagtttctgagatgggagagcaacaagtagagatgaagttaaaggtatttatcattcaagaaatcattattgagtcaccattgacaggcactattctaatcagtagttcactttaatatttaataagattttctgggataacagtaagggatattagataatataccgtatgtatttattactagtcttttcctctaggaaaagggatactttgataattaaggccagaggcccattagttgagaaagtcacagatatatttctccaagaaagccaacaaccaccaccacaatgacagaaatgacaacaaggccctttaacttgtcttctagtttagagacatccttcatttgacatttagtagaattcctctttggccacaagaataagcagcaaataaacaactatggctgttgaggttctcattttggtttgttttaattttttgaactttgggtacctgtaattagtttaaaaataaagttcctgataataaagtgactgaaaatggcatcccc

SEQ ID NO: 102529 - DNA, 2051 bp, Homo sapiens
  Payload ID: 9
  Gene Symbol: BPGM
  Gene Name: 2,3-bisphosphoglycerate mutase
  Uniprot ID: P07738
  ENST ID: ENST00000393132
  CDS Start-End: 490-1269
gagcgtcgatgccggcggcagtgatgagtcctaggaggcgctggctctttggcggctcggaggagcggctgctgctgctgctgctgctgctggtggcccctttgcagaaaagttctaagaacagtgctgttggctcagtgagatgaggttatcggaaaactttctgtttacacaagagttgcctccttcaaagaagcatgcatggtccttgcaggtcactgtgcccatcactctgcatagtccagctgcactctgcttcacacagctgcctgcccattgcaggcatttgagtttgcaatccatgccttaaactttaaatcacactggctacagcgttgtgtgtttcttggtaaacactgggtaaatcagctcctgtggatgttgactgaagtttctatgtttgcaagctaatcctcagcagtttctttatgtattgctgtccttgaatattagcccatttgaaaacgcctgggaagttcagccatcagtatgtccaagtacaaacttattatgttaagacatggagagggtgcttggaataaggagaaccgtttttgtagctgggtggatcagaaactcaacagcgaaggaatggaggaagctcggaactgtgggaagcaactcaaagcgttaaactttgagtttgatcttgtattcacatctgtccttaatcggtccattcacacagcctggctgatcctggaagagctaggccaggaatgggtgcctgtggaaagctcctggcgtctaaatgagcgtcactatggggccttgatcggtctcaacagggagcagatggctttgaatcatggtgaagaacaagtgaggctctggagaagaagctacaatgtaaccccgcctcccattgaggagtctcatccttactaccaagaaatctacaacgaccggaggtataaagtatgcgatgtgcccttggatcaactgccacggtcggaaagcttaaaggatgttctggagagactccttccctattggaatgaaaggattgctcccgaagtattacgtggcaaaaccattctgatatctgctcatggaaatagcagtagggcactcctaaaacacctggaaggtatctcagatgaagacatcatcaacattactcttcctactggagtccccattcttctggaattggatgaaaacctgcgtgctgttgggcctcatcagttcctgggtgaccaagaggcgatccaagcagccattaagaaagtagaagatcaaggaaaagtgaaacaagctaaaaaatagtctttctcaactgttggctaagaagaaatgcaaaagaagtggcataggagtgtgttatgggtgctgaactctctctctttttccccgattttccagagctaggctgtggagtagagtttgtataggtaactaggtaacttattgtggcccagataaggctttaggatgcctcagtgcttatgtcatagccttatgagttagctttcttgctagccccctagtcggtcaccaaactagtaactagtggggcttaatgaaggtcataagtttctgagatgggagagcaacaagtagagatgaagttaaaggtatttatcattcaagaaatcattattgagtcaccattgacaggcactattctaatcagtagttcactttaatatttaataagattttctgggataacagtaagggatattagataatataccgtatgtatttattactagtcttttcctctaggaaaagggatactttgataattaaggccagaggcccattagttgagaaagtcacagatatatttctccaagaaagccaacaaccaccaccacaatgacagaaatgacaacaaggccctttaacttgtcttctagtttagagacatccttcatttgacatttagtagaattcctctttggccacaagaataagcagcaaataaacaactatggctgttgaggttctcattttggtttgttttaattttttgaactttgggtacctgtaattagtttaaaaataaagttcctgataataaagtgactgaaaatggcatcccc

SEQ ID NO: 102530 - DNA, 1870 bp, Homo sapiens
  Payload ID: 9
  Gene Symbol: BPGM
  Gene Name: 2,3-bisphosphoglycerate mutase
  Uniprot ID: P07738
  ENST ID: ENST00000418040
  CDS Start-End: 314-1093
ctggttcaggggctagaaaagagcgtcgatgccggcggcagtgatgagtcctaggaggcgctggctctttggcggctcggaggagcggctgctgctgctgctgctgctgctggtggcccctttgcagaatgagcctcgcaggcagtcaccgttctgtcaactgagaggaggagcccgctttggtagtgctgtccttatggcaagaatatatagaagttggagggaagataaactctcttctggatgtctgagatgtattgctgtccttgaatattagcccatttgaaaacgcctgggaagttcagccatcagtatgtccaagtacaaacttattatgttaagacatggagagggtgcttggaataaggagaaccgtttttgtagctgggtggatcagaaactcaacagcgaaggaatggaggaagctcggaactgtgggaagcaactcaaagcgttaaactttgagtttgatcttgtattcacatctgtccttaatcggtccattcacacagcctggctgatcctggaagagctaggccaggaatgggtgcctgtggaaagctcctggcgtctaaatgagcgtcactatggggccttgatcggtctcaacagggagcagatggctttgaatcatggtgaagaacaagtgaggctctggagaagaagctacaatgtaaccccgcctcccattgaggagtctcatccttactaccaagaaatctacaacgaccggaggtataaagtatgcgatgtgcccttggatcaactgccacggtcggaaagcttaaaggatgttctggagagactccttccctattggaatgaaaggattgctcccgaagtattacgtggcaaaaccattctgatatctgctcatggaaatagcagtagggcactcctaaaacacctggaaggtatctcagatgaagacatcatcaacattactcttcctactggagtccccattcttctggaattggatgaaaacctgcgtgctgttgggcctcatcagttcctgggtgaccaagaggcgatccaagcagccattaagaaagtagaagatcaaggaaaagtgaaacaagctaaaaaatagtctttctcaactgttggctaagaagaaatgcaaaagaagtggcataggagtgtgttatgggtgctgaactctctctctttttccccgattttccagagctaggctgtggagtagagtttgtataggtaactaggtaacttattgtggcccagataaggctttaggatgcctcagtgcttatgtcatagccttatgagttagctttcttgctagccccctagtcggtcaccaaactagtaactagtggggcttaatgaaggtcataagtttctgagatgggagagcaacaagtagagatgaagttaaaggtatttatcattcaagaaatcattattgagtcaccattgacaggcactattctaatcagtagttcactttaatatttaataagattttctgggataacagtaagggatattagataatataccgtatgtatttattactagtcttttcctctaggaaaagggatactttgataattaaggccagaggcccattagttgagaaagtcacagatatatttctccaagaaagccaacaaccaccaccacaatgacagaaatgacaacaaggccctttaacttgtcttctagtttagagacatccttcatttgacatttagtagaattcctctttggccacaagaataagcagcaaataaacaactatggctgttgaggttctcattttggtttgttttaattttttgaactttgggtacctgtaattagtttaaaaataaagttcctgataataaagtgactgaaaatggca

SEQ ID NO: 102531 - DNA, 635 bp, Homo sapiens
  Payload ID: 9
  Gene Symbol: BPGM
  Gene Name: 2,3-bisphosphoglycerate mutase
  ENST ID: ENST00000443095
  CDS Start-End: 402-635
acaaggagagagagaggcgggctgagcagccatgtcagcagattctccgaggatggagtgggcccagcagatcttcaggccagcagcttaaatgtaaggagttcagcatagcttgagagttgctggtctccctttactagattctccccctgctaagacgtagctggtgtgtgtaggatatctggagggctggggaggaggaggtggggcctctttatcagtgtggttcctctcactcctgcctaccagatctgtttgtacaggcagcatccctcagctgcttgcatttgatagcttattttgcatctggatttattcctgctgaaaactctatcttgagatgtattgctgtccttgaatattagcccatttgaaaacgcctgggaagttcagccatcagtatgtccaagtacaaacttattatgttaagacatggagagggtgcttggaataaggagaaccgtttttgtagctgggtggatcagaaactcaacagcgaaggaatggaggaagctcggaactgtgggaagcaactcaaagcgttaaactttgagtttgatcttgtattcacatctgtccttaatcggtccattcacacagcctggctgatcctggaagagctaggccaggaatgg

SEQ ID NO: 102532 - DNA, 2583 bp, Homo sapiens
  Payload ID: 10
  Gene Symbol: CNP
  Gene Name: 2',3'-cyclic nucleotide 3' phosphodiesterase
  Uniprot ID: P09543
  ENST ID: ENST00000393888
  CDS Start-End: 126-1331
ctccgcgcaggcgggcggccccggagcgctggtgccggcagaggcggcgacggtggcgcccctcctcatcatgaggcttctcccgaaaaagccacacattcctgcccaagatcttcttccgcaagatgtcatcctcaggggccaaggacaagcctgagctgcagtttcccttccttcaggatgaggacacagtggccacgctgctagagtgcaagacgctcttcatcttgcgcggcctgccaggaagcggcaagtccacgctggcacgggtcatcgtggacaagtaccgtgatggcaccaagatggtgtcggctgacgcttacaagatcacccccggcgctcgaggagccttctccgaggagtacaagcggctcgatgaggacctggctgcctactgccgccgccgggacatcagaattcttgtgcttgatgacaccaaccacgaacgggaacggctggagcagctctttgaaatggccgaccagtaccagtaccaggtggtgctggtggagcccaagacggcgtggcggctggactgtgcccagctcaaggagaagaaccagtggcagctgtcggctgatgacctgaagaagctgaagcctgggctggagaaggacttcctgccgctctacttcggctggttcctgaccaagaagagctctgagaccctccgcaaagccggccaggtcttcctggaagagctggggaaccacaaggccttcaagaaggagctgcgacaattcgtccctggggatgagcccagggagaagatggacttggtcacctactttggaaagagacccccaggcgtgctgcattgcacaaccaagttttgtgactacgggaaggctcccggggcagaggagtacgctcaacaagatgtgttaaagaaatcttactccaaggccttcacgctgaccatctctgccctctttgtgacacccaagacgactggggcccgggtggagttaagcgagcagcaactgcagttgtggccgagtgatgtggacaagctgtcacccactgacaacctgccgcgggggagccgcgcccacatcaccctcggctgtgcagctgacgtagaggccgtgcagacgggccttgacctcttagagattctgcggcaggagaaggggggcagccgaggcgaggaggtgggcgagctaagccggggcaagctctattccttgggcaatgggcgctggatgctgaccctggccaagaacatggaggtcagggccatcttcacggggtactacgggaaaggcaaacctgtgcccacgcaaggtagccggaaggggggcgccttgcagtcctgcaccatcatatgagtgttctcaccaccacttatgcccctagaagggaaggggagagggaaacgtgccctctgtttgatccttgttttgtgacattttttttttttttttttttactcaaagttaacctacctgtaactttttaaaaacttgtaaaataactgaccctcccttcctgtccgccctcttcccctctaatgctcacgctcccaacacaaggtgggcagggaggcaccattcaggaacctggaccaaagctgacgaggctgggccaagccagggatggggccacagccagaaccccgagccctacttccaggttctggttagctcagccccagcccagcccagctgctctgcccagagctgggtgagtggggagacacctcagagccccgcaaaacccactgaccggaggcaaaaggcagtggggctgggggtagttttccatggtcacagagaactagtggtggctctgagaaggggaggacctctgggctttgattccatctccttgtcttttttctttgtttttagagacagggtcctgctatttcccaagctggagtgcagtggtgcgatcatggctcactgcagcctcgaactcctgggctcaagcaatcctcctgagtgatcccatttcttaatcagtgtagccccaagaaggctggggctatttaccagggtagaaaaaggagcttacctcccacctttggtcctaagtccctgccccctccccttcacaccataactaggtaacagtttgataactagggaagaaagcagaacagttaagcagccgccacatccccgctggctgggggcctcactccaggaaggggctggactggctgtcctttccagtggcctggctccgctgtgtggatggggagatcggggccagaggcagaaccctggtgaggaagctccagtcctgctctctacccagcccatcttgcctccatggtgcctctggaggcctctgggcctcctctaacaggggctggtgggcaccaagagccaatggagtagacccctggctggtaagggccaagtcccaccggttgcttctgggaaggggtttctaacactagtctgtgtgctgtggttcctggggtgccctccactgccctctgttcagtaacagggccttgctaatcgggttgtcactcaacaaaagtgctttggatttaagttactatcctggctttgcccaacctcagcaacctgtaagactgataatgaaataaatcatgttaatcctagc

SEQ ID NO: 102533 - DNA, 5217 bp, Homo sapiens
  Payload ID: 10
  Gene Symbol: CNP
  Gene Name: 2',3'-cyclic nucleotide 3' phosphodiesterase
  Uniprot ID: P09543
  ENST ID: ENST00000393892
  CDS Start-End: 145-1410
gggtgcccgctccgccccccgggctatgtaaagcggccgggctcgggtcgtgccaccgctggactcccgtgtccctccgcgcaggcgggcggccccggagcgctggtgccggcagaggcggcgacggtggcgcccctcctcatcatgaacagaggcttctcccgaaaaagccacacattcctgcccaagatcttcttccgcaagatgtcatcctcaggggccaaggacaagcctgagctgcagtttcccttccttcaggatgaggacacagtggccacgctgctagagtgcaagacgctcttcatcttgcgcggcctgccaggaagcggcaagtccacgctggcacgggtcatcgtggacaagtaccgtgatggcaccaagatggtgtcggctgacgcttacaagatcacccccggcgctcgaggagccttctccgaggagtacaagcggctcgatgaggacctggctgcctactgccgccgccgggacatcagaattcttgtgcttgatgacaccaaccacgaacgggaacggctggagcagctctttgaaatggccgaccagtaccagtaccaggtggtgctggtggagcccaagacggcgtggcggctggactgtgcccagctcaaggagaagaaccagtggcagctgtcggctgatgacctgaagaagctgaagcctgggctggagaaggacttcctgccgctctacttcggctggttcctgaccaagaagagctctgagaccctccgcaaagccggccaggtcttcctggaagagctggggaaccacaaggccttcaagaaggagctgcgacaattcgtccctggggatgagcccagggagaagatggacttggtcacctactttggaaagagacccccaggcgtgctgcattgcacaaccaagttttgtgactacgggaaggctcccggggcagaggagtacgctcaacaagatgtgttaaagaaatcttactccaaggccttcacgctgaccatctctgccctctttgtgacacccaagacgactggggcccgggtggagttaagcgagcagcaactgcagttgtggccgagtgatgtggacaagctgtcacccactgacaacctgccgcgggggagccgcgcccacatcaccctcggctgtgcagctgacgtagaggccgtgcagacgggccttgacctcttagagattctgcggcaggagaaggggggcagccgaggcgaggaggtgggcgagctaagccggggcaagctctattccttgggcaatgggcgctggatgctgaccctggccaagaacatggaggtcagggccatcttcacggggtactacgggaaaggcaaacctgtgcccacgcaaggtagccggaaggggggcgccttgcagtcctgcaccatcatatgagtgttctcaccaccacttatgcccctagaagggaaggggagagggaaacgtgccctctgtttgatccttgttttgtgacattttttttttttttttttttactcaaagttaacctacctgtaactttttaaaaacttgtaaaataactgaccctcccttcctgtccgccctcttcccctctaatgctcacgctcccaacacaaggtgggcagggaggcaccattcaggaacctggaccaaagctgacgaggctgggccaagccagggatggggccacagccagaaccccgagccctacttccaggttctggttagctcagccccagcccagcccagctgctctgcccagagctgggtgagtggggagacacctcagagccccgcaaaacccactgaccggaggcaaaaggcagtggggctgggggtagttttccatggtcacagagaactagtggtggctctgagaaggggaggacctctgggctttgattccatctccttgtcttttttctttgtttttagagacagggtcctgctatttcccaagctggagtgcagtggtgcgatcatggctcactgcagcctcgaactcctgggctcaagcaatcctcctgagtgatcccatttcttaatcagtgtagccccaagaaggctggggctatttaccagggtagaaaaaggagcttacctcccacctttggtcctaagtccctgccccctccccttcacaccataactaggtaacagtttgataactagggaagaaagcagaacagttaagcagccgccacatccccgctggctgggggcctcactccaggaaggggctggactggctgtcctttccagtggcctggctccgctgtgtggatggggagatcggggccagaggcagaaccctggtgaggaagctccagtcctgctctctacccagcccatcttgcctccatggtgcctctggaggcctctgggcctcctctaacaggggctggtgggcaccaagagccaatggagtagacccctggctggtaagggccaagtcccaccggttgcttctgggaaggggtttctaacactagtctgtgtgctgtggttcctggggtgccctccactgccctctgttcagtaacagggccttgctaatcgggttgtcactcaacaaaagtgctttggatttaagttactatcctggctttgcccaacctcagcaacctgtaagactgataatgaaataaatcatgttaatcctagctgtgtgcagtctctcttacccttctgtgcccagctcagtcttccctagggctgggtgtattaggactggctttgtcccacagcttggggccatcggtcctgtctcccctctgctggccgggcacagctgtggtgaggttgggcagctgaacagtgttggctttcatgaggaggcagaaagcagaggctggcctcagactcatacagaaggtgggggttggctgggtacgagggatgtggagcacaaaagcctctcatcccccattaaccagggcaccaagcccacaggtgtccccagcccactggatcagaaagagttcagtaagaccggaagctcctggtatgggtttctcccagttctctagggaaggccacctgcaggtcactgaaacttcaagcaccagggaagatctaacatttgagtcccttccaggccatcagaggcctagtcagccacatgggaaacttccaagacctgactcaggcatcattccaccatggctaaggcaccagccggggaagacttgaaagaaaggggcaggagctcagatgaagagaaatcctaagttacctttctaggtcaaggcctgtccctggccatctctgaacttcagctagagcttcaagtctgtgcctggagctcctgggaaggctactcaccttgaacaccacgcttgacaggacagcatggtgcatgccgctgcatccgtgagcagtgtgtctcctgcatgcagaaagggagcagagaaggccaggggcttttgctaaaaatagtggccagaccagagctctggagccacctgtcccacctcaaatgggtctgggggtcaggaggcagggttttatctctgtctaccatctccctcgaacccacactgcaacaggaactgtgagagtctttgtaagtaaactgccctgtctaggtcagtacccacctgagctttggacgcacacagcttttagtacccacctgagctttggacacacacagcttctagtgatttctggggccccaccgtaaagtgagcatgctttctgaactcgcttctctgtgactgatgttaggctgggcccagaggcacagccggggcctgcctagcactcacatgctggacaggtctgggagaggcagagtgccccacctgccactaggctgggtgcccacagcccgcatgcagcagcttgctgcaccccaagtccaggtcgggctcagctctggctcacagactggagacaatgcagatgccagagcaaagggccaggaagggtcaaaacattttattctcttttttttttcttttttaataaagttaaacagtaaaacaaaaattcacaagctgcctccctgtccacccccgcctccctcccctgccctcggtcttcggcattggttccctttgctccaccccactcacagagacacagggcatccaactgagaaaacgaaactgctctaagcacacggagacgtgatgaagggaggaggtgaactgtttccacattcaagattaaactgagtgaatctgcattttctgggttctgggtggttgcccttcattagccaaattgaaaaaagaaattccctggaccagatgctgaaagagaaaagaggggttggtagttggctatggattttctaaggaagatcactttgctctgattatggaaaagtcttcaagggctgcttcaaactcaaacacagagagaaactctatgggtatcaaacagctcaggctgtttttgggtgcaagagggagcacgtgactgtattatacatgggtagcttctgacctcagcattatctatatagtacctttgctcttgcagagaagccttggtactaggcagttagagatgcctccctgaccctgcagagatgcggtggctaaaggtcccaaggcaaggggtgcctgggaaccttcctgtcttcatccttagcaacagccgagtggatagatgccctgctagatgagaattcagctgcccccgctcatgggcccctctgactcccaaagagctgcctaagaggcaatgagtgtgttggcttgtgatctgggaactcccaagaacagcaggcccacctaccttcaaagctgaagccgccaggaccgccaaagaatgccttgaagatattgtttggatcaaaatctgtagagcagggcaagtaacatggaagggaagaaaaggtgaaaaattagaaatgttcgaagagaactgatgacactgagaacagatctccaaagctttcctggagagtctcactcccctcctttcccaacacttcagactgcaagtgagcaaacctgccccatcccgtgcaaaacatgctacctgatcccactcctaggacatgttcccttctccttccaactgctgccccaaaggaagctttctctgcttcagcttgcttcattgggctgttttctcaacaaatggaatgccatttgcacttacacaagactttccccatactctgtctccctataatgctggagcggctactaaaaaggataaaatgtatcacttaaatgttaccaaaaataaatataagagcaa

SEQ ID NO: 102534 - DNA, 622 bp, Homo sapiens
  Payload ID: 10
  Gene Symbol: CNP
  Gene Name: 2',3'-cyclic nucleotide 3' phosphodiesterase
  ENST ID: ENST00000441615
  CDS Start-End: 190-622
atcatggtgagaggccgggcggggccgggcacggggtagcaccagggcgggaaacgagtgtcggggcccctcgggaggaagcgtcttgcaaacgaggacccggggctccgggttcgacttccagttttcttgaacagaggcttctcccgaaaaagccacacattcctgcccaagatcttcttccgcaagatgtcatcctcaggggccaaggacaagcctgagctgcagtttcccttccttcaggatgaggacacagtggccacgctgctagagtgcaagacgctcttcatcttgcgcggcctgccaggaagcggcaagtccacgctggcacgggtcatcgtggacaagtaccgtgatggcaccaagatggtgtcggctgacgcttacaagatcacccccggcgctcgaggagccttctccgaggagtacaagcggctcgatgaggacctggctgcctactgccgccgccgggacatcagaattcttgtgcttgatgacaccaaccacgaacgggaacggctggagcagctctttgaaatggccgaccagtaccagtaccaggtggtgctggtggagcccaagacggcgtggcggctggactgtgcccagctcaaggagaaga

SEQ ID NO: 102535 - DNA, 516 bp, Homo sapiens
  Payload ID: 10
  Gene Symbol: CNP
  Gene Name: 2',3'-cyclic nucleotide 3' phosphodiesterase
  ENST ID: ENST00000589772
  CDS Start-End: 155-516
gtcccttgtggcttctagaagataggaaaacaagtggctccgagaggcgcttctgacacacagcacagcggcgggtagagctggatcctaattgcagaacagaggcttctcccgaaaaagccacacattcctgcccaagatcttcttccgcaagatgtcatcctcaggggccaaggacaagcctgagctgcagtttcccttccttcaggatgaggacacagtggccacgctgctagagtgcaagacgctcttcatcttgcgcggcctgccaggaagcggcaagtccacgctggcacgggtcatcgtggacaagtaccgtgatggcaccaagatggtgtcggctgacgcttacaagatcacccccggcgctcgaggagccttctccgaggagtacaagcggctcgatgaggacctggctgcctactgccgccgccgggacatcagaattcttgtgcttgatgacaccaaccacgaacgggaacggctggagcagctctttgaaatggccgaccagta

SEQ ID NO: 102536 - DNA, 1019 bp, Homo sapiens
  Payload ID: 10
  Gene Symbol: CNP
  Gene Name: 2',3'-cyclic nucleotide 3' phosphodiesterase
  ENST ID: ENST00000472031
  CDS Start-End: 123-272
gctatgtaaagcggccgggctcgggtcgtgccaccgctggactcccgtgtccctccgcgcaggcgggcggccccggagcgctggtgccggcagaggcggcgacggtggcgcccctcctcatcatgtcgtccctggggatgagcccagggagaagatggacttggtcacctactttggaaagagacccccaggcgtgctgcattgcacaaccaagttttgtgactacgggaaggctcccggggcagaggagtacgctcaacaagatgtgttaaagaaatcttactccaaggccttcacgctgaccatctctgccctctttgtgacacccaagacgactggggcccgggtggagttaagcgagcagcaactgcagttgtggccgagtgatgtggacaagctgtcacccactgacaacctgccgcgggggagccgcgcccacatcaccctcggctgtgcagctgacgtagaggccgtgcagacgggccttgacctcttagagattctgcggcaggagaaggggggcagccgaggcgaggaggtgggcgagctaagccggggcaagctctattccttgggcaatgggcgctggatgctgaccctggccaagaacatggaggtcagggccatcttcacggggtactacgggaaaggcaaacctgtgcccacgcaaggtagccggaaggggggcgccttgcagtcctgcaccatcatatgagtgttctcaccaccacttatgcccctagaagggaaggggagagggaaacgtgccctctgtttgatccttgttttgtgacattttttttttttttttttttactcaaagttaacctacctgtaactttttaaaaacttgtaaaataactgaccctcccttcctgtccgccctcttcccctctaatgctcacgctcccaacacaaggtgggcagggaggcaccattcaggaacctggaccaaagctgacgaggctgggccaagccagggatggggccacagccagaaccccgagccctacttccag

SEQ ID NO: 102537 - DNA, 581 bp, Homo sapiens
  Payload ID: 10
  Gene Symbol: CNP
  Gene Name: 2',3'-cyclic nucleotide 3' phosphodiesterase
  ENST ID: ENST00000587679
  CDS Start-End: 88-581
gctggactcccgtgtccctccgcgcaggcgggcggccccggagcgctggtgccggcagaggcggcgacggtggcgcccctcctcatcatggatgaggacacagtggccacgctgctagagtgcaagacgctcttcatcttgcgcggcctgccaggaagcggcaagtccacgctggcacgggtcatcgtggacaagtaccgtgatggcaccaagatggtgtcggctgacgcttacaagatcacccccggcgctcgaggagccttctccgaggagtacaagcggctcgatgaggacctggctgcctactgccgccgccgggacatcagaattcttgtgcttgatgacaccaaccacgaacgggaacggctggagcagctctttgaaatggccgaccagtaccagtaccaggtggtgctggtggagcccaagacggcgtggcggctggactgtgcccagctcaaggagaagaaccagtggcagctgtcggctgatgacctgaagaagctgaagcctgggctggagaaggacttcctgccgctctacttcggctggttcctgaccaagaagagctctgagaccct

SEQ ID NO: 102538 - DNA, 689 bp, Homo sapiens
  Payload ID: 10
  Gene Symbol: CNP
  Gene Name: 2',3'-cyclic nucleotide 3' phosphodiesterase
  ENST ID: ENST00000585452
  CDS Start-End: 229-689
agtcccagaaccgcaggctcctggcgcgccccgcatgcctccagcacgtttacctttccgaagtggcaggaatggggaaagcgcacgcttaggagagcttcagacaagcttccctcttcctcctccacgaccagaagcggaaaggtgctcccggaccgaaagggaaagaagaacagaggcttctcccgaaaaagccacacattcctgcccaagatcttcttccgcaagatgtcatcctcaggggccaaggacaagcctgagctgcagtttcccttccttcaggatgaggacacagtggccacgctgctagagtgcaagacgctcttcatcttgcgcggcctgccaggaagcggcaagtccacgctggcacgggtcatcgtggacaagtaccgtgatggcaccaagatggtgtcggctgacgcttacaagatcacccccggcgctcgaggagccttctccgaggagtacaagcggctcgatgaggacctggctgcctactgccgccgccgggacatcagaattcttgtgcttgatgacaccaaccacgaacgggaacggctggagcagctctttgaaatggccgaccagtaccagtaccaggtggtgctggtggagcccaagacggcgtggcggctggactgtgcccagctcaaggagaagaaccagtggcagctgtcggctgatgacct

SEQ ID NO: 102539 - DNA, 1207 bp, Homo sapiens
  Payload ID: 11
  Gene Symbol: DECR1
  Gene Name: 2,4-dienoyl CoA reductase 1, mitochondrial
  Uniprot ID: Q16698
  ENST ID: ENST00000220764
  CDS Start-End: 89-1096
tccagccccgagaactttgttctttttgtcccgccccctgcgcccaaccgcctgcgccgccttccggcccgagttctggagactcaacatgaagctaccggccagggttttctttactctggggtcccggctgccctgtggcctcgctcctcggaggtttttcagttatgggacaaaaatattatatcaaaacactgaagctttgcaatctaaattcttttcacctcttcaaaaagcgatgctaccacctaatagttttcaaggaaaagtggcattcattactgggggaggtactggccttggtaaaggaatgacaactcttctgtccagcctaggtgctcagtgcgtgatagccagccggaagatggatgttttgaaagctaccgcagaacaaatttcttctcaaactggaaataaggttcatgcaattcagtgtgatgtgagggatcctgatatggttcaaaacactgtgtcagaactgatcaaagttgcaggacatcctaatattgtgataaacaatgcagcagggaattttatttctcctactgaaagactttctcctaatgcttggaaaaccataactgacatagttctaaatggcacagccttcgtgacactagaaattggaaaacaactaattaaagcacagaaaggagcagcatttctttctattactactatctatgctgagactggttcaggttttgtagtaccaagtgcttctgccaaagcaggtgtggaagccatgagcaagtctcttgcagctgaatggggtaaatatggaatgcgattcaatgtgattcaaccagggcctataaaaaccaaaggtgcctttagccgtctggacccaactggaacatttgagaaagaaatgattggcagaattccctgtggtcgcctggggactgtagaagaactcgcaaatcttgctgctttcctttgtagtgattatgcttcttggattaatggagcagtcattaaatttgacggtggagaggaagtacttatttcaggggaattcaacgacctgagaaaggtcaccaaggagcagtgggacaccatagaagaactcatcaggaagacaaaaggttcctaagaccactttggccttcatcttggttacagaaaagggaatagaaatgaaacaaattatctctcatcttttgactatttcaagtctaataaattcttaattaacaaacattca

SEQ ID NO: 102540 - DNA, 774 bp, Homo sapiens
  Payload ID: 11
  Gene Symbol: DECR1
  Gene Name: 2,4-dienoyl CoA reductase 1, mitochondrial
  ENST ID: ENST00000517761
  CDS Start-End: 159-774
tcaacatgaagctaccggccagggttttctttactctggggtcccggctgccctgtggcctcgctcctcggagggtgatgaacagcctccttctaaatcattgaccacatttcttattctttcctgaggataaatttcaagatatcctgaaccaactgatgacagcctatttagctacaggaatactctggaaggaaatgtttttcagttatgggacaaaaatattatatcaaaacactgaagctttgcaatctaaattcttttcacctcttcaaaaagcgatgctaccacctaatagttttcaaggaaaagtggcattcattactgggggaggtactggccttggtaaaggaatgacaactcttctgtccagcctaggtgctcagtgcgtgatagccagccggaagatggatgttttgaaagctaccgcagaacaaatttcttctcaaactggaaataaggttcatgcaattcagtgtgatgtgagggatcctgatatggttcaaaacactgtgtcagaactgatcaaagttgcaggacatcctaatattgtgataaacaatgcagcagggaattttatttctcctactgaaagactttctcctaatgcttggaaaaccataactgacatagttctaaatggcacagccttcgtgacactagaaattggaaaacaactaattaaagcacagaaaggagcagcatttctttctattactactatctatgctgagactggttcaggttttgtagtaccaagtgcttctgccaaag

SEQ ID NO: 102541 - DNA, 441 bp, Homo sapiens
  Payload ID: 11
  Gene Symbol: DECR1
  Gene Name: 2,4-dienoyl CoA reductase 1, mitochondrial
  ENST ID: ENST00000520148
  CDS Start-End: 1-131
ttgcagctgaatggggtaaatatggaatgcgattcaatgtgattcaaccagggcctataaaaaccaaagagtgtgtttggggcagggaggtctgttgtggaaccaatcctgacaatgctgaatgtcattaaatttgacggtggagaggaagtacttatttcaggggaattcaacgacctgagaaaggtcaccaaggagcagtgggacaccatagaagaactcatcaggaagacaaaaggttcctaagaccactttggccttcatcttggttacagaaaagggaatagaaatgaaacaaattatctctcatcttttgactatttcaagtctaataaattcttaattaacaaacattcattgaatatgtattatgtgccaggccagtgatagccattgtatattcaaagataaataaaatgaaatatagtccttcaaaacatt

SEQ ID NO: 102542 - DNA, 654 bp, Homo sapiens
  Payload ID: 11
  Gene Symbol: DECR1
  Gene Name: 2,4-dienoyl CoA reductase 1, mitochondrial
  ENST ID: ENST00000517314
  CDS Start-End: 48-194
gcccaaccgcctgcgccgccttccggcccgagttctggagactcaacatgaagctaccggccagggttttctttactctggggtcccggctgccctgtggcctcgctcctcggaggcgatgctaccacctaatagttttcaaggaaaagtggcattcattactgggggaggtactggccttggtaaaggaatgacaactcttctgtccagcctaggtgctcagtgcgtgatagccagccggaagatggatgttttgaaagctaccgcagaacaaatttcttctcaaactggaaataaggttcatgcaattcagtgtgatgtgagggatcctgatatggttcaaaacactgtgtcagaactgatcaaagttgcaggacatcctaatattgtgataaacaatgcagcagggaattttatttctcctactgaaagactttctcctaatgcttggaaaaccataactgacatagttctaaatggcacagccttcgtgacactagaaattggaaaacaactaattaaagcacagaaaggagcagcatttctttctattactactatctatgctgagactggttcaggttttgtagtaccaagtgcttctgccaaagcaggtgtggaagccatgagcaagtctcttgcagctgaatgggg

SEQ ID NO: 102543 - DNA, 578 bp, Homo sapiens
  Payload ID: 11
  Gene Symbol: DECR1
  Gene Name: 2,4-dienoyl CoA reductase 1, mitochondrial
  ENST ID: ENST00000521603
  CDS Start-End: 36-161
gcgccgccttccggcccgagttctggagactcaacatgaagctaccggccagggttttctttactctggggtcccggctgccctgtggcctcgctcctcggagggaagatggatgttttgaaagctaccgcagaacaaatttcttctcaaactggaaataaggttcatgcaattcagtgtgatgtgagggatcctgatatggttcaaaacactgtgtcagaactgatcaaagttgcaggacatcctaatattgtgataaacaatgcagcagggaattttatttctcctactgaaagactttctcctaatgcttggaaaaccataactgacatagttctaaatggcacagccttcgtgacactagaaattggaaaacaactaattaaagcacagaaaggagcagcatttctttctattactactatctatgctgagactggttcaggttttgtagtaccaagtgcttctgccaaagcaggtgtggaagccatgagcaagtaagtacttccttgtcaatcctgttgctgaacataactaatacagttggtggctcagggaactgtattcctgctttctgg

SEQ ID NO: 102544 - DNA, 864 bp, Homo sapiens
  Payload ID: 11
  Gene Symbol: DECR1
  Gene Name: 2,4-dienoyl CoA reductase 1, mitochondrial
  ENST ID: ENST00000520227
  CDS Start-End: 411-864
tttactctggggtcccggctgccctgtggcctcgctcctcggaggtctgaaaaatgagtaaagatggaagccaaagtatcacttttattgtggtttgtgagaggaagctgggcctatcagctggatctcccgaagtaggcggacttacataactctggaggagggcagaacattgtcctctgaaggcagctggctcccaaaaggaagaagaccaaggagaactgttcatacccaacgatcctgtcaaaatttaccagtcatatcaactgtctctgcacagacagattgtacctcagtctgtgttgctataaaggaatacctgaggctggtttttcagttatgggacaaaaatattatatcaaaacactgaagctttgcaatctaaattcttttcacctcttcaaaaagcgatgctaccacctaatagttttcaaggaaaagtggcattcattactgggggaggtactggccttggtaaaggaatgacaactcttctgtccagcctaggtgctcagtgcgtgatagccagccggaagatggatgttttgaaagctaccgcagaacaaatttcttctcaaactggaaataaggttcatgcaattcagtgtgatgtgagggatcctgatatggttcaaaacactgtgtcagaactgatcaaagttgcaggacatcctaatattgtgataaacaatgcagcagggaattttatttctcctactgaaagactttctcctaatgcttggaaaaccataactgacatagttctaaatggcacagccttcgtgacactagaaattggaaaacaactaattaaagcacagaaaggagcagcatttctttctattactactatctatgctgaga

SEQ ID NO: 102545 - DNA, 897 bp, Homo sapiens
  Payload ID: 11
  Gene Symbol: DECR1
  Gene Name: 2,4-dienoyl CoA reductase 1, mitochondrial
  ENST ID: ENST00000517597
  CDS Start-End: 18-143
agttctggagactcaacatgaagctaccggccagggttttctttactctggggtcccggctgccctgtggcctcgctcctcggagggaagatggatgttttgaaagctaccgcagaacaaatttcttctcaaactggaaataaggttcatgcaattcagtgtgatgtgagggatcctgatatggttcaaaacactgtgtcagaactgatcaaagttgcaggacatcctaatattgtgataaacaatgcagcagggaattttatttctcctactgaaagactttctcctaatgcttggaaaaccataactgacatagttctaaatggcacagccttcgtgacactagaaattggaaaacaactaattaaagcacagaaaggagcagcatttctttctattactactatctatgctgagactggttcaggttttgtagtaccaagtgcttctgccaaagcaggtgtggaagccatgagcaagtctcttgcagctgaatggggtaaatatggaatgcgattcaatgtgattcaaccagggcctataaaaaccaaaggtgcctttagccgtctggacccaactggaacatttgagaaagaaatgattggcagaattccctgtggtcgcctggggactgtagaagaactcgcaaatcttgctgctttcctttgtagtgattatgcttcttggattaatggagcagtcattaaatttgacggtggagaggaagtacttatttcaggggaattcaacgacctgagaaaggtcaccaaggagcagtgggacaccatagaagaactcatcaggaagacaaaaggttcctaagaccactttggccttcatcttggttacagaaaagggaatagaaatgaaacaaattatctctcatcttttgactat

SEQ ID NO: 102546 - DNA, 1766 bp, Homo sapiens
  Payload ID: 11
  Gene Symbol: DECR1
  Gene Name: 2,4-dienoyl CoA reductase 1, mitochondrial
  Uniprot ID: Q16698
  ENST ID: ENST00000522161
  CDS Start-End: 684-1664
gttctggagactcaacatgaagctaccggccagggttttctttactctggggtcccggctgccctgtggcctcgctcctcggaggtctgaaaaatgagtaaagatggaagccaaagtatcacttttattgtggtttgtgagaggaagctgggcctatcagctggatctcccgaagtaggcggacttacataactctggaggagggcagaacattgtcctctgaaggcagctggctcccaaaaggaagaagaccaaggagaactgttcatacccaacgatcctgtcaaaatttaccagtcatatcaactgtctctgcacagacagattgtacctcagtctgtgttgctataaaggaatacctgaggctgggtaatttataaagaaaagggtttgtttgactcatgattctgatgcctggacaagttcaagactgggcatctgcatctggtgacggcctaaggctgcttgcacttgtggcagaaggatgaagatggtactacgacattcatgatggatctgccaccataacccaggcacctcccattagaccccacctccaacattggggatcacatttcaacatgagttttcaagggacaaacatccaaacatccttagcaggttgactaaggggacagaaagaagcctggagttgtactacctgaacttctcacagtagggagatgtcaggactggggaagaagcatctcctgctcatgggggagtttttcagttatgggacaaaaatattatatcaaaacactgaagctttgcaatctaaattcttttcacctcttcaaaaagcgatgctaccacctaatagttttcaaggaaaagtggcattcattactgggggaggtactggccttggtaaaggaatgacaactcttctgtccagcctaggtgctcagtgcgtgatagccagccggaagatggatgttttgaaagctaccgcagaacaaatttcttctcaaactggaaataaggttcatgcaattcagtgtgatgtgagggatcctgatatggttcaaaacactgtgtcagaactgatcaaagttgcaggacatcctaatattgtgataaacaatgcagcagggaattttatttctcctactgaaagactttctcctaatgcttggaaaaccataactgacatagttctaaatggcacagccttcgtgacactagaaattggaaaacaactaattaaagcacagaaaggagcagcatttctttctattactactatctatgctgagactggttcaggttttgtagtaccaagtgcttctgccaaagcaggtgtggaagccatgagcaagtctcttgcagctgaatggggtaaatatggaatgcgattcaatgtgattcaaccagggcctataaaaaccaaaggtgcctttagccgtctggacccaactggaacatttgagaaagaaatgattggcagaattccctgtggtcgcctggggactgtagaagaactcgcaaatcttgctgctttcctttgtagtgattatgcttcttggattaatggagcagtcattaaatttgacggtggagaggaagtacttatttcaggggaattcaacgacctgagaaaggtcaccaaggagcagtgggacaccatagaagaactcatcaggaagacaaaaggttcctaagaccactttggccttcatcttggttacagaaaagggaatagaaatgaaacaaattatctctcatcttttgactatttcaagtctaataaattcttaattaac

SEQ ID NO: 102547 - DNA, 705 bp, Homo sapiens
  Payload ID: 11
  Gene Symbol: DECR1
  Gene Name: 2,4-dienoyl CoA reductase 1, mitochondrial
  ENST ID: ENST00000519410
  CDS Start-End: 162-705
agttctggagactcaacatgaagctaccggccagggttttctttactctggggtcccggctgccctgtggcctcgctcctcggagggcaccttactagggatatgaaggtgagaagaagagctgattcctgctgtcaagaagcatagagtccaatggcattatgtttttcagttatgggacaaaaatattatatcaaaacactgaagctttgcaatctaaattcttttcacctcttcaaaaagcgatgctaccacctaatagttttcaaggaaaagtggcattcattactgggggaggtactggccttggtaaaggaatgacaactcttctgtccagcctaggtgctcagtgcgtgatagccagccggaagatggatgttttgaaagctaccgcagaacaaatttcttctcaaactggaaataaggttcatgcaattcagtgtgatgtgagggatcctgatatggttcaaaacactgtgtcagaactgatcaaagttgcaggacatcctaatattgtgataaacaatgcagcagggaattttatttctcctactgaaagactttctcctaatgcttggaaaaccataactgacatagttctaaatggcacagccttcgtgacactagaaattggaaaacaactaattaaagcacagaaaggagcagcatttctttctattactactatctatgctgagactggtt

SEQ ID NO: 102548 - DNA, 527 bp, Homo sapiens
  Payload ID: 11
  Gene Symbol: DECR1
  Gene Name: 2,4-dienoyl CoA reductase 1, mitochondrial
  ENST ID: ENST00000518725
  CDS Start-End: 14-301
ctggagactcaacatgaagctaccggccagggttttctttactctggggtcccggctgccctgtggcctcgctcctcggaggtttttcagttatgggacaaaaatattatatcaaaacactgaagctttgcaatctaaattcttttcacctcttcaaaaagcgatgctaccacctaatagttttcaaggaaaagtggcattcattactgggggaggtactggccttggtaaaggaatgacaactcttctgtccagcctaggtgctcagtgcgtgatagccagccgaaatgcttttctttaagctatggattctctgtattcttcaatttatgaaattgaaaaatataatatgaagtcatacaaggtgtttatttctaggaagatggatgttttgaaagctaccgcagaacaaatttcttctcaaactggaaataaggttcatgcaattcagtgtgatgtgagggatcctgatatggttcaaaacactgtgtcagaactgatcaaagttgcaggacatcctaatattg

SEQ ID NO: 102549 - DNA, 816 bp, Homo sapiens
  Payload ID: 11
  Gene Symbol: DECR1
  Gene Name: 2,4-dienoyl CoA reductase 1, mitochondrial
  ENST ID: ENST00000519328
  CDS Start-End: 89-214
tccagccccgagaactttgttctttttgtcccgccccctgcgcccaaccgcctgcgccgccttccggcccgagttctggagactcaacatgaagctaccggccagggttttctttactctggggtcccggctgccctgtggcctcgctcctcggagggaagatggatgttttgaaagctaccgcagaacaaatttcttctcaaactggaaataaggttcatgcaattcagtgtgatgtgagggatcctgatatggttcaaaacactgtgtcagaactgatcaaagttgcaggacatcctaatattgtgataaacaatgcagcagggaattttatttctcctactgaaagactttctcctaatgcttggaaaaccataactgacatagttctaaatggcacagccttcgtgacactagaaattggaaaacaactaattaaagcacagaaaggtctcttgcagctgaatggggtaaatatggaatgcgattcaatgtgattcaaccagggcctataaaaaccaaaggtgcctttagccgtctggacccaactggaacatttgagaaagaaatgattggcagaattccctgtggtcgcctggggactgtagaagaactcgcaaatcttgctgctttcctttgtagtgattatgcttcttggattaatggagcagtcattaaatttgacggtggagaggaagtacttatttcaggggaattcaacgacctgagaaaggtcaccaaggagcagtgggacaccatagaagaactcatcaggaagacaaaaggttcctaagaccactttggccttcatcttgg

SEQ ID NO: 102550 - DNA, 1615 bp, Homo sapiens
  Payload ID: 12
  Gene Symbol: DECR2
  Gene Name: 2,4-dienoyl CoA reductase 2, peroxisomal
  Uniprot ID: Q9NUI1
  ENST ID: ENST00000219481
  CDS Start-End: 139-1017
aagcaatcagggcaggggcggggcgtccggggagtggggcggggctcccggttccaggcgagttcgcagctgcgcgccgggtcctggaggccgaggccgctcccgcccgttgtccccgcagtccccgacgggagcgccatggcccagccgccgcccgacgtggagggggacgactgtctccccgcgtaccgccacctcttctgcccggacctgctgcgggacaaagtggccttcatcacaggaggcggctctgggattgggttccggattgctgagattttcatgcggcacggctgccatacggtgattgccagtaggagcctgccgcgagtgctgacggccgccaggaagctggctggggccaccggccggcgctgcctccctctctctatggacgtccgagcgcccccagctgtcatggccgccgtggaccaggctctgaaggagtttggcagaatcgacattctcattaactgtgcggccgggaacttcctgtgccccgctggcgccttgtccttcaacgccttcaagaccgtgatggacatcgataccagcggcaccttcaatgtgtctcgtgtgctctatgagaagttcttccgggaccacggaggggtgatcgtgaacatcactgccaccctggggaaccgggggcaggcgctccaggtgcatgcaggctccgccaaggccgctgtggacgcgatgacgcggcacttggctgtggagtggggtccccaaaacatccgcgtcaacagcctcgcccctggccccatcagtggcacagaggggctccggcgactgggtggccctcaggccagcctgagcaccaaggtcactgccagcccgctgcagaggctggggaacaagaccgagatcgcccacagcgtgctctacctggccagccctctggcttcctacgtgacgggggccgtgctggtggccgatggcggggcatggttgacgttcccaaacggtgtcaaagggctgccggatttcgcatccttctctgctaagctctaggaatcttccggccgctgcttcctgccgcctcactcagccaggtggagagcaccaatctgaaccagcaatgcctgcagcccagcccctcctctgaacactcagctattactgcgctttccctccccacggccccaactccagggcaggagcaactggacagtgggcctggcccgtggagctgccacgcaggtgcctgagggccaggtgccacgcaggtgtctgaggaccaggtgccacgcaggtggtgggggtacagacaagatgctgggatgtcccctgccccatggtcaagggtgtcctgcctgcctgggtccagggcctgagggagccacatggatcccgagacttgtgttctcttggctgaaaacactgaggtgctcccatctgtgcgtggcccatgagctgggatggtcctccagctgcccacaaggtccgcccctctgtctctgcaccacctgtttgcataaacacactttgctacaatcttgctagtgcgttttcttaaaagataatctatttactgtaaaaataaattggactttgcaaaagcttttagaaggaaaagaaagaggattaaagagaattgctggtgatccta

SEQ ID NO: 102551 - DNA, 721 bp, Homo sapiens
  Payload ID: 12
  Gene Symbol: DECR2
  Gene Name: 2,4-dienoyl CoA reductase 2, peroxisomal
  ENST ID: ENST00000429116
  CDS Start-End: 1-283
cgccaggaagctggctggggccaccggccggcgctgcctccctctctctatggacgtccgagcgcccccagctgtcatggccgccgtggaccaggctctgaaggagtttggcagaatcgacattctcattaactgtgcggccgggaacttcctgtgccccgctggcgccttgtccttcaacgccttcaagaccgtgatggacatcgataccagcggcaccttcaatgtgtctcgtgtgctctatgagaagttcttccgggtgggtgcctcgtgcgctctgtgagaagttcttccgggaccacggaggggtgatcgtgaacatcactgccaccctggggaaccgggggcaggcgctccagacgcgatgacgcggcacttggctgtggagtggggtccccaaaacatccgcgtcaacagcctcgcccctggccccatcagtggcacagaggggctccggcgactgggtggccctcaggccagcctgagcaccaaggtcactgccagcccgctgcagaggctggggaacaagaccgagatcgcccacagcgtgctctacctggccagccctctggcttcctacgtgacgggggccgtgctggtggccgatggcggggcatggttgacgttcccaaacggtgtcaaagggctgccggatttcgcatccttctctgctaagctctaggaatcttccggccgctgcttcctgccgcctcactcagcc

SEQ ID NO: 102552 - DNA, 1078 bp, Homo sapiens
  Payload ID: 12
  Gene Symbol: DECR2
  Gene Name: 2,4-dienoyl CoA reductase 2, peroxisomal
  ENST ID: ENST00000445291
  CDS Start-End: 39-284
tcccgcccgttgtccccgcagtccccgacgggagcgccatggcccagccgccgcccgacgtggagggggacgactgtctccccgcgtaccgccacctcttctgcccggacctgctgcgggacaaagtggccttcatcacaggaggcggctctgggattgggttccggattgctgagattttcatgcggcacggctgccatacggtgattgccagtaggagcctgccgcgagtgctgacgagatgggttttcaccacgttgaccaggctggtctcgaattcctgacctcaggtgatccgcccacctcagcctcccaaagtgccaggattacaggtgtgaaccactgtgcccggccggcacctcagcctcccaaagtgccaggattacaggtgtgaatcactgtgcccggccggcacctcagcctcccaaagtgccaggattacaggtgtgaaccactgtgcccagccggcaccaaaacttgcacctatcctaaatatggagcttcagtgccgccaggaagctggctggggccaccggccggcgctgcctccctctctctatggacgtccgagcgcccccagctgtcatggccgccgtggaccaggctctgaaggagtttggcagaatcgacattctcattaactgtgcggccgggaacttcctgtgccccgctggcgccttgtccttcaacgccttcaagaccgtgatggacatcgataccagcggcaccttcaatgtgtctcgtgtgctctatgagaagttcttccgggaccacggaggggtgatcgtgaacatcactgccaccctggggaaccgggggcaggcgctccaggtgcatgcaggctccgccaaggccgctgtggacgcgatgacgcggcacttggctgtggagtggggtccccaaaacatccgcgtcaacagcctcgcccctggccccatcagtggcacagaggggctccggcgactgggtggccctcaggccagcctgagcaccaaggtcactgccagcccgctgcagaggctggggaacaagaccgagatcgcccacagcgtgctctacctggccagccctctggctt

SEQ ID NO: 102553 - DNA, 1618 bp, Homo sapiens
  Payload ID: 12
  Gene Symbol: DECR2
  Gene Name: 2,4-dienoyl CoA reductase 2, peroxisomal
  Uniprot ID: Q9NUI1
  ENST ID: ENST00000439661
  CDS Start-End: 72-707
agctgcgcgccgggtcctggaggccgaggccgctcccgcccgttgtccccgcagtccccgacgggagcgccatggcccagccgccgcccgacgtggagggggacgactgtctccccgcgtaccgccacctcttctgcccggacctgctgcgggacaaagtggccttcatcacaggaggcggctctgggattgggttccggattgctgagattttcatgcgggcatctgaggaccagatgggacattgcagctccagtgggacctgcctagcaggggtagctacctttatggttattgtgggcaagcaacccccgaaccagaagagccgagaaaccaaagaacaaggcagacagatcccgtttgtctgtgtcaggcacggctgccatacggtgattgccagtaggagcctgccgcgagtgctgacggccgccaggaagctggctggggccaccggccggcgctgcctccctctctctatggacgtccgagcgcccccagctgtcatggccgccgtggaccaggctctgaaggagtttggcagaatcgacattctcattaactgctccagcagctcctgcggtctcccattctgcaggtgcggccgggaacttcctgtgccccgctggcgccttgtccttcaacgccttcaagaccgtgatggacatcgataccagcggcaccttcaatgtgtctcgtgtgctctatgagaagttcttccgggaccacggaggggtgatcgtgaacatcactgccaccctggggaaccgggggcaggcgctccaggtgcatgcaggctccgccaaggccgctgtggacgcgatgacgcggcacttggctgtggagtggggtccccaaaacatccgcgtcaacagcctcgcccctggccccatcagtggcacagaggggctccggcgactgggtggccctcaggccagcctgagcaccaaggtcactgccagcccgctgcagaggctggggaacaagaccgagatcgcccacagcgtgctctacctggccagccctctggcttcctacgtgacgggggccgtgctggtggccgatggcggggcatggttgacgttcccaaacggtgtcaaagggctgccggatttcgcatccttctctgctaagctctaggaatcttccggccgctgcttcctgccgcctcactcagccaggtggagagcaccaatctgaaccagcaatgcctgcagcccagcccctcctctgaacactcagctattactgcgctttccctccccacggccccaactccagggcaggagcaactggacagtgggcctggcccgtggagctgccacgcaggtgcctgagggccaggtgccacgcaggtgtctgaggaccaggtgccacgcaggtggtgggggtacagacaagatgctgggatgtcccctgccccatggtcaagggtgtcctgcctgcctgggtccagggcctgagggagccacatggatcccgagacttgtgttctcttggctgaaaacactgaggtgctcccatctgtgcgtggcccatgagctgggatggtcctccagctgcccacaaggtccgcccctctgtctctgcaccacctgtttgcataaacacactttgctac

SEQ ID NO: 102554 - DNA, 1012 bp, Homo sapiens
  Payload ID: 12
  Gene Symbol: DECR2
  Gene Name: 2,4-dienoyl CoA reductase 2, peroxisomal
  ENST ID: ENST00000424398
  CDS Start-End: 83-925
ggcgagttcgcagctgcgcgccgggtcctggaggccgaggccgctcccgcccgttgtccccgcagtccccgacgggagcgccatggcccagccgccgcccgacgtggagggggacgactgtctccccgcgtaccgccacctcttctgcccggacctgctgcgggacaaagtggccttcatcacaggaggcggctctgggattgggttccggattgctgagattttcatgcggcacggctgccatacggccgccaggaagctggctggggccaccggccggcgctgcctccctctctctatggacgtccgagcgcccccagctgtcatggccgccgtggaccaggctctgaaggagtttggcagaatcgacattctcattaactgtgcggccgggaacttcctgtgccccgctggcgccttgtccttcaacgccttcaagaccgtgatggacatcgataccagcggcaccttcaatgtgtctcgtgtgctctatgagaagttcttccgggaccacggaggggtgatcgtgaacatcactgccaccctggggaaccgggggcaggcgctccaggtgcatgcaggctccgccaaggccgctgtggacgcgatgacgcggcacttggctgtggagtggggtccccaaaacatccgcgtcaacagcctcgcccctggccccatcagtggcacagaggggctccggcgactgggtggccctcaggccagcctgagcaccaaggtcactgccagcccgctgcagaggctggggaacaagaccgagatcgcccacagcgtgctctacctggccagccctctggcttcctacgtgacgggggccgtgctggtggccgatggcggggcatggttgacgttcccaaacggtgtcaaagggctgccggatttcgcatccttctctgctaagctctaggaatcttccggccgctgcttcctgccgcctcactcagccaggtggagagcaccaatctgaaccagcaatgcctgcagcccagcccct

SEQ ID NO: 102555 - DNA, 1738 bp, Homo sapiens
  Payload ID: 12
  Gene Symbol: DECR2
  Gene Name: 2,4-dienoyl CoA reductase 2, peroxisomal
  ENST ID: ENST00000437024
  CDS Start-End: 50-295
gccgaggccgctcccgcccgttgtccccgcagtccccgacgggagcgccatggcccagccgccgcccgacgtggagggggacgactgtctccccgcgtaccgccacctcttctgcccggacctgctgcgggacaaagtggccttcatcacaggaggcggctctgggattgggttccggattgctgagattttcatgcggcacggctgccatacggtgattgccagtaggagcctgccgcgagtgctgacgagatgggttttcaccacgttgaccaggctggtctcgaattcctgacctcaggtgatccgcccacctcagcctcccaaagtgccaggattacaggtgtgaaccactgtgcccggccggcacctcagcctcccaaagtgccaggattacaggtgtgaaccactgtgcccagccggcaccaaaacttgcacctatcctaaatatggagcttcagtgccgccaggaagctggctggggccaccggccggcgctgcctccctctctctatggacgtccgagcgcccccagctgtcatggccgccgtggaccaggctctgaaggagtttggcagaatcgacattctcattaactgtgcggccgggaacttcctgtgccccgctggcgccttgtccttcaacgccttcaagaccgtgatggacatcgataccagcggcaccttcaatgtgtctcgtgtgctctatgagaagttcttccgggaccacggaggggtgatcgtgaacatcactgccaccctggggaaccgggggcaggcgctccaggtgcatgcaggctccgccaaggccgctgtggacgcgatgacgcggcacttggctgtggagtggggtccccaaaacatccgcgtcaacagcctcgcccctggccccatcagtggcacagaggggctccggcgactgggtggccctcaggccagcctgagcaccaaggtcactgccagcccgctgcagaggctggggaacaagaccgagatcgcccacagcgtgctctacctggccagccctctggcttcctacgtgacgggggccgtgctggtggccgatggcggggcatggttgacgttcccaaacggtgtcaaagggctgccggatttcgcatccttctctgctaagctctaggaatcttccggccgctgcttcctgccgcctcactcagccaggtggagagcaccaatctgaaccagcaatgcctgcagcccagcccctcctctgaacactcagctattactgcgctttccctccccacggccccaactccagggcaggagcaactggacagtgggcctggcccgtggagctgccacgcaggtgcctgagggccaggtgccacgcaggtgtctgaggaccaggtgccacgcaggtggtgggggtacagacaagatgctgggatgtcccctgccccatggtcaagggtgtcctgcctgcctgggtccagggcctgagggagccacatggatcccgagacttgtgttctcttggctgaaaacactgaggtgctcccatctgtgcgtggcccatgagctgggatggtcctccagctgcccacaaggtccgcccctctgtctctgcaccacctgtttgcataaacacactttgctacaatcttgctagtgcgttttcttaaaagataatctatttactgtaaaaataaattggactttgcaaaagcttttagaaggaaaagaaagaggattaaagagaattgctggtgatccta

SEQ ID NO: 102556 - DNA, 1615 bp, Homo sapiens; identical to SEQ ID NO: 102550
  Payload ID: 12
  Gene Symbol: DECR2
  Gene Name: 2,4-dienoyl CoA reductase 2, peroxisomal
  Uniprot ID: Q9NUI1
  ENST ID: ENST00000613476
  CDS Start-End: 139-1017

SEQ ID NO: 102557 - DNA, 352 bp, Homo sapiens
  Payload ID: 12
  Gene Symbol: DECR2
  Gene Name: 2,4-dienoyl CoA reductase 2, peroxisomal
  ENST ID: ENST00000627716
  CDS Start-End: 107-352
agtggggcggggctcccggttccaggcgagttcgcagctgcgcgccgggtcctggaggccgaggccgctcccgcccgttgtccccgcagtccccgacgggagcgccatggcccagccgccgcccgacgtggagggggacgactgtctccccgcgtaccgccacctcttctgcccggacctgctgcgggacaaagtggccttcatcacaggaggcggctctgggattgggttccggattgctgagattttcatgcggcacggctgccatacggtgattgccagtaggagcctgccgcgagtgctgacgagatgggttttcaccacgttgaccaggctggtctcgaattcctga

SEQ ID NO: 102558 - DNA, 352 bp, Homo sapiens; identical to SEQ ID NO: 102557
  Payload ID: 12
  Gene Symbol: DECR2
  Gene Name: 2,4-dienoyl CoA reductase 2, peroxisomal
  ENST ID: ENST00000630165
  CDS Start-End: 107-352

SEQ ID NO: 102559 - DNA, 1012 bp, Homo sapiens; identical to SEQ ID NO: 102554
  Payload ID: 12
  Gene Symbol: DECR2
  Gene Name: 2,4-dienoyl CoA reductase 2, peroxisomal
  ENST ID: ENST00000633596
  CDS Start-End: 83-925

SEQ ID NO: 102560 - DNA, 509 bp, Homo sapiens
  Payload ID: 12
  Gene Symbol: DECR2
  Gene Name: 2,4-dienoyl CoA reductase 2, peroxisomal
  ENST ID: ENST00000633923
  CDS Start-End: 82-509
gcgagttcgcagctgcgcgccgggtcctggaggccgaggccgctcccgcccgttgtccccgcagtccccgacgggagcgccatggcccagccgccgcccgacgtggagggggacgactgtctccccgcgtaccgccacctcttctgcccggacctgctgcgggacaaagtggccttcatcacaggaggcggctctgggattgggttccggattgctgagattttcatgcggatccaggtgcctgccagagggactggggagcggtcgaggattgccctggggggagtcaggacttcaaggcccctacaggccgccaggaagctggctggggccaccggccggcgctgcctccctctctctatggacgtccgagcgcccccagctgtcatggccgccgtggaccaggctctgaaggagtttggcagaatcgacattctcattaactgtgcggccgggaacttcctgtgccccgctggcgccttgtccttcaacgccttcaagaccgtgat

SEQ ID NO: 102561 - DNA, 1078 bp, Homo sapiens; identical to SEQ ID NO: 102552
  Payload ID: 12
  Gene Symbol: DECR2
  Gene Name: 2,4-dienoyl CoA reductase 2, peroxisomal
  ENST ID: ENST00000632042
  CDS Start-End: 39-284

SEQ ID NO: 102562 - DNA, 561 bp, Homo sapiens
  Payload ID: 12
  Gene Symbol: DECR2
  Gene Name: 2,4-dienoyl CoA reductase 2, peroxisomal
  ENST ID: ENST00000633624
  CDS Start-End: 4-249
gccatggcccagccgccgcccgacgtggagggggacgactgtctccccgcgtaccgccacctcttctgcccggacctgctgcgggacaaagtggccttcatcacaggaggcggctctgggattgggttccggattgctgagattttcatgcggcacggctgccatacggtgattgccagtaggagcctgccgcgagtgctgacgagatgggttttcaccacgttgaccaggctggtctcgaattcctgacctcaggtgatccgcccacctcagcctcccaaagtgccaggattacaggtgtgaaccactgtgcccggccggcacctcagcctcccaaagtgccaggattacaggtgtgaatcactgtgcccggccggcacctcagcctcccaaagtgccaggattacaggccgaggctgcagggctgctgtctgcctctttacctggcttctaggccgccaggaagctggctggggccaccggccggcgctgcctccctctctctatggacgtccgagcgcccccagctgtcatggccgccgtggaccaggctctgaagga

SEQ ID NO: 102563 - DNA, 762 bp, Homo sapiens
  Payload ID: 12
  Gene Symbol: DECR2
  Gene Name: 2,4-dienoyl CoA reductase 2, peroxisomal
  ENST ID: ENST00000633559
  CDS Start-End: 48-762
cgaggccgctcccgcccgttgtccccgcagtccccgacgggagcgccatggcccagccgccgcccgacgtggagggggacgactgtctccccgcgtaccgccacctcttctgcccggacctgctgcgggacaaagtggccttcatcacaggaggcggctctgggattgggttccggattgctgagattttcatgcggcacggctgccatacggtgattgccagtaggagcctgccgcgagtgctgacggccgccaggaagctggctggggccaccggccggcgctgcctccctctctctatggacgtccgagcgcccccagctgtcatggccgccgtggaccaggctctgaaggagtttggcagaatcgacattctcattaactgtgagtcggtgctgagtgaggctccagcagctcctgcggtctcccattctgcaggtgcggccgggaacttcctgtgccccgctggcgccttgtccttcaacgccttcaagaccgtgatggacatcgataccagcggcaccttcaatgtgtctcgtgtgctctatgagaagttcttccgggaccacggaggggtgatcgtgaacatcactgccaccctggggaaccgggggcaggcgctccaggtgcatgcaggctccgccaaggccgctgtggacgcgatgacgcggcacttggctgtggagtggggtccccaaaacatccgcgtcaacagcctcgcccctggccccatcagtggcacagaggggctccggcgactgg

SEQ ID NO: 102564 - DNA, 561 bp, Homo sapiens; identical to SEQ ID NO: 102562
  Payload ID: 12
  Gene Symbol: DECR2
  Gene Name: 2,4-dienoyl CoA reductase 2, peroxisomal
  ENST ID: ENST00000633025
  CDS Start-End: 4-249

SEQ ID NO: 102565 - DNA, 762 bp, Homo sapiens; identical to SEQ ID NO: 102563
  Payload ID: 12
  Gene Symbol: DECR2
  Gene Name: 2,4-dienoyl CoA reductase 2, peroxisomal
  ENST ID: ENST00000633348
  CDS Start-End: 48-762

SEQ ID NO: 102566 - DNA, 558 bp, Homo sapiens
  Payload ID: 12
  Gene Symbol: DECR2
  Gene Name: 2,4-dienoyl CoA reductase 2, peroxisomal
  ENST ID: ENST00000633148
  CDS Start-End: 80-328
gagttcgcagctgcgcgccgggtcctggaggccgaggccgctcccgcccgttgtccccgcagtccccgacgggagcgccatggcccagccgccgcccgacgtggagggggacgactgtctccccgcgtaccgccacctcttctgcccggacctgctgcgggacaaagtggccttcatcacaggaggcggctctgggattgggttccggattgctgagattttcatgcggcacggctgccatacggtgattgccagtaggagcctgccgcgagtgctgacggtgatccgcccacctcagcctcccaaagtgccaggattacaggtgtgaaccactgtgcccggccggcacctcagcctcccaaagtgccaggattacaggtgtgaaccactgtgcccagccggcaccaaaacttgcacctatcctaaatatggagcttcagtgtaagtggcctcccagagacatctttgactttttaaaaaatctagttattgggttctgggagggaccttcctgtttgggggtaatgtggccccaagaaagacctctgggctcacctg

SEQ ID NO: 102567 - DNA, 1738 bp, Homo sapiens; identical to SEQ ID NO: 102555
  Payload ID: 12
  Gene Symbol: DECR2
  Gene Name: 2,4-dienoyl CoA reductase 2, peroxisomal
  ENST ID: ENST00000633143
  CDS Start-End: 50-295

SEQ ID NO: 102568 - DNA, 509 bp, Homo sapiens; identical to SEQ ID NO: 102560
  Payload ID: 12
  Gene Symbol: DECR2
  Gene Name: 2,4-dienoyl CoA reductase 2, peroxisomal
  ENST ID: ENST00000631983
  CDS Start-End: 82-509

SEQ ID NO: 102569 - DNA, 1618 bp, Homo sapiens; identical to SEQ ID NO: 102553
  Payload ID: 12
  Gene Symbol: DECR2
  Gene Name: 2,4-dienoyl CoA reductase 2, peroxisomal
  Uniprot ID: Q9NUI1
  ENST ID: ENST00000631856
  CDS Start-End: 72-707

SEQ ID NO: 102570 - DNA, 721 bp, Homo sapiens; identical to SEQ ID NO: 102551
  Payload ID: 12
  Gene Symbol: DECR2
  Gene Name: 2,4-dienoyl CoA reductase 2, peroxisomal
  ENST ID: ENST00000632810
  CDS Start-End: 1-283

SEQ ID NO: 102571 - DNA, 558 bp, Homo sapiens; identical to SEQ ID NO: 102566
  Payload ID: 12
  Gene Symbol: DECR2
  Gene Name: 2,4-dienoyl CoA reductase 2, peroxisomal
  ENST ID: ENST00000631605
  CDS Start-End: 80-328

SEQ ID NO: 102572 - DNA, 4250 bp, Homo sapiens
  Payload ID: 13
  Gene Symbol: DHCR24
  Gene Name: 24-dehydrocholesterol reductase
  Uniprot ID: Q15392
  ENST ID: ENST00000371269
  CDS Start-End: 100-1650
cccgggctgtgggctacaggcgcagagcgggccaggcgcggagctggcggcagtgacaggaggcgcgaacccgcagcgcttaccgcgcggcgccgcaccatggagcccgccgtgtcgctggccgtgtgcgcgctgctcttcctgctgtgggtgcgcctgaaggggctggagttcgtgctcatccaccagcgctgggtgttcgtgtgcctcttcctcctgccgctctcgcttatcttcgatatctactactacgtgcgcgcctgggtggtgttcaagctcagcagcgctccgcgcctgcacgagcagcgcgtgcgggacatccagaagcaggtgcgggaatggaaggagcagggtagcaagaccttcatgtgcacggggcgccctggctggctcactgtctcactacgtgtcgggaagtacaagaagacacacaaaaacatcatgatcaacctgatggacattctggaagtggacaccaagaaacagattgtccgtgtggagcccttggtgaccatgggccaggtgactgccctgctgacctccattggctggactctccccgtgttgcctgagcttgatgacctcacagtggggggcttgatcatgggcacaggcatcgagtcatcatcccacaagtacggcctgttccaacacatctgcactgcttacgagctggtcctggctgatggcagctttgtgcgatgcactccgtccgaaaactcagacctgttctatgccgtaccctggtcctgtgggacgctgggtttcctggtggccgctgagatccgcatcatccctgccaagaagtacgtcaagctgcgtttcgagccagtgcggggcctggaggctatctgtgccaagttcacccacgagtcccagcggcaggagaaccacttcgtggaagggctgctctactccctggatgaggctgtcattatgacaggggtcatgacagatgaggcagagcccagcaagctgaatagcattggcaattactacaagccgtggttctttaagcatgtggagaactatctgaagacaaaccgagagggcctggagtacattcccttgagacactactaccaccgccacacgcgcagcatcttctgggagctccaggacattatcccctttggcaacaaccccatcttccgctacctctttggctggatggtgcctcccaagatctccctcctgaagctgacccagggtgagaccctgcgcaagctgtacgagcagcaccacgtggtgcaggacatgctggtgcccatgaagtgcctgcagcaggccctgcacaccttccaaaacgacatccacgtctaccccatctggctgtgtccgttcatcctgcccagccagccaggcctagtgcaccccaaaggaaatgaggcagagctctacatcgacattggagcatatggggagccgcgtgtgaaacactttgaagccaggtcctgcatgaggcagctggagaagtttgtccgcagcgtgcatggcttccagatgctgtatgccgactgctacatgaaccgggaggagttctgggagatgtttgatggctccttgtaccacaagctgcgagagaagctgggttgccaggacgccttccccgaggtgtacgacaagatctgcaaggccgccaggcactgagctggagcccgcctggagagacagacacgtgtgagtggtcaggcatcttcccttcactcaagcttggctgctttcctagatccacactttcaaagagaaacccctccagaactcccaccctgacagcccaacaccaccttcctcctggcttccagggggcagcccagtggaatggaaagaatgtgggatttggagtcagacaagcctgagtccagttccccgtttagaactcattagctgtgtgactctgggtgagtcccttaacccctctgagcccgggtctcttcattagttgaaagggatagtaatacctacttgcaggttgttgtcatctgagttgagcactggtcacattgaaggtgctgggtaagtggtagctcttgttgcttcccgttcagcgtcacatctgcagtggagcctgaaaaggctccacattaggtcacctgtgcacagccatggctggaatgatgaaggggatacgctggagttgccctgccatcgcctccatcagccagacgaggtcctcacaggagaaggacagctcttccccaccctgggatctcaggagggcagccacggagtggggaggccccagatgcgctgtgccaaagccaggtccgaggccaaagttctccctgccatccttggtgccgtcctgccccttcctccttcatgcctgggcctgcaggcccaccccagccaccactgagtccactcggagtgccctgtgttcctggagaaggcattccagggttgaatcttgtcccagcctcagcctgggacacctaggtggagagagtggtctccgctctgaattggatccaggggacctgggctcattcttcttggctcaccaaccctgcaggcctcatctttcccaaaacccactttgtcttggtgggagtgggtccgcgctgctctgcagcaggggctggggagtggacagcatcaggtgggaaagtggagtccaccctcatgtttctgtaggattctcaccgtggggctggaagaaaagagcatcgacttgatttctccaaccactcatccctctttttctttcttccaccactccccaccccagctgtagttaatttcagtgccttacaaatcctaagctcagagaaagttccatttccgttccagagggaagggaacctccctaggtccttccctggcttgttataacgcaaagcttggttgtttatgcaactctatcttaagaactgcccagcctcagctgaaaacccgaatctgagaaggaattgcgtcatgtaagggaagctggaattaagggagctgagccagtcatggttgtggcgtgtgagtcaggagacctaggtttcagcccctctctactgtcagcgagctgtgcaacgtgggcaagtcattgtcctctgagctgcagtttcctcatctgtcacatcgctacagacaagacctccctggaacccttctgattgtcttagacactgtggttgcaaaacccacggaaagcctcatttgtgtggaaagtcagaggaaaaatgatccagtggacacttggggattatctgtcattcaagatccttccttcaaccccaaggtcagctcccatctcatttccagaaaggctcatacctggcttgcagggaagcatctgtcttgtcattccaggtgccagaatcctctcagagtcattgaagggtgttcacccatcccacccaaggcttggcacactgccagtgtcttagcagggtcttgtgagggctgggggcatccaggcactcagaaggcaaaggaaccaccctacccatttggcctctggagggggcagaagaaagaaataaacctcatcctatattttacaaagcatgtgaattctggcattagctctcataggagacccatgtgcttccttgctcagtgcaaaactgatgattctacttgctgtagatgaatggttaacacgagctagttaaacagtgccattgttttgccagtgaagcctccaaccctaagccactgggacggtggccagagatgccagcagcctctgtcgcccttagtcatataaccaaaatccagaccttatccacaacccggggcttggaaaggaaggtattttggaatcacaccctccggttatgttgctccagtaaaatcttgcctggaaagaggcagtcttcttagcatggtgagctgagttcatggcttttttttgtagccagtcctgtccctggccatccatgtgatggttttggatggagttaaacttgatgccagtgggcagtgcatgtggaaagtatcagagtaaggctctcccctccagagccctgagtttcttggctgcatgaaggttttctttagaatcagaattgtagccagtttctttggccagaaggatgaatacttggatattactgaaagggaggggtggagatgggtgtggcagtgtatggtgtgtgatttttattttcttctttggtcatgggggccaaggagaaaggcatgaatcttccctgtcaggctcttacagccacaggcactgtgtctactgtctggaagacatgtccccatggctgtggggccgctgcttctgtttaaataaaagtggcctggaa

SEQ ID NO: 102573 - DNA, 863 bp, Homo sapiens
  Payload ID: 13
  Gene Symbol: DHCR24
  Gene Name: 24-dehydrocholesterol reductase
  ENST ID: ENST00000436604
  CDS Start-End: 1-463
ctccctcctgaagctgacccagggtgagaccctgcgcaagctgtacgagcagcaccacgtggtgcaggacatgctggtgcccatgaagtgcctgcagcaggccctgcacaccttccaaaacgacatccacgtctaccccatctggctgtgtccgttcatcctgcccagccagccaggcctagtgcaccccaaaggaaatgaggcagagctctacatcgacattggagcatatggggagccgcgtgtgaaacactttgaagccaggtcctgcatgaggcagctggagaagtttgtccgcagcgtgcatggcttccagatgctgtatgccgactgctacatgaaccgggaggagttctgggagatgtttgatggctccttgtaccacaagctgcgagagaagctgggttgccaggacgccttccccgaggtgtacgacaagatctgcaaggccgccaggcactgagctggagcccgcctggagagacagacacgtgattctcaccgtggggctggaagaaaagagcatcgacttgatttctccaaccactcatccctctttttctttcttccaccactccccaccccagctgtagttaatttcagtgccttacaaatcctaagctcagagaaagttccatttccgttccagagggaagggaacctccctaggtccttccctggcttgttataacgcaaagcttggttgtttatgcaactctatcttaagaactgcccagcctcagctgaaaacccgaatctgagaaggaattgcgtcatgtaagggaagctggaattaagggagctgagccagtcatggttgtggcgtgtgagtcaggagacctaggtttcagcccctctctact

SEQ ID NO: 102574 - DNA, 4153 bp, Homo sapiens
  Payload ID: 13
  Gene Symbol: DHCR24
  Gene Name: 24-dehydrocholesterol reductase
  ENST ID: ENST00000535035
  CDS Start-End: 272-1555
gctggcggcagtgacaggaggcgcgaacccgcagcgcttaccgcgcggcgccgcaccatggagcccgccgtgtcgctggccgtgtgcgcgctgctcttcctgctgtgggtgcgcctgaaggggctggagttcgcttatcttcgatatctactactacgtgcgcgcctgggtggtgttcaagctcagcagcgctccgcgcctgcacgagcagcgcgtgcgggacatccagaagcaggtgcgggaatggaaggagcagggtagcaagaccttcatgtgcacggggcgccctggctggctcactgtctcactacgtgtcgggaagtacaagaagacacacaaaaacatcatgatcaacctgatggacattctggaagtggacaccaagaaacagattgtccgtgtggagcccttggtgaccatgggccaggtgactgccctgctgacctccattggctggactctccccgtgttgcctgagcttgatgacctcacagtggggggcttgatcatgggcacaggcatcgagtcatcatcccacaagtacggcctgttccaacacatctgcactgcttacgagctggtcctggctgatggcagctttgtgcgatgcactccgtccgaaaactcagacctgttctatgccgtaccctggtcctgtgggacgctgggtttcctggtggccgctgagatccgcatcatccctgccaagaagtacgtcaagctgcgtttcgagccagtgcggggcctggaggctatctgtgccaagttcacccacgagtcccagcggcaggagaaccacttcgtggaagggctgctctactccctggatgaggctgtcattatgacaggggtcatgacagatgaggcagagcccagcaagctgaatagcattggcaattactacaagccgtggttctttaagcatgtggagaactatctgaagacaaaccgagagggcctggagtacattcccttgagacactactaccaccgccacacgcgcagcatcttctgggagctccaggacattatcccctttggcaacaaccccatcttccgctacctctttggctggatggtgcctcccaagatctccctcctgaagctgacccagggtgagaccctgcgcaagctgtacgagcagcaccacgtggtgcaggacatgctggtgcccatgaagtgcctgcagcaggccctgcacaccttccaaaacgacatccacgtctaccccatctggctgtgtccgttcatcctgcccagccagccaggcctagtgcaccccaaaggaaatgaggcagagctctacatcgacattggagcatatggggagccgcgtgtgaaacactttgaagccaggtcctgcatgaggcagctggagaagtttgtccgcagcgtgcatggcttccagatgctgtatgccgactgctacatgaaccgggaggagttctgggagatgtttgatggctccttgtaccacaagctgcgagagaagctgggttgccaggacgccttccccgaggtgtacgacaagatctgcaaggccgccaggcactgagctggagcccgcctggagagacagacacgtgtgagtggtcaggcatcttcccttcactcaagcttggctgctttcctagatccacactttcaaagagaaacccctccagaactcccaccctgacagcccaacaccaccttcctcctggcttccagggggcagcccagtggaatggaaagaatgtgggatttggagtcagacaagcctgagtccagttccccgtttagaactcattagctgtgtgactctgggtgagtcccttaacccctctgagcccgggtctcttcattagttgaaagggatagtaatacctacttgcaggttgttgtcatctgagttgagcactggtcacattgaaggtgctgggtaagtggtagctcttgttgcttcccgttcagcgtcacatctgcagtggagcctgaaaaggctccacattaggtcacctgtgcacagccatggctggaatgatgaaggggatacgctggagttgccctgccatcgcctccatcagccagacgaggtcctcacaggagaaggacagctcttccccaccctgggatctcaggagggcagccacggagtggggaggccccagatgcgctgtgccaaagccaggtccgaggccaaagttctccctgccatccttggtgccgtcctgccccttcctccttcatgcctgggcctgcaggcccaccccagccaccactgagtccactcggagtgccctgtgttcctggagaaggcattccagggttgaatcttgtcccagcctcagcctgggacacctaggtggagagagtggtctccgctctgaattggatccaggggacctgggctcattcttcttggctcaccaaccctgcaggcctcatctttcccaaaacccactttgtcttggtgggagtgggtccgcgctgctctgcagcaggggctggggagtggacagcatcaggtgggaaagtggagtccaccctcatgtttctgtaggattctcaccgtggggctggaagaaaagagcatcgacttgatttctccaaccactcatccctctttttctttcttccaccactccccaccccagctgtagttaatttcagtgccttacaaatcctaagctcagagaaagttccatttccgttccagagggaagggaacctccctaggtccttccctggcttgttataacgcaaagcttggttgtttatgcaactctatcttaagaactgcccagcctcagctgaaaacccgaatctgagaaggaattgcgtcatgtaagggaagctggaattaagggagctgagccagtcatggttgtggcgtgtgagtcaggagacctaggtttcagcccctctctactgtcagcgagctgtgcaacgtgggcaagtcattgtcctctgagctgcagtttcctcatctgtcacatcgctacagacaagacctccctggaacccttctgattgtcttagacactgtggttgcaaaacccacggaaagcctcatttgtgtggaaagtcagaggaaaaatgatccagtggacacttggggattatctgtcattcaagatccttccttcaaccccaaggtcagctcccatctcatttccagaaaggctcatacctggcttgcagggaagcatctgtcttgtcattccaggtgccagaatcctctcagagtcattgaagggtgttcacccatcccacccaaggcttggcacactgccagtgtcttagcagggtcttgtgagggctgggggcatccaggcactcagaaggcaaaggaaccaccctacccatttggcctctggagggggcagaagaaagaaataaacctcatcctatattttacaaagcatgtgaattctggcattagctctcataggagacccatgtgcttccttgctcagtgcaaaactgatgattctacttgctgtagatgaatggttaacacgagctagttaaacagtgccattgttttgccagtgaagcctccaaccctaagccactgggacggtggccagagatgccagcagcctctgtcgcccttagtcatataaccaaaatccagaccttatccacaacccggggcttggaaaggaaggtattttggaatcacaccctccggttatgttgctccagtaaaatcttgcctggaaagaggcagtcttcttagcatggtgagctgagttcatggcttttttttgtagccagtcctgtccctggccatccatgtgatggttttggatggagttaaacttgatgccagtgggcagtgcatgtggaaagtatcagagtaaggctctcccctccagagccctgagtttcttggctgcatgaaggttttctttagaatcagaattgtagccagtttctttggccagaaggatgaatacttggatattactgaaagggaggggtggagatgggtgtggcagtgtatggtgtgtgatttttattttcttctttggtcatgggggccaaggagaaaggcatgaatcttccctgtcaggctcttacagccacaggcactgtgtctactgtctggaagacatgtccccatggctgtggggccgctgcttctgtttaaataaaagtggcctgg

SEQ ID NO: 102575 - DNA, 1816 bp, Homo sapiens
  Payload ID: 14
  Gene Symbol: OAS1
  Gene Name: 2'-5'-oligoadenylate synthetase 1, 40/46kDa
  Uniprot ID: P00973
  ENST ID: ENST00000202917
  CDS Start-End: 264-1466
gcatttccagagcagagttcagagaaaggctgggctgcttgttgctggctaaaggacaaagggtaagtttcaggaagcagaagagtgagcagatgaaattcagcactgggatcaggggagtgtctgatttgcaaaaggaaagtgcaaagacagctcctcccttctgaggaaacgaaaccaacagcagtccaagctcagtcagcagaagagataaaagcaaacaggtctgggaggcagttctgttgccactctctctcctgtcaatgatggatctcagaaataccccagccaaatctctggacaagttcattgaagactatctcttgccagacacgtgtttccgcatgcaaatcaaccatgccattgacatcatctgtgggttcctgaaggaaaggtgcttccgaggtagctcctaccctgtgtgtgtgtccaaggtggtaaagggtggctcctcaggcaagggcaccaccctcagaggccgatctgacgctgacctggttgtcttcctcagtcctctcaccacttttcaggatcagttaaatcgccggggagagttcatccaggaaattaggagacagctggaagcctgtcaaagagagagagcattttccgtgaagtttgaggtccaggctccacgctggggcaacccccgtgcgctcagcttcgtactgagttcgctccagctcggggagggggtggagttcgatgtgctgcctgcctttgatgccctgggtcagttgactggcggctataaacctaacccccaaatctatgtcaagctcatcgaggagtgcaccgacctgcagaaagagggcgagttctccacctgcttcacagaactacagagagacttcctgaagcagcgccccaccaagctcaagagcctcatccgcctagtcaagcactggtaccaaaattgtaagaagaagcttgggaagctgccacctcagtatgccctggagctcctgacggtctatgcttgggagcgagggagcatgaaaacacatttcaacacagcccagggatttcggacggtcttggaattagtcataaactaccagcaactctgcatctactggacaaagtattatgactttaaaaaccccattattgaaaagtacctgagaaggcagctcacgaaacccaggcctgtgatcctggacccggcggaccctacaggaaacttgggtggtggagacccaaagggttggaggcagctggcacaagaggctgaggcctggctgaattacccatgctttaagaattgggatgggtccccagtgagctcctggattctgctggctgaaagcaacagtgcagacgatgagaccgacgatcccaggaggtatcagaaatatggttacattggaacacatgagtaccctcatttctctcatagacccagcacactccaggcagcatccaccccacaggcagaagaggactggacctgcaccatcctctgaatgccagtgcatcttgggggaaagggctccagtgttatctggaccagttccttcattttcaggtgggactcttgatccagagaggacaaagctcctcagtgagctggtgtataatccaggacagaacccaggtctcctgactcctggccttctatgccctctatcctatcatagataacattctccacagcctcacttcattccacctattctctgaaaatattccctgagagagaacagagagatttagataagagaatgaaattccagccttgactttcttctgtgcacctgatgggagggtaatgtctaatgtattatcaataacaataaaaataaagcaaatacca

SEQ ID NO: 102576 - DNA, 1684 bp, Homo sapiens
  Payload ID: 14
  Gene Symbol: OAS1
  Gene Name: 2'-5'-oligoadenylate synthetase 1, 40/46kDa
  Uniprot ID: P00973
  ENST ID: ENST00000445409
  CDS Start-End: 258-1502
ccagagcagagttcagagaaaggctgggctgcttgttgctggctaaaggacaaagggtaagtttcaggaagcagaagagtgagcagatgaaattcagcactgggatcaggggagtgtctgatttgcaaaaggaaagtgcaaagacagctcctcccttctgaggaaacgaaaccaacagcagtccaagctcagtcagcagaagagataaaagcaaacaggtctgggaggcagttctgttgccactctctctcctgtcaatgatggatctcagaaataccccagccaaatctctggacaagttcattgaagactatctcttgccagacacgtgtttccgcatgcaaatcaaccatgccattgacatcatctgtgggttcctgaaggaaaggtgcttccgaggtagctcctaccctgtgtgtgtgtccaaggtggtaaagggtggctcctcaggcaagggcaccaccctcagaggccgatctgacgctgacctggttgtcttcctcagtcctctcaccacttttcaggatcagttaaatcgccggggagagttcatccaggaaattaggagacagctggaagcctgtcaaagagagagagcattttccgtgaagtttgaggtccaggctccacgctggggcaacccccgtgcgctcagcttcgtactgagttcgctccagctcggggagggggtggagttcgatgtgctgcctgcctttgatgccctgggtcagttgactggcggctataaacctaacccccaaatctatgtcaagctcatcgaggagtgcaccgacctgcagaaagagggcgagttctccacctgcttcacagaactacagagagacttcctgaagcagcgccccaccaagctcaagagcctcatccgcctagtcaagcactggtaccaaaattgtaagaagaagcttgggaagctgccacctcagtatgccctggagctcctgacggtctatgcttgggagcgagggagcatgaaaacacatttcaacacagcccagggatttcggacggtcttggaattagtcataaactaccagcaactctgcatctactggacaaagtattatgactttaaaaaccccattattgaaaagtacctgagaaggcagctcacgaaacccaggcctgtgatcctggacccggcggaccctacaggaaacttgggtggtggagacccaaagggttggaggcagctggcacaagaggctgaggcctggctgaattacccatgctttaagaattgggatgggtccccagtgagctcctggattctgctgacccagcacactccaggcagcatccaccccacaggcagaagaggactggacctgcaccatcctctgaatgccagtgcatcttgggggaaagggctccagtgttatctggaccagttccttcattttcaggtgggactcttgatccagagaggacaaagctcctcagtgagctggtgtataatccaggacagaacccaggtctcctgactcctggccttctatgccctctatcctatcatagataacattctccacagcctcacttcattccacctattctctgaaaatattccctgagagagaacagagagatttagataagagaatgaaattccagccttgactttcttctgtgcacctgatgggagggtaatgtctaatgtattatc

SEQ ID NO: 102577 - DNA, 1990 bp, Homo sapiens
  Payload ID: 14
  Gene Symbol: OAS1
  Gene Name: 2'-5'-oligoadenylate synthetase 1, 40/46kDa
  Uniprot ID: P00973
  ENST ID: ENST00000452357
  CDS Start-End: 191-1285
gaagcagaagagtgagcagatgaaattcagcactgggatcaggggagtgtctgatttgcaaaaggaaagtgcaaagacagctcctcccttctgaggaaacgaaaccaacagcagtccaagctcagtcagcagaagagataaaagcaaacaggtctgggaggcagttctgttgccactctctctcctgtcaatgatggatctcagaaataccccagccaaatctctggacaagttcattgaagactatctcttgccagacacgtgtttccgcatgcaaatcaaccatgccattgacatcatctgtgggttcctgaaggaaaggtgcttccgaggtagctcctaccctgtgtgtgtgtccaaggtggtaaagggtggctcctcaggcaagggcaccaccctcagaggccgatctgacgctgacctggttgtcttcctcagtcctctcaccacttttcaggatcagttaaatcgccggggagagttcatccaggaaattaggagacagctggaagcctgtcaaagagagagagcattttccgtgaagtttgaggtccaggctccacgctggggcaacccccgtgcgctcagcttcgtactgagttcgctccagctcggggagggggtggagttcgatgtgctgcctgcctttgatgccctgggtcagttgactggcggctataaacctaacccccaaatctatgtcaagctcatcgaggagtgcaccgacctgcagaaagagggcgagttctccacctgcttcacagaactacagagagacttcctgaagcagcgccccaccaagctcaagagcctcatccgcctagtcaagcactggtaccaaaattgtaagaagaagcttgggaagctgccacctcagtatgccctggagctcctgacggtctatgcttgggagcgagggagcatgaaaacacatttcaacacagcccagggatttcggacggtcttggaattagtcataaactaccagcaactctgcatctactggacaaagtattatgactttaaaaaccccattattgaaaagtacctgagaaggcagctcacgaaacccaggcctgtgatcctggacccggcggaccctacaggaaacttgggtggtggagacccaaagggttggaggcagctggcacaagaggctgaggcctggctgaattacccatgctttaagaattgggatgggtccccagtgagctcctggattctgctggtgagacctcctgcttcctccctgccattcatccctgcccctctccatgaagcttgagacatatagctggagaccattctttccaaagaacttacctcttgccaaaggccatttatattcatatagtgacaggctgtgctccatattttacagtcattttggtcacaatcgagggtttctggaattttcacatcccttgtccagaattcattcccctaagagtaataataaataatctctaacaccatttattgactgtctgcttcgggctcaggttctgtcctaagccctttaatatgcactctctcattaaatagtcacaacaatcccatgaggcatttttaaaaattttttattattttagattcagagggcacatgtgccatttgttacacagctatattgtgtaatggtggggtttgggcctctattgatcctgtcgcccaaatagtgaacagagtacccaaaaagaattttttcaacctttgcctttctcccttcctcctccctgttggagtccctagtgtctattgttcccatctttagcagatgttaagtatttgattttctgtttctgggttaattcacttcggataatggcctccagctgcaaccatgatttcattctttcttatggctgcataatactccatggtgtagatataccacactttctttatccagttcacactgatgggcacttaagttgattccatgactttgctattgtgaatcgtactgcgataaacatacgagtgccgg

SEQ ID NO: 102578 - DNA, 664 bp, Homo sapiens
  Payload ID: 14
  Gene Symbol: OAS1
  Gene Name: 2'-5'-oligoadenylate synthetase 1, 40/46kDa
  ENST ID: ENST00000553185
  CDS Start-End: 3-536
caatgatggatctcagaaataccccagccaaatctctggacaagttcattgaagactatctcttgccagacacgtgtttccgcatgcaaatcaaccatgccattgacatcatctgtgggttcctgaaggaaaggtgcttccgaggtagctcctaccctgtgtgtgtgtccaaggtggtaaagggtggctcctcaggcaagggcaccaccctcagaggccgatctgacgctgacctggttgtcttcctcagtcctctcaccacttttcaggatcagttaaatcgccggggagagttcatccaggaaattaggagacagctggaagcctgtcaaagagagagagcattttccgtgaagtttgaggtccaggctccacgctggggcaacccccgtgcgctcagcttcgtactgagttcgctccagctcggggagggggtggagttcgatgtgctgcctgcctttgatgccctgggtgagagctcccagcttctttttctccctcttcccatttctgagcagaaatctcccacagtttgagagctttttgccccaacagggcatctctctaaagcagggtgggaggagatcttaggatctgtcccggggcaagaatgaatacggtcatgatctatcacaggagagacattaaacagcaaattggcata

SEQ ID NO: 102579 - DNA, 950 bp, Homo sapiens
  Payload ID: 14
  Gene Symbol: OAS1
  Gene Name: 2'-5'-oligoadenylate synthetase 1, 40/46kDa
  ENST ID: ENST00000550689
  CDS Start-End: 1-909
agaaataccccagccaaatctctggacaagttcattgaagactatctcttgccagacacgtgtttccgcatgcaaatcaaccatgccattgacatcatctgtgggttcctgaaggaaaggtgcttccgaggtagctcctaccctgtgtgtgtgtccaaggtggtaaagggtggctcctcaggcaagggcaccaccctcagaggccgatctgacgctgacctggttgtcttcctcagtcctctcaccacttttcaggatcagttaaatcgccggggagagttcatccaggaaattaggagacagctggaagcctgtcaaagagagagagcattttccgtgaagtttgaggtccaggctccacgctggggcaacccccgtgcgctcagcttcgtactgagttcgctccagctcggggagggggtggagttcgatgtgctgcctgcctttgatgccctgggtcagttgactggcggctataaacctaacccccaaatctatgtcaagctcatcgaggagtgcaccgacctgcagaaagagggcgagttctccacctgcttcacagaactacagagagacttcctgaagcagcgccccaccaagctcaagagcctcatccgcctagtcaagcactggtaccaaaattgtaagaagaagcttgggaagctgccacctcagtatgccctggagctcctgacggtctatgcttgggagcgagggagcatgaaaacacatttcaacacagcccagggatttcggacggtcttggaattagtcataaactaccagcaactctgcatctactggacaaagtattatgactttaaaaaccccattattgaaaagtacctgagaaggcagctcacgaaacccaggtatgctatccccacatggcttagctcccctatgtaaatgaacacctggatacaggtacagtgccttggaaatggagg

SEQ ID NO: 102580 - DNA, 2416 bp, Homo sapiens
  Payload ID: 14
  Gene Symbol: OAS1
  Gene Name: 2'-5'-oligoadenylate synthetase 1, 40/46kDa
  ENST ID: ENST00000551241
  CDS Start-End: 34-1116
gaggcagttctgttgccactctctctcctgtcaatgatggatctcagaaataccccagccaaatctctggacaagttcattgaagactatctcttgccagacacgtgtttccgcatgcaaatcaaccatgccattgacatcatctgtgggttcctgaaggaaaggtgcttccgaggtagctcctaccctgtgtgtgtgtccaaggtggtaaagggtggctcctcaggcaagggcaccaccctcagaggccgatctgacgctgacctggttgtcttcctcagtcctctcaccacttttcaggatcagttaaatcgccggggagagttcatccaggaaattaggagacagctggaagcctgtcaaagagagagagcattttccgtgaagtttgaggtccaggctccacgctggggcaacccccgtgcgctcagcttcgtactgagttcgctccagctcggggagggggtggagttcgatgtgctgcctgcctttgatgccctgggtcagttgactggcggctataaacctaacccccaaatctatgtcaagctcatcgaggagtgcaccgacctgcagaaagagggcgagttctccacctgcttcacagaactacagagagacttcctgaagcagcgccccaccaagctcaagagcctcatccgcctagtcaagcactggtaccaaaattgtaagaagaagcttgggaagctgccacctcagtatgccctggagctcctgacggtctatgcttgggagcgagggagcatgaaaacacatttcaacacagcccagggatttcggacggtcttggaattagtcataaactaccagcaactctgcatctactggacaaagtattatgactttaaaaaccccattattgaaaagtacctgagaaggcagctcacgaaacccaggcctgtgatcctggacccggcggaccctacaggaaacttgggtggtggagacccaaagggttggaggcagctggcacaagaggctgaggcctggctgaattacccatgctttaagaattgggatgggtccccagtgagctcctggattctgctggtaaacctcacactggttggcagaaggaactataccaataattagtgaacatgcggtgaatttgcaacagacaagaggagcctcattatcctatagtttccaggttgcttagggaggcagaaatcacagcaaggaaaaccttcaataataaacagacgtctcataaaattaattgcaacccaacctctctctctacttaaaattagcatctatttccagctctgctttcaatgccccatatgaatacatgtgaactccctccctctcttcctccctgtctccttctctctctctctgtccctcattaaaaaataaaatttaagaaaaaaatacaaggtagatttacacaaatagtgggatctcagtcttgagttagctgtgtatgactgaaaaggatgctgtggttaataattatcataaaaacaatgacatggccgggcacagtggctcacgcctgtaatcccagaactttgggaggccgaggcaggcagatcacttgaggccaggagtttgagaccagcctggccaacatggtgaaactgcatctctactaaaaatacaaaaattagccgggcatcaatggccagcccctgtaatcccagctaatcaggagtctgaggcaggcgaatcacttgaacctgggggctggtggttgcagtgagccgagctcacaccactgcactccagcctgggcgacagagtgagactacatctcaaaaaaacaaaaacaaacaagcaaaaaaaaccccacagtaacacaaaagtaataaaactgctgctatttactcagtgcttatctgatgccagccactttgctaagcctatgaatgcattatttccccgttgctacagatgagagaattgaggttcagacaggttgaaatcattgctcccaaagtcacacaactggtgagtggcagagctgggatgcaaaccctaaactgccagccctcaaagcctgtgctcttaatctccaccctgctgtgcttccttgtccatttaattaagctccacaggcacacattccacgccctcctttgctgtacaatcccaggcaagtcgctcagcttctctgagcctcagtttcataatctgtcaaatggaggtaacacaaataattcctagttgtgaccaagaatcatcatagaaatctgccatttccagcctattgtgcaattcctcaagcactgtgactccaagtggcatcagctcctggaagaacacactgtcttactgttgtttcctcctttgtcaactgatccccccttgaacctcactctacctctgctctcaatgccccatctactgccacctgattaaataaaatcttttttgaaaatcataa

SEQ ID NO: 102581 - DNA, 890 bp, Homo sapiens
  Payload ID: 14
  Gene Symbol: OAS1
  Gene Name: 2'-5'-oligoadenylate synthetase 1, 40/46kDa
  ENST ID: ENST00000553152
  CDS Start-End: 1-393
tttcggacggtcttggaattagtcataaactaccagcaactctgcatctactggacaaagtattatgactttaaaaaccccattattgaaaagtacctgagaaggcagctcacgaaacccaggcctgtgatcctggacccggcggaccctacaggaaacttgggtggtggagacccaaagggttggaggcagctggcacaagaggctgaggcctggctgaattacccatgctttaagaattgggatgggtccccagtgagctcctggattctgctgatgagacaaaggctcagagaggtgaggtcacttgctcaaggacatcagctaacaagtggtggaaatggaattcaagctcagtggactctaaagccagtgctcatgtcactgtgctaaacagcctgccttgtcacatccccacctctcatctgaccaatgggagactctgagcagctgagtgacttgggttgtcacacagctaaacaggggcaaaggacccagtcttggatctttccacctccaagcaggaatctgtctgattccaggggattgatgatgttgcagatggctaggaagcagactccaggatggaatttagtatgcaggatgttctgggggagagccactggaaccagcactcagggaaaggggggaagaaaggataggaaggaagcatgaaagagaatagggagaagtgaacagggatgcagagcgaatgccagtttcagccaactccaaggacagccctggagctggaatggcctttagagctgccccatggtgacagaggtggccaggcttctatacccctacgtggatcactcactgtgcttgggcaccttgggaaagggcatggctttgagcaaaaggctctctgcagctgaggcaacccc

SEQ ID NO: 102582 - DNA, 324 bp, Homo sapiens
  Payload ID: 14
  Gene Symbol: OAS1
  Gene Name: 2'-5'-oligoadenylate synthetase 1, 40/46kDa
  ENST ID: ENST00000550883
  CDS Start-End: 75-324
caagctcagtcagcagaagagataaaagcaaacaggtctgggaggcagttctgttgccactctctctcctgtcaatgatggatctcagaaataccccagccaaatctctggacaagttcattgaagactatctcttgccagacacgtgtttccgcatgcaaatcaaccatgccattgacatcatctgtgggttcctgaaggaaaggtgcttccgaggtagctcctaccctgtgtgtgtgtccaaggtggtaaagtgtaagaagaagcttgggaagctgccacctcagtatgccctggagctcctgacggtctatgcttgggagc

SEQ ID NO: 102583 - DNA, 395 bp, Homo sapiens
  Payload ID: 14
  Gene Symbol: OAS1
  Gene Name: 2'-5'-oligoadenylate synthetase 1, 40/46kDa
  ENST ID: ENST00000540589
  CDS Start-End: 1-68
gacccagcacactccaggcagcatccaccccacaggcagaagaggactggacctgcaccatcctctgaatgccagtgcatcttgggggaaagggctccagtgttatctggaccagttccttcattttcaggtaaacctcacactggttggcagaaggaactataccaataattagtgaacatgcggtgaatttgcaacagacaagaggagcctcattatcctatagtttccaggttgcttagggaggcagaaatcacagcaaggaaaaccttcaataataaacagacgtctcataaaattaattgcaacccaacctctctctctacttaaaattagcatctatttccagctctgctttcaatgccccatatgaatacatgtgaactccctccctc

SEQ ID NO: 102584 - DNA, 309 bp, Homo sapiens
  Payload ID: 14
  Gene Symbol: OAS1
  Gene Name: 2'-5'-oligoadenylate synthetase 1, 40/46kDa
  ENST ID: ENST00000552526
  CDS Start-End: 1-48
gctgaaagcaacagtgcagacgatgagaccgacgatcccaggaggtaaacctcacactggttggcagaaggaactataccaataattagtgaacatgcggtgaatttgcaacagacaagaggagcctcattatcctatagtttccaggttgcttagggaggcagaaatcacagcaaggaaaaccttcaataataaacagacgtctcataaaattaattgcaacccaacctctctctctacttaaaattagcatctatttccagctctgctttcaatgccccatatgaatacatgtgaactccctccctc

SEQ ID NO: 102585 - DNA, 3613 bp, Homo sapiens
  Payload ID: 15
  Gene Symbol: OAS2
  Gene Name: 2'-5'-oligoadenylate synthetase 2, 69/71kDa
  Uniprot ID: P29728
  ENST ID: ENST00000342315
  CDS Start-End: 215-2374
agttggtaaactcactgcaaggggcagggcagagcctctgagcttaagttagttttgtttccctgtcccggatacaagagttggtaagctcgctgcagtgggtggagagaggcctctagacttcagtttcagtttcctggctctgggcagcagcaagaattcctctgcctcccatcctaccattcactgtcttgccggcagccagctgagagcaatgggaaatggggagtcccagctgtcctcggtgcctgctcagaagctgggttggtttatccaggaatacctgaagccctacgaagaatgtcagacactgatcgacgagatggtgaacaccatctgtgacgtcctgcaggaacccgaacagttccccctggtgcagggagtggccataggtggctcctatggacggaaaacagtcttaagaggcaactccgatggtacccttgtcctcttcttcagtgacttaaaacaattccaggatcagaagagaagccaacgtgacatcctcgataaaactggggataagctgaagttctgtctgttcacgaagtggttgaaaaacaatttcgagatccagaagtcccttgatgggttcaccatccaggtgttcacaaaaaatcagagaatctctttcgaggtgctggccgccttcaacgctctgagcttaaatgataatcccagcccctggatctatcgagagctcaaaagatccttggataagacaaatgccagtcctggtgagtttgcagtctgcttcactgaactccagcagaagttttttgacaaccgtcctggaaaactaaaggatttgatcctcttgataaagcactggcatcaacagtgccagaaaaaaatcaaggatttaccctcgctgtctccgtatgccctggagctgcttacggtgtatgcctgggaacaggggtgcagaaaagacaactttgacattgctgaaggcgtcagaaccgtactggagctgatcaaatgccaggagaagctgtgtatctattggatggtcaactacaactttgaagatgagaccatcaggaacatcctgctgcaccagctccaatcagcgaggccagtaatcttggatccagttgacccaaccaataatgtgagtggagataaaatatgctggcaatggctgaaaaaagaagctcaaacctggttgacttctcccaacctggataatgagttacctgcaccatcttggaatgttctgcctgcaccactcttcacgaccccaggccaccttctggataagttcatcaaggagtttctccagcccaacaaatgcttcctagagcagattgacagtgctgttaacatcatccgtacattccttaaagaaaactgcttccgacaatcaacagccaagatccagattgtccggggaggatcaaccgccaaaggcacagctctgaagactggctctgatgccgatctcgtcgtgttccataactcacttaaaagctacacctcccaaaaaaacgagcggcacaaaatcgtcaaggaaatccatgaacagctgaaagccttttggagggagaaggaggaggagcttgaagtcagctttgagcctcccaagtggaaggctcccagggtgctgagcttctctctgaaatccaaagtcctcaacgaaagtgtcagctttgatgtgcttcctgcctttaatgcactgggtcagctgagttctggctccacacccagccccgaggtttatgcagggctcattgatctgtataaatcctcggacctcccgggaggagagttttctacctgtttcacagtcctgcagcgaaacttcattcgctcccggcccaccaaactaaaggatttaattcgcctggtgaagcactggtacaaagagtgtgaaaggaaactgaagccaaaggggtctttgcccccaaagtatgccttggagctgctcaccatctatgcctgggagcaggggagtggagtgccggattttgacactgcagaaggtttccggacagtcctggagctggtcacacaatatcagcagctctgcatcttctggaaggtcaattacaactttgaagatgagaccgtgaggaagtttctactgagccagttgcagaaaaccaggcctgtgatcttggacccagccgaacccacaggtgacgtgggtggaggggaccgttggtgttggcatcttctggcaaaagaagcaaaggaatggttatcctctccctgcttcaaggatgggactggaaacccaataccaccttggaaagtgccgacaatgcagacaccaggaagttgtggagctaggatccatcctattgtcaatgagatgttctcatccagaagccatagaatcctgaataataattctaaaagaaacttctagagatcatctggcaatcgcttttaaagactcggctcaccgtgagaaagagtcactcacatccattcttcccttgatggtccctattcctccttcccttgcttcttggacttcttgaaatcaatcaagactgcaaaccctttcataaagtcttgccttgctgaactccctctctgcaggcagcctgcctttaaaaatagttgctgtcatccactttatgtgcatcttatttctgtcaacttgtattttttttcttgtatttttccaattagctcctcctttttccttccagtctaaaaaaggaatcctctgtgtcttcaaagcaaagctctttactttccccttggttctcataactctgtgatcttgctctcggtgcttccaactcatccacgtcctgtctgtttcctctgtatacaaaaccctttctgcccctgctgacacagacatcctctatgccagcagccagccaaccctttcattagaacttcaagctctccaaaggctcagattataactgttgtcatatttatatgaggctgttgtcttttccttctgagcctgcctttctcccccccacccaggagtatcctcttgccaaatcaaaagactttttccttgggctttagccttaaagatacttgaaggtctaggtgctttaacctcacataccctcacttaaacttttatcactgttgcatataccagttgtgatacaataaagaatgtatctggattttgtgcctagttcctagcacacagcttcaaaaattctagagtttcctgataggagtgtcttttgtattcataacaagcccttttcacccatgcctgggtttatgctaacaaggttacccatggtgggcccttagtttcaaggaaggagttggccaagccagaaagaccaagcatgtggttaaagcattggaattttcagccccatcccacccccaatctccaaggaggtgatggggctggaaattgagttcaattttaacatggccagtgatttaagcaatgctgcctatgtaaagaaaccccaataaaaactctggacagtgaggcttggggagcttcctgattggcagacattccaatgtactaggaaggtagcgcatcttgattccacagggacaaaggctcctgagctctgggcccttccagtgcttgccaccctacatactctttgtctggctcttcatttgtattctttataataaaatggtgattgtaagtagagca

SEQ ID NO: 102586 - DNA, 4734 bp, Homo sapiens
  Payload ID: 15
  Gene Symbol: OAS2
  Gene Name: 2'-5'-oligoadenylate synthetase 2, 69/71kDa
  Uniprot ID: P29728
  ENST ID: ENST00000392583
  CDS Start-End: 208-2271
aaactcactgcaaggggcagggcagagcctctgagcttaagttagttttgtttccctgtcccggatacaagagttggtaagctcgctgcagtgggtggagagaggcctctagacttcagtttcagtttcctggctctgggcagcagcaagaattcctctgcctcccatcctaccattcactgtcttgccggcagccagctgagagcaatgggaaatggggagtcccagctgtcctcggtgcctgctcagaagctgggttggtttatccaggaatacctgaagccctacgaagaatgtcagacactgatcgacgagatggtgaacaccatctgtgacgtcctgcaggaacccgaacagttccccctggtgcagggagtggccataggtggctcctatggacggaaaacagtcttaagaggcaactccgatggtacccttgtcctcttcttcagtgacttaaaacaattccaggatcagaagagaagccaacgtgacatcctcgataaaactggggataagctgaagttctgtctgttcacgaagtggttgaaaaacaatttcgagatccagaagtcccttgatgggttcaccatccaggtgttcacaaaaaatcagagaatctctttcgaggtgctggccgccttcaacgctctgagcttaaatgataatcccagcccctggatctatcgagagctcaaaagatccttggataagacaaatgccagtcctggtgagtttgcagtctgcttcactgaactccagcagaagttttttgacaaccgtcctggaaaactaaaggatttgatcctcttgataaagcactggcatcaacagtgccagaaaaaaatcaaggatttaccctcgctgtctccgtatgccctggagctgcttacggtgtatgcctgggaacaggggtgcagaaaagacaactttgacattgctgaaggcgtcagaaccgtactggagctgatcaaatgccaggagaagctgtgtatctattggatggtcaactacaactttgaagatgagaccatcaggaacatcctgctgcaccagctccaatcagcgaggccagtaatcttggatccagttgacccaaccaataatgtgagtggagataaaatatgctggcaatggctgaaaaaagaagctcaaacctggttgacttctcccaacctggataatgagttacctgcaccatcttggaatgttctgcctgcaccactcttcacgaccccaggccaccttctggataagttcatcaaggagtttctccagcccaacaaatgcttcctagagcagattgacagtgctgttaacatcatccgtacattccttaaagaaaactgcttccgacaatcaacagccaagatccagattgtccggggaggatcaaccgccaaaggcacagctctgaagactggctctgatgccgatctcgtcgtgttccataactcacttaaaagctacacctcccaaaaaaacgagcggcacaaaatcgtcaaggaaatccatgaacagctgaaagccttttggagggagaaggaggaggagcttgaagtcagctttgagcctcccaagtggaaggctcccagggtgctgagcttctctctgaaatccaaagtcctcaacgaaagtgtcagctttgatgtgcttcctgcctttaatgcactgggtcagctgagttctggctccacacccagccccgaggtttatgcagggctcattgatctgtataaatcctcggacctcccgggaggagagttttctacctgtttcacagtcctgcagcgaaacttcattcgctcccggcccaccaaactaaaggatttaattcgcctggtgaagcactggtacaaagagtgtgaaaggaaactgaagccaaaggggtctttgcccccaaagtatgccttggagctgctcaccatctatgcctgggagcaggggagtggagtgccggattttgacactgcagaaggtttccggacagtcctggagctggtcacacaatatcagcagctctgcatcttctggaaggtcaattacaactttgaagatgagaccgtgaggaagtttctactgagccagttgcagaaaaccaggcctgtgatcttggacccagccgaacccacaggtgacgtgggtggaggggaccgttggtgttggcatcttctggcaaaagaagcaaaggaatggttatcctctccctgcttcaaggatgggactggaaacccaataccaccttggaaagtgccggtaaaagtcatctaaaggaggcgttgtctggaaatagccctgtaacaggcttgaatcaaagaacttctcctactgtagcaacctgaaattaactcagacacaaataaaggaaacccagctcacaggagcttaaacagctggtcagccccctaagcccccactacaagtgatcctcaggcaggtaaccccagattcatgcactgtagggtgctgcgcagcatccctagtctctacccagtagatgccactagccctcctctcccagtgacaaccaaaagtcttcagacattgtcaaacgttcccctgggttcacagatctttctgcctttggcttttggctccaccctctttagctgttaatttgagtacttatggccctgaaagcggccacggtgcctccagatggcaggtttgcaatccaagcaggaagaaggaaaagatacccaaaggtcaagaacacagtgattttattagaagtttcatccgcaaattttcttccatttcattgctcagaaatgtcatgtggctacctgtaacttgaaggtggctacaaagatgactgtggacgtgggttgcactggccacccaaggatgtctgccacacctctccaaagccctccctacctaccaagatatacctgatatattccaccaggatatcctccctccagatatacttggttctctccaccaggttctttctttaaagcaggatttctcaactttgatacttactcacatttggggctagacagttctttgtttggaggctctcttgtgcattgtaggatgttgagcagcatctctggcctgtacccagtagatgccacccagttgtgacaattaaaagtgtcttgagactttatcatgtgtcttctgccctaggtgagaacccttgcactagaggaaccctacaccccaaccctggggggaatgtagggaagaggtggccaagccaaccgtggggttagctctaattattaagatatgcattataaataaataccaaaaaattgtctctggcaatagttaccttcccagatacaggtccccccttttttcccctaactcttttaagcaatgattgtaactattaggagacattgctctcccacgtatgtttttctttttagacaatgcagacaccaggaagttgtggagctaggatccatcctattgtcaatgagatgttctcatccagaagccatagaatcctgaataataattctaaaagaaacttctagagatcatctggcaatcgcttttaaagactcggctcaccgtgagaaagagtcactcacatccattcttcccttgatggtccctattcctccttcccttgcttcttggacttcttgaaatcaatcaagactgcaaaccctttcataaagtcttgccttgctgaactccctctctgcaggcagcctgcctttaaaaatagttgctgtcatccactttatgtgcatcttatttctgtcaacttgtattttttttcttgtatttttccaattagctcctcctttttccttccagtctaaaaaaggaatcctctgtgtcttcaaagcaaagctctttactttccccttggttctcataactctgtgatcttgctctcggtgcttccaactcatccacgtcctgtctgtttcctctgtatacaaaaccctttctgcccctgctgacacagacatcctctatgccagcagccagccaaccctttcattagaacttcaagctctccaaaggctcagattataactgttgtcatatttatatgaggctgttgtcttttccttctgagcctgcctttctcccccccacccaggagtatcctcttgccaaatcaaaagactttttccttgggctttagccttaaagatacttgaaggtctaggtgctttaacctcacataccctcacttaaacttttatcactgttgcatataccagttgtgatacaataaagaatgtatctggattttgtgcctagttcctagcacacagcttcaaaaattctagagtttcctgataggagtgtcttttgtattcataacaagcccttttcacccatgcctgggtttatgctaacaaggttacccatggtgggcccttagtttcaaggaaggagttggccaagccagaaagaccaagcatgtggttaaagcattggaattttcagccccatcccacccccaatctccaaggaggtgatggggctggaaattgagttcaattttaacatggccagtgatttaagcaatgctgcctatgtaaagaaaccccaataaaaactctggacagtgaggcttggggagcttcctgattggcagacattccaatgtactaggaaggtagcgcatcttgattccacagggacaaaggctcctgagctctgggcccttccagtgcttgccaccctacatactctttgtctggctcttcatttgtattctttataataaaatggtgattgtaagta

SEQ ID NO: 102587 - DNA, 2072 bp, Homo sapiens
  Payload ID: 15
  Gene Symbol: OAS2
  Gene Name: 2'-5'-oligoadenylate synthetase 2, 69/71kDa
  Uniprot ID: P29728
  ENST ID: ENST00000449768
  CDS Start-End: 128-646
gctcgctgcagtgggtggagagaggcctctagacttcagtttcagtttcctggctctgggcagcagcaagaattcctctgcctcccatcctaccattcactgtcttgccggcagccagctgagagcaatgggaaatggggagtcccagctgtcctcggtgcctgctcagaagctgggttggtttatccaggaatacctgaagccctacgaagaatgtcagacactgatcgacgagatggtgaacaccatctgtgacgtcctgcaggaacccgaacagttccccctggtgcagggagtggccataggtggctcctatggacggaaaacagtcttaagaggcaactccgatggtacccttgtcctcttcttcagtgacttaaaacaattccaggatcagaagagaagccaacgtgacatcctcgataaaactggggataagctgaagttctgtctgttcacgaagtggttgaaaaacaatttcgagatccagaagtcccttgatgggttcaccatccaggtgttcacaaaaaatcagagaatctctttcgaggtgctggccgccttcaacgctctgagtaagcattgctgggtgtcaggagagaaaagccaaagaagcgggtgccagacagctctgtgcaacctctaggccatgagtgggatagataccactgctgctttaaaaaatgggagaccatagaccctcaggagagaagaatcccttctaccctggactcgctctcttctctggaactaacttctcccccataccctgattgtctttggagaaaatgttctggattctagaatctaaggcagagccttttaagccatactgtacacataaatcacctggaaccttgttaaaatgcagatcctgactcaggaggtctgagttagagcccaggatttcatatttctagccagctccatgatgagctgctggtccgcagatcatgcttgcaggttttgaccagagtcagtgttggttagagtaagaggatgaggcagacatctgggaaaagtccagctggggcaagcatttgaagtctgccttcctaccaggtcaaaatcaaggcaacgaccttccatagataactatcaaagcttgagggggtgccttgaacccaactcctaaatccctaagacctgcccacctcttgtgtctcctgtctcagcaaacattcccacactcttgcatattgttaaagtaacctctgcttaccaggcttctggtttaataaaagatggctagagtgactccatcttaaagcaagtagctaggcactcaaaaggaacctacaggcttaatacttgggtctgaaaatagccacagtctaagctgaccaccaattataattgcagaatatttaaggccatacaaaacatctcccactaagcctacaaaatgtccaggtgtcctaaaagttcagcccacttaaaggcagcattaatgagcaggtttaggttgaaggattaatggtcatcaataccactgttaagaagaaaattcttggccaaattgaatttaatggagtttaactgagcagacaattcacaaatctagaagcctcctgagccagagtaggttcagagagtcttgaacacagccacgtggtggaagaagatttatggacaggaaaaggaaaatgatgtactgaaaatgaaagtgaggtacagaaacagccagactggttatagctcagcattggccttatttgaacgagatttgaacagttggccacctttgattggccgaaactcagtgattggcacaagagtaggttgcagtctgtttacacatccttttaggttatagttcaccatgtacagagaaattttaggccaaacttaaaatatgtaaggaggcagctttaggctaaacttgatttaacagcaccaataccccctacctttagtgagcacatctgcacattccaattttaatgacagctccttagaatttcttatcaacgaagacactaacaaagaatggcgcattcctccttctcctttctgaggatgccctaccctgtaacaaagtcgtttctaataaatttgcttctttcaccata

SEQ ID NO: 102588 - DNA, 879 bp, Homo sapiens
  Payload ID: 15
  Gene Symbol: OAS2
  Gene Name: 2'-5'-oligoadenylate synthetase 2, 69/71kDa
  ENST ID: ENST00000552756
  CDS Start-End: 70-879
ggcagcagcaagaattcctctgcctcccatcctaccattcactgtcttgccggcagccagctgagagcaatgggaaatggggagtcccagctgtcctcggtgcctgctcagaagctgggttggtttatccaggaatacctgaagccctacgaagaatgtcagacactgatcgacgagatggtgaacaccatctgtgacgtcctgcaggaacccgaacagttccccctggtgcagggagtggccataggtggctcctatggacggaaaacagtcttaagaggcaactccgatggcttaaatgataatcccagcccctggatctatcgagagctcaaaagatccttggataagacaaatgccagtcctggtgagtttgcagtctgcttcactgaactccagcagaagttttttgacaaccgtcctggaaaactaaaggatttgatcctcttgataaagcactggcatcaacagtgccagaaaaaaatcaaggatttaccctcgctgtctccgtatgccctggagctgcttacggtgtatgcctgggaacaggggtgcagaaaagacaactttgacattgctgaaggcgtcagaaccgtactggagctgatcaaatgccaggagaagctgtgtatctattggatggtcaactacaactttgaagatgagaccatcaggaacatcctgctgcaccagctccaatcagcgaggccagtaatcttggatccagttgacccaaccaataatgtgagtggagataaaatatgctggcaatggctgaaaaaagaagctcaaacctggttgacttctcccaacctggataatgagttacctgcaccatcttggaatgttctgcctgcaccactcttcacgaccccaggc

SEQ ID NO: 102589 - DNA, 744 bp, Homo sapiens
  Payload ID: 15
  Gene Symbol: OAS2
  Gene Name: 2'-5'-oligoadenylate synthetase 2, 69/71kDa
  ENST ID: ENST00000551603
  CDS Start-End: 8-190
gagagcaatgggaaatggggagtcccagctgtcctcggtgcctgctcagaagctgggttggtttatccaggaatacctgaagccctacgaagaatgtcagacactgatcgacgagatggtgaacaccatctgtgacgtcctgcaggaacccgaacagttccccctggtgcagggagtggccatagcttaaatgataatcccagcccctggatctatcgagagctcaaaagatccttggataagacaaatgccagtcctggtgagtttgcagtctgcttcactgaactccagcagaagttttttgacaaccgtcctggaaaactaaaggatttgatcctcttgataaagcactggcatcaacagtgccagaaaaaaatcaaggatttaccctcgctgtctccgtatgccctggagctgcttacggtgtatgcctgggaacaggggtgcagaaaagacaactttgacattgctgaaggcgtcagaaccgtactggagctgatcaaatgccaggagaagctgtgtatctattggatggtcaactacaactttgaagatgagaccatcaggaacatcctgctgcaccagctccaatcagcgaggccagtaatcttggatccagttgacccaaccaataatgtgagtggagataaaatatgctggcaatggctgaaaaaagaagctcaaacctggttgacttctcccaacctggataatgagttacctgcaccatcttggaatgttctg

SEQ ID NO: 102590 - DNA, 2908 bp, Homo sapiens
  Payload ID: 15
  Gene Symbol: OAS2
  Gene Name: 2'-5'-oligoadenylate synthetase 2, 69/71kDa
  ENST ID: ENST00000620097
  CDS Start-End: 20-2200
cggcagccagctgagagcaatgggaaatggggagtcccagctgtcctcggtgcctgctcagaagctgggttggtttatccaggaatacctgaagccctacgaagaatgtcagacactgatcgacgagatggtgaacaccatctgtgacgtcctgcaggaacccgaacagttccccctggtgcagggagtggccataggtggctcctatggacggaaaacagtcttaagaggcaactccgatggtacccttgtcctcttcttcagtgacttaaaacaattccaggatcagaagagaagccaacgtgacatcctcgataaaactggggataagctgaagttctgtctgttcacgaagtggttgaaaaacaatttcgagatccagaagtcccttgatgggttcaccatccaggtgttcacaaaaaatcagagaatctctttcgaggtgctggccgccttcaacgctctgagcttaaatgataatcccagcccctggatctatcgagagctcaaaagatccttggataagacaaatgccagtcctggtgagtttgcagtctgcttcactgaactccagcagaagttttttgacaaccgtcctggaaaactaaaggatttgatcctcttgataaagcactggcatcaacagtgccagaaaaaaatcaaggatttaccctcgctgtctccgtatgccctggagctgcttacggtgtatgcctgggaacaggggtgcagaaaagacaactttgacattgctgaaggcgtcagaaccgtactggagctgatcaaatgccaggagaagctgtgtatctattggatggtcaactacaactttgaagatgagaccatcaggaacatcctgctgcaccagctccaatcagcgaggccagtaatcttggatccagttgacccaaccaataatgtgagtggagataaaatatgctggcaatggctgaaaaaagaagctcaaacctggttgacttctcccaacctggataatgagttacctgcaccatcttggaatgttctgcctgcaccactcttcacgaccccaggccaccttctggataagttcatcaaggagtttctccagcccaacaaatgcttcctagagcagattgacagtgctgttaacatcatccgtacattccttaaagaaaactgcttccgacaatcaacagccaagatccagattgtccggggaggatcaaccgccaaaggcacagctctgaagactggctctgatgccgatctcgtcgtgttccataactcacttaaaagctacacctcccaaaaaaacgagcggcacaaaatcgtcaaggaaatccatgaacagctgaaagccttttggagggagaaggaggaggagcttgaagtcagctttgagcctcccaagtggaaggctcccagggtgctgagcttctctctgaaatccaaagtcctcaacgaaagtgtcagctttgatgtgcttcctgcctttaatgcactgggtcagctgagttctggctccacacccagccccgaggtttatgcagggctcattgatctgtataaatcctcggacctcccgggaggagagttttctacctgtttcacagtcctgcagcgaaacttcattcgctcccggcccaccaaactaaaggatttaattcgcctggtgaagcactggtacaaagagtgtgaaaggaaactgaagccaaaggggtctttgcccccaaagtatgccttggagctgctcaccatctatgcctgggagcaggggagtggagtgccggattttgacactgcagaaggtttccggacagtcctggagctggtcacacaatatcagcagctctgcatcttctggaaggtcaattacaactttgaagatgagaccgtgaggaagtttctactgagccagttgcagaaaaccaggcctgtgatcttggacccagccgaacccacaggtgacgtgggtggaggggaccgttggtgttggcatcttctggcaaaagaagcaaaggaatggttatcctctccctgcttcaaggatgggactggaaacccaataccaccttggaaagtgccgacaatgcagacaccaggaagttgtggagctaggatccatcctattgtcaatgagatgttctcatccagaagccatagaatcctgaataataattctaaaagaaacttcagatcatctggcaatcgcttttaaagactcggctcaccgtgagaaagagtcactcacatccattcttcccttgatggtccctattcctccttcccttgcttcttggacttcttgaaatcaatcaagactgcaaaccctttcataaagtcttgccttgctgaactccctctctgcaggcagcctgcctttaaaaatagttgctgtcatccactttatgtgcatcttatttctgtcaacttgtattttttttcttgtatttttccaattagctcctcctttttccttccagtctaaaaaaggaatcctctgtgtcttcaaagcaaagctctttactttccccttggttctcataactctgtgatcttgctctcggtgcttccaactcatccacgtcctgtctgtttcctctgtatacaaaaccctttctgcccctgctgacacagacatcctctatgccagcagccagccaaccctttcattagaacttcaagctctccaaaggctcagattataactgttgtcatatttatatgaggctgttgtcttttccttctgagcctgcctttctcccccccacccaggagtatcctcttgccaaatcaaaagactttttccttgggctttagccttaaagatacttgaaggtctaggtgctttaacctcacataccctcacttaaacttttatcactgttgcatataccagttgtgatacaataaagaatgtatctgg

SEQ ID NO: 102591 - DNA, 6719 bp, Homo sapiens
  Payload ID: 16
  Gene Symbol: OAS3
  Gene Name: 2'-5'-oligoadenylate synthetase 3, 100kDa
  Uniprot ID: Q9Y6K5
  ENST ID: ENST00000228928
  CDS Start-End: 180-3443
cccaagtttggggaagacaggaactgcagcgcccctccccgtttcacgccacgcgcgggaccgaggacctaggacctggccagctgggcgtggttcggagagccgggcgggaaaacgaaaccagaaatccgaaggccgcgccagagccctgcttccccttgcacctgcgccgggcggccatggacttgtacagcaccccggccgctgcgctggacaggttcgtggccagaaggctgcagccgcggaaggagttcgtagagaaggcgcggcgcgctctgggcgccctggccgctgccctgagggagcgcgggggccgcctcggtgctgctgccccgcgggtgctgaaaactgtcaagggaggctcctcgggccggggcacagctctcaagggtggctgtgattctgaacttgtcatcttcctcgactgcttcaagagctatgtggaccagagggcccgccgtgcagagatcctcagtgagatgcgggcatcgctggaatcctggtggcagaacccagtccctggtctgagactcacgtttcctgagcagagcgtgcctggggccctgcagttccgcctgacatccgtagatcttgaggactggatggatgttagcctggtgcctgccttcaatgtcctgggtcaggccggctccggcgtcaaacccaagccacaagtctactctaccctcctcaacagtggctgccaagggggcgagcatgcggcctgcttcacagagctgcggaggaactttgtgaacattcgcccagccaagttgaagaacctaatcttgctggtgaagcactggtaccaccaggtgtgcctacaggggttgtggaaggagacgctgcccccggtctatgccctggaattgctgaccatcttcgcctgggagcagggctgtaagaaggatgctttcagcctagccgaaggcctccgaactgtcctgggcctgatccaacagcatcagcacctgtgtgttttctggactgtcaactatggcttcgaggaccctgcagttgggcagttcttgcagcggcagcttaagagacccaggcctgtgatcctggacccagctgaccccacatgggacctggggaatggggcagcctggcactgggatttgctagcccaggaggcagcatcctgctatgaccacccatgctttctgagggggatgggggacccagtgcagtcttggaaggggccgggccttccacgtgctggatgctcaggtttgggccaccccatccagctagaccctaaccagaagacccctgaaaacagcaagagcctcaatgctgtgtacccaagagcagggagcaaacctccctcatgcccagctcctggccccactggggcagccagcatcgtcccctctgtgccgggaatggccttggacctgtctcagatccccaccaaggagctggaccgcttcatccaggaccacctgaagccgagcccccagttccaggagcaggtgaaaaaggccattgacatcatcttgcgctgcctccatgagaactgtgttcacaaggcctcaagagtcagtaaagggggctcatttggccggggcacagacctaagggatggctgtgatgttgaactcatcatcttcctcaactgcttcacggactacaaggaccaggggccccgccgcgcagagatccttgatgagatgcgagcgcagctagaatcctggtggcaggaccaggtgcccagcctgagccttcagtttcctgagcagaatgtgcctgaggctctgcagttccagctggtgtccacagccctgaagagctggacggatgttagcctgctgcctgccttcgatgctgtggggcagctcagttctggcaccaaaccaaatccccaggtctactcgaggctcctcaccagtggctgccaggagggcgagcataaggcctgcttcgcagagctgcggaggaacttcatgaacattcgccctgtcaagctgaagaacctgattctgctggtgaagcactggtaccgccaggttgcggctcagaacaaaggaaaaggaccagcccctgcctctctgcccccagcctatgccctggagctcctcaccatctttgcctgggagcagggctgcaggcaggattgtttcaacatggcccaaggcttccggacggtgctggggctcgtgcaacagcatcagcagctctgtgtctactggacggtcaactatagcactgaggacccagccatgagaatgcaccttcttggccagcttcgaaaacccagacccctggtcctggaccccgctgatcccacctggaacgtgggccacggtagctgggagctgttggcccaggaagcagcagcgctggggatgcaggcctgctttctgagtagagacgggacatctgtgcagccctgggatgtgatgccagccctcctttaccaaaccccagctggggaccttgacaagttcatcagtgaatttctccagcccaaccgccagttcctggcccaggtgaacaaggccgttgataccatctgttcatttttgaaggaaaactgcttccggaattctcccatcaaagtgatcaaggtggtcaagggtggctcttcagccaaaggcacagctctgcgaggccgctcagatgccgacctcgtggtgttcctcagctgcttcagccagttcactgagcagggcaacaagcgggccgagatcatctccgagatccgagcccagctggaggcatgtcaacaggagcggcagttcgaggtcaagtttgaagtctccaaatgggagaatccccgcgtgctgagcttctcactgacatcccagacgatgctggaccagagtgtggactttgatgtgctgccagcctttgacgccctaggccagctggtctctggctccaggcccagctctcaagtctacgtcgacctcatccacagctacagcaatgcgggcgagtactccacctgcttcacagagctacaacgggacttcatcatctctcgccctaccaagctgaagagcctgatccggctggtgaagcactggtaccagcagtgtaccaagatctccaaggggagaggctccctacccccacagcacgggctggaactcctgactgtgtatgcctgggagcagggcgggaaggactcccagttcaacatggctgagggcttccgcacggtcctggagctggtcacccagtaccgccagctctgtatctactggaccatcaactacaacgccaaggacaagactgttggagacttcctgaaacagcagcttcagaagcccaggcctatcatcctggatccggctgacccgacaggcaacctgggccacaatgcccgctgggacctgctggccaaggaagctgcagcctgcacatctgccctgtgctgcatgggacggaatggcatccccatccagccatggccagtgaaggctgctgtgtgaagttgagaaaatcagcggtcctactggatgaagagaagatggacaccagccctcagcatgaggaaattcagggtcccctaccagatgagagagattgtgtacatgtgtgtgtgagcacatgtgtgcatgtgtgtgcacacgtgtgcatgtgtgtgttttagtgaatctgctctcccagctcacacactcccctgcctcccatggcttacacactaggatccagactccatggtttgacaccagcctgcgtttgcagcttctctgtcacttccatgactctatcctcataccaccactgctgcttcccacccagctgagaatgccccctcctccctgactcctctctgcccatgcaaattagctcacatctttcctcctgctgcaatccatcccttcctcccattggcctctccttgccaaatctaaatagtttatatagggatggcagagagttcccatctcatctgtcagccacagtcatttggtactggctacctggagccttatcttctgaagggttttaaagaatggccaattagctgagaagaattatctaatcaattagtgatgtctgccatggatgcagtagaggaaagtggtggtacaagtgccatgattgattagcaatgtctgcactggatacggaaaaaagaaggtgcttgcaggtttacagtgtatatgtgggctattgaagagccctctgagctcggttgctagcaggagagcatgcccatattggcttactttgtctgccacagacacagacagagggagttgggacatgcatgctatggggaccctcttgttggacacctaattggatgcctcttcatgagaggcctccttttcttcaccttttatgctgcactcctcccctagtttacacatcttgatgctgtggctcagtttgccttcctgaatttttattgggtccctgttttctctcctaacatgctgagattctgcatccccacagcctaaactgagccagtggccaaacaaccgtgctcagcctgtttctctctgccctctagagcaaggcccaccaggtccatccaggaggctctcctgacctcaagtccaacaacagtgtccacactagtcaaggttcagcccagaaaacagaaagcactctaggaatcttaggcagaaagggattttatctaaatcactggaaaggctggaggagcagaaggcagaggccaccactggactattggtttcaatattagaccactgtagccgaatcagaggccagagagcagccactgctactgctaatgccaccactacccctgccatcactgccccacatggacaaaactggagtcgagacctaggttagattcctgcaaccacaaacatccatcagggatggccagctgccagagctgcgggaagacggatcccacctccctttcttagcagaatctaaattacagccagacctctggctgcagaggagtctgagacatgtatgattgaatgggtgccaagtgccagggggcggagtccccagcagatgcatcctggccatctgttgcgtggatgagggagtgggtctatctcagaggaaggaacaggaaacaaagaaaggaagccactgaacatcccttctctgctccacaggagtgccttagacagcctgactctccacaaaccactgttaaaacttacctgctaggaatgctagattgaatgggatgggaagagccttccctcattattgtcattcttggagagaggtgagcaaccaagggaagctcctctgattcacctagaacctgttctctgccgtctttggctcagcctacagagactagagtaggtgaagggacagaggacagggcttctaatacctgtgccatattgacagcctccatccctgtcccccatcttggtgctgaaccaacgctaagggcaccttcttagactcacctcatcgatactgcctggtaatccaaagctagaactctcaggaccccaaactccacctcttggattggccctggctgctgccacacacatatccaagagctcagggccagttctggtgggcagcagagacctgctctgccaagttgtccagcagcagagtggccctggcctgggcatcacaagccagtgatgctcctgggaagaccaggtggcaggtcgcagttgggtaccttccattcccaccacacagactctgggcctccccgcaaaatggctccagaattagagtaattatgagatggtgggaaccagagcaactcaggtgcatgatacaaggagaggttgtcatctgggtagggcagagaggagggcttgctcatctgaacaggggtgtatttcattccaggccctcagtctttggcaatggccaccctggtgttggcatattggccccactgtaacttttgggggcttcccggtctagccacaccctcggatggaaagacttgactgcataaagatgtcagttctccctgagttgattgataggcttaatggtcaccctaaaaacacccacatatgcttttcgatggaaccaggtaagttgacgctaaagttcttatggaaaaatacacacgcaatagctaggaaaacacagggaaagaagagttctgagcagggcctagtcttagccaatattaaaacatactatgaagcctctgatacttaaacagcatggcgctggtacgtaaatagaccaatgcagttaggtggctctttccaagactctggggaaaaaagtagtaaaaagctaaatgcaatcaatcagcaattgaaagctaagtgagagagccagagggcctccttggtggtaaaagagggttgcatttcttgcagccagaaggcagagaaagtgaagaccaagtccagaactgaatcctaagaaatgcaggactgcaaagaaattggtgtgtgtgtgtgtgtgtgtgtgtgtgtgtgtgtttaatttttaaaaagtttttattgagatacaagtcaataccataaagctctcacccttctaaagtgtacaattcagtggtgtgagtatattcataagatttatacttggtgtctattcataagacttatatccagcatattcataactagagccatatcacagatgcattcatcataataattccagacattttcatcaccctaaaaggaaaccctgaaacccattagcagtcattccccattcctccaacccattctctccctaatccctagaaaccaccaatctgctgtgtatttcatctattgccaacatttcatataaatggcatcatacaa

SEQ ID NO: 102592 - DNA, 499 bp, Homo sapiens
  Payload ID: 16
  Gene Symbol: OAS3
  Gene Name: 2'-5'-oligoadenylate synthetase 3, 100kDa
  ENST ID: ENST00000546973
  CDS Start-End: 1-499
ataccatctgttcatttttgaaggaaaactgcttccggaattctcccatcaaagtgatcaaggtggtcaaggagcggcagttcgaggtcaagtttgaagtctccaaatgggagaatccccgcgtgctgagcttctcactgacatcccagacgatgctggaccagagtgtggactttgatgtgctgccagcctttgacgccctaggccagctggtctctggctccaggcccagctctcaagtctacgtcgacctcatccacagctacagcaatgcgggcgagtactccacctgcttcacagagctacaacgggacttcatcatctctcgccctaccaagctgaagagcctgatccggctggtgaagcactggtaccagcagtgtaccaagatctccaaggggagaggctccctacccccacagcacgggctggaactcctgactgtgtatgcctgggagcagggcgggaaggactcccagttcaacatggctgagggctt

SEQ ID NO: 102593 - DNA, 1392 bp, Homo sapiens
  Payload ID: 16
  Gene Symbol: OAS3
  Gene Name: 2'-5'-oligoadenylate synthetase 3, 100kDa
  ENST ID: ENST00000548514
  CDS Start-End: 72-743
gggaaaacgaaaccagaaatccgaaggccgcgccagagccctgcttccccttgcacctgcgccgggcggccatggacttgtacagcaccccggccgctgcgctggacaggttcgtggccagaaggctgcagccgcggaaggagttcgtagagaaggcgcggcgcgctctgggcgccctggccgctgccctgagggagcgcgggggccgcctcggtgctgctgccccgcgggtgctgaaaactgtcaagggaggctcctcgggccggggcacagctctcaagggtggctgtgattctgaacttgtcatcttcctcgactgcttcaagagctatgtggaccagagggcccgccgtgcagagatcctcagtgagatgcgggcatcgctggaatcctggtggcagaacccagtccctggtctgagactcacgtttcctgagcagagcgtgcctggggccctgcagttccgcctgacatccgtagatcttgaggactggatggatgttagcctggtgcctgccttcaatgtcctgggtcaggccggctccggcgtcaaacccaagccacaagtctactctaccctcctcaacagtggctgccaagggggcgagcatgcggcctgcttcacagagctgcggaggaactttgtgaacattcgcccagccaagttgaagaacctaatcttgctggtgaagcactggtaccaccaggtgaagccacttggaagggtttctccagacatgtgactgtttgctttgtgctttcatagtcgtgaaactgttgtcttacatttagtggccattcatgttctctctctgggaattgtctgtttatgtcccttgtgcattattttctcttgggttagctgtcttgttactgatttgttgaagctctttatatattgtggatactgatccttatttagttaatataatgcattcttccaatagtcttccagtctgtgtcttgggcttttgctttgtttaaaggttatttgtaggacaaaatatctacagtttaatgtactcagatatatcctttgaaaaatgagttattctttgtgtgtcttaagaagtctttccctatcctgccaggtgcagtggctcatggctggaatcccagcactttgagtggccgaggcaggtggatcacttgaggtcaggagttcaagaccagcctggccaacatggtgaaaccctgtctctactaaaaatacaaaatgtagccgggcgtggtggtacacacctgtaattccagttactcgggaggctgaggcaggagaatctcttgaacccaggaggcagaggttgcagtaagccaagattgcaccactgcactccagcctgggtgacagagccagactccatctcaaggaaaaaaaaaaaaaaaaaaaaa

SEQ ID NO: 102594 - DNA, 998 bp, Homo sapiens
  Payload ID: 16
  Gene Symbol: OAS3
  Gene Name: 2'-5'-oligoadenylate synthetase 3, 100kDa
  ENST ID: ENST00000551007
  CDS Start-End: 88-621
gttcggagagccgggcgggaaaacgaaaccagaaatccgaaggccgcgccagagccctgcttccccttgcacctgcgccgggcggccatggacttgtacagcaccccggccgctgcgctggacaggttcgtggccagaaggctgcagccgcggaaggagttcgtagagaaggcgcggcgcgctctgggcgccctggccgctgccctgagggagcgcgggggccgcctcggtgctgctgccccgcgggtgctgaaaactgtcaagggaggctcctcgggccggggcacagctctcaagggtggctgtgattctgaacttgtcatcttcctcgactgcttcaagagctatgtggaccagagggcccgccgtgcagagatcctcagtgagatgcgggcatcgctggaatcctggtggcagaacccagtccctggtctgagactcacgtttcctgagcagagcgtgcctggggccctgcagttccgcctgacatccgtagatcttgaggactggatggatgttagcctggtgcctgccttcaatgtcctgggtgaggggttcctagaccattccagggttgggggcaaaagatcattgggaacaacacaggacttccaattctagcccagccaccaacttgctgtttgacctgggccagcctctacccctctctcagcctcagtctggggactaaacatattggacttgtgccagacaaaggcagagaaaccccagttcctcctggatctgtggtcctgctgtcaagatgcttggccctcccacaggcatctgggagtttccctcagccactgcctggagcggttactgctcagcccttccacaaatactcccgaaagctaagccaagtggacatgtggctagcagtaggggcctggggacgaaaccagaattctgcaaaatcttgtattttatgttgaaaacatcaatgtgatttttgtgttctccttcgtaatacacgtatgcttgagttaagataaaaa

SEQ ID NO: 102595 - DNA, 3266 bp, Homo sapiens
  Payload ID: 17
  Gene Symbol: OASL
  Gene Name: 2'-5'-oligoadenylate synthetase-like
  Uniprot ID: Q15646
  ENST ID: ENST00000257570
  CDS Start-End: 272-1816
tgactagacggccagcctgttaaggtggccccagatattccagcctcagcccagagtcctcctgtgcccctactgcagcaagggtgtctccaagaagggggacctggagtcagcccgtcacacctggtttcctctctgctagggtccctcctcccacagagcactggagggcagctgaggaggagctaccttaaaaaaggaggtgtgtgccagggagctgggtaggagcctggctatatatctgcccagcagcggtactctcgggacagagatggcactgatgcaggaactgtatagcacaccagcctccaggctggactccttcgtggctcagtggctgcagccccaccgggagtggaaggaagaggtgctagacgctgtgcggaccgtggaggagtttctgaggcaggagcatttccaggggaagcgtgggctggaccaggatgtgcgggtgctgaaggtagtcaaggtgggctccttcgggaatggcacggttctcaggagcaccagagaggtggagctggtggcgtttctgagctgtttccacagcttccaggaggcagccaagcatcacaaagatgttctgaggctgatatggaaaaccatgtggcaaagccaggacctgctggacctcgggctcgaggacctgaggatggagcagagagtccccgatgctctcgtcttcaccatccagaccagggggactgcggagcccatcacggtcaccattgtgcctgcctacagagccctggggccttctcttcccaactcccagccaccccctgaggtctatgtgagcctgatcaaggcctgcggtggtcctggaaatttctgcccatccttcagcgagctgcagagaaatttcgtgaaacatcggccaactaagctgaagagcctcctgcgcctggtgaaacactggtaccagcagtatgtgaaagccaggtcccccagagccaatctgccccctctctatgctcttgaacttctaaccatctatgcctgggaaatgggtactgaagaagacgagaatttcatgttggacgaaggcttcaccactgtgatggacctgctcctggagtatgaagtcatctgtatctactggaccaagtactacacactccacaatgcaatcattgaggattgtgtcagaaaacagctcaaaaaagagaggcccatcatcctggatccggccgaccccaccctcaacgtggcagaagggtacagatgggacatcgttgctcagagggcctcccagtgcctgaaacaggactgttgctatgacaacagggagaaccccatctccagctggaacgtgaagagggcacgagacatccacttgacagtggagcagaggggttacccagatttcaacctcatcgtgaacccttatgagcccataaggaaggttaaagagaaaatccggaggaccaggggctactctggcctgcagcgtctgtccttccaggttcctggcagtgagaggcagcttctcagcagcaggtgctccttagccaaatatgggatcttctcccacactcacatctatctgctggagaccatcccctccgagatccaggtcttcgtgaagaatcctgatggtgggagctacgcctatgccatcaaccccaacagcttcatcctgggtctgaagcagcagattgaagaccagcaggggcttcctaaaaagcagcagcagctggaattccaaggccaagtcctgcaggactggttgggtctggggatctatggcatccaagacagtgacactctcatcctctcgaagaagaaaggagaggctctgtttccagccagttagttttctctgggagacttctctgtacatttctgccatgtactccagaactcatcctgtcaatcactctgtcccattgtctactgggaaggtcccaggtcttcaccagttttacaatgagttatcccaggccagacgtggtagctcacacctgtaatcccagaactttgggaggccgaggtgggaggagcgcttgagccgaggagttcaagaccagcctgggtatcacagggagaccccgtctctacaaaataaaaaaataattcactgggtgtggttgtgcacatttgtagtctcaggcactcaagaagctgaggcagaagaatcacttgagcccaggaggctgaagctgcagtgagctgtgatcacaccgctacactcctgcccaggccacagagcaagaccctgtgtctaaaaactaaaacataaaaataagtaaatccgtttaaaaaaaggattatcccagccctgccagggggaggatgaggaggggtgtgaggactaaatatacaaataaatagtgtggtcacatgacgcacagcaacagaattcggacccacagccttctgcagcaatcaaccccaaaccatcaggacttgggcgataactggcagcatctctaactccccaccctactcccatcctgcttcctatttatgaccaacccaagaaacccaaataagctccccagaccaatcacatggttagccccacttctggtgagtgcacttccagcttccccataccaacagcctcaatcacggcatccctgaagccttcccattttcctgcctgtctttaaatctctgtcaaaagcgagagatgggtggctggttcctttgctatagcaagttgggaataaatcgcctttgttagttctcatttgggggctgtttatttccacagggcctaatgctgtcctaatggttattgcttgatcatttgagcttctcaactctaagaaatgaggactggggaaactgaggcaaaaagagacaaagaatgggagattgaggatgatgcagtgtaaaaaaaaatcacctcaactcctaaaacccatacacaaacagtacataatagtcaggaaactgtaggaaagtaatagcatctttattatcaaaggacgtcatgtgatcaggtttactccaagcaataaaaagtttccttttgcccccctgttttgcctagttttctggtgggctactctcctaccatagcatagaaaatgcacactgcaattggttatcaacagcctctggtcaatttagcaatcataatctgtgtatctcccacctctgtttgccttcagggacagaaaaagtgcctcctttccaggaggtagacaggctgttccagtccccatctttgtgtccttcataatgcccagcacagcccacattgtaggtggtgggaaaattcttgtttaaaataaaaaaaagaatgaaaaatgcaa

SEQ ID NO: 102596 - DNA, 1492 bp, Homo sapiens
  Payload ID: 17
  Gene Symbol: OASL
  Gene Name: 2'-5'-oligoadenylate synthetase-like
  Uniprot ID: Q15646
  ENST ID: ENST00000339275
  CDS Start-End: 186-953
tctccaagaagggggacctggagtcagcccgtcacacctggtttcctctctgctagggtccctcctcccacagagcactggagggcagctgaggaggagctaccttaaaaaaggaggtgtgtgccagggagctgggtaggagcctggctatatatctgcccagcagcggtactctcgggacagagatggcactgatgcaggaactgtatagcacaccagcctccaggctggactccttcgtggctcagtggctgcagccccaccgggagtggaaggaagaggtgctagacgctgtgcggaccgtggaggagtttctgaggcaggagcatttccaggggaagcgtgggctggaccaggatgtgcgggtgctgaaggtagtcaaggtgggctccttcgggaatggcacggttctcaggagcaccagagaggtggagctggtggcgtttctgagctgtttccacagcttccaggaggcagccaagcatcacaaagatgttctgaggctgatatggaaaaccatgtggcaaagccaggacctgctggacctcgggctcgaggacctgaggatggagcagagagtccccgatgctctcgtcttcaccatccagaccagggggactgcggagcccatcacggtcaccattgtgcctgcctacagagccctggggccttctcttcccaactcccagccaccccctgaggtctatgtgagcctgatcaaggcctgcggtggtcctggaaatttctgcccatccttcagcgagctgcagagaaatttcgtgaaacatcggccaactaagctgaagagcctcctgcgcctggtgaaacactggtaccagcaggcccatcatcctggatccggccgaccccaccctcaacgtggcagaagggtacagatgggacatcgttgctcagagggcctcccagtgcctgaaacaggactgttgctatgacaacagggagaaccccatctccagctggaacgtgaagagggcacgagacatccacttgacagtggagcagaggggttacccagatttcaacctcatcgtgaacccttatgagcccataaggaaggttaaagagaaaatccggaggaccaggggctactctggcctgcagcgtctgtccttccaggttcctggcagtgagaggcagcttctcagcagcaggtgctccttagccaaatatgggatcttctcccacactcacatctatctgctggagaccatcccctccgagatccaggtcttcgtgaagaatcctgatggtgggagctacgcctatgccatcaaccccaacagcttcatcctgggtctgaagcagcagattgaagaccagcaggggcttcctaaaaagcagcagcagctggaattccaaggccaagtcctgcaggactggttgggtctggggatctatggcatccaagacagtgacactctcatcctctcgaagaagaaaggagaggctctgtttccagccagttagtttt

SEQ ID NO: 102597 - DNA, 749 bp, Homo sapiens
  Payload ID: 17
  Gene Symbol: OASL
  Gene Name: 2'-5'-oligoadenylate synthetase-like
  ENST ID: ENST00000543677
  CDS Start-End: 1-461
agcacaccagcctccaggctggactccttcgtggctcagtggctgcagccccaccgggagtggaaggaagaggtgctagacgctgtgcggaccgtggaggagtttctgaggcaggagcatttccaggggaagcgtgggctggaccaggatgtgcgggtgctgaaggtagtcaagggccttctcttcccaactcccagccaccccctgaggtctatgtgagcctgatcaaggcctgcggtggtcctggaaatttctgcccatccttcagcgagctgcagagaaatttcgtgaaacatcggccaactaagctgaagagcctcctgcgcctggtgaaacactggtaccagcaggcccatcatcctggatccggccgaccccaccctcaacgtggcagaagggtacagatgggacatcgttgctcagagggcctcccagtgcctgaaacaggactgttgctatgacaacagggagaaccccatctccagctggaacgtgaaggtaatggctcctctctgggctgtcaagggcttgaaggtcagaacgacagataaactactcagtatttactcattcagttctgtgttgatggagaacagaactttagagtcaccgtttaagggccagctgcaccacccatgggctccgtgaacttggacaaattctttggctctcagagccttgggtttcttaccttcaaattcttgttctcctttcctttctttttcccataatttactggagaatcagtt

SEQ ID NO: 102598 - DNA, 1695 bp, Homo sapiens
  Payload ID: 17
  Gene Symbol: OASL
  Gene Name: 2'-5'-oligoadenylate synthetase-like
  Uniprot ID: Q15646
  ENST ID: ENST00000620239
  CDS Start-End: 272-1426
tgactagacggccagcctgttaaggtggccccagatattccagcctcagcccagagtcctcctgtgcccctactgcagcaagggtgtctccaagaagggggacctggagtcagcccgtcacacctggtttcctctctgctagggtccctcctcccacagagcactggagggcagctgaggaggagctaccttaaaaaaggaggtgtgtgccagggagctgggtaggagcctggctatatatctgcccagcagcggtactctcgggacagagatggcactgatgcaggaactgtatagcacaccagcctccaggctggactccttcgtggctcagtggctgcagccccaccgggagtggaaggaagaggtgctagacgctgtgcggaccgtggaggagtttctgaggcaggagcatttccaggggaagcgtgggctggaccaggatgtgcgggtgctgaaggtagtcaaggtgggctccttcgggaatggcacggttctcaggagcaccagagaggtggagctggtggcgtttctgagctgtttccacagcttccaggaggcagccaagcatcacaaagatgttctgaggctgatatggaaaaccatgtggcaaagccaggacctgctggacctcgggctcgaggacctgaggatggagcagagagtccccgatgctctcgtcttcaccatccagaccagggggactgcggagcccatcacggtcaccattgtgcctgcctacagagccctggggccttctcttcccaactcccagccaccccctgaggtctatgtgagcctgatcaaggcctgcggtggtcctggaaatttctgcccatccttcagcgagctgcagagaaatttcgtgaaacatcggccaactaagctgaagagcctcctgcgcctggtgaaacactggtaccagcagagggcacgagacatccacttgacagtggagcagaggggttacccagatttcaacctcatcgtgaacccttatgagcccataaggaaggttaaagagaaaatccggaggaccaggggctactctggcctgcagcgtctgtccttccaggttcctggcagtgagaggcagcttctcagcagcaggtgctccttagccaaatatgggatcttctcccacactcacatctatctgctggagaccatcccctccgagatccaggtcttcgtgaagaatcctgatggtgggagctacgcctatgccatcaaccccaacagcttcatcctgggtctgaagcagcagattgaagaccagcaggggcttcctaaaaagcagcagcagctggaattccaaggccaagtcctgcaggactggttgggtctggggatctatggcatccaagacagtgacactctcatcctctcgaagaagaaaggagaggctctgtttccagccagttagttttctctgggagacttctctgtacatttctgccatgtactccagaactcatcctgtcaatcactctgtcccattgtctactgggaaggtcccaggtcttcaccagttttacaatgagttatcccaggccagacgtggtagctcacacctgtaatcccagaactttgggaggccgaggtgggaggagcgcttgagccgaggagttcaagaccagcctgggtatcacagggagaccccgtctctacaaaataaaaaaataattcactggg

SEQ ID NO: 102599 - DNA, 3627 bp, Homo sapiens
  Payload ID: 18
  Gene Symbol: ADO
  Gene Name: 2-aminoethanethiol (cysteamine) dioxygenase
  Uniprot ID: Q96SZ5
  ENST ID: ENST00000373783
  CDS Start-End: 204-1016
agagggggctcaaggcgagcgcgccgggcagttgcgggcgcgtggctgctgaggttggcggcggtgccgcgcgcccgacgggccggtggttgcggggcctcccgcctcgacccgggctgggggcagccgtggcggccgccggggaccgcaaggggcggaggaaaggagggggccggtcccggcacgcagaggagcagccgaccatgccccgagacaacatggcctccttgatccaacggatcgcccgccaggcttgcctcaccttccggggcagcgggggcggccgcggcgcttccgatcgcgacgcggcttctggcccggaggcgccgatgcagccgggcttccccgagaacctgagcaagctgaagagcctcctgacccagctccgcgccgaggacttgaacatcgccccgcgcaaggccacactgcagccgctgccgcccaacctgccgccagtcacctacatgcacatctacgagacggacggcttcagcctgggcgtgttcctgctcaagagcggcacgtccatcccgctgcacgaccacccgggcatgcacggcatgctcaaggtgctgtacggcaccgtgcgcatcagctgcatggacaagctagacgcgggcggcgggcaacggccgcgggccttgccgcccgagcagcagttcgagccgccgctgcagccccgggagcgagaagccgtgcggccgggcgtgctgcgttcgcgggccgagtacaccgaggccagcggcccctgcatcctcacaccgcaccgggacaacctgcaccagatcgacgccgtggaagggcctgccgccttcctggacatcctggccccgccctacgacccggacgatggccgggactgccactattaccgggtgctggagccggtcaggcccaaggaggcctccagctcggcctgtgacctgcctcgagaggtgtggctcctggagaccccacaggccgatgacttctggtgcgagggagaaccctatccaggtcccaaggtcttcccttgaagccactggcgcccaggagcggtgggccgaagacgtgccctaccctaccacaagggctgtgtctctaccccctagcctgggcgttggatctactggaatgagcagcagccgcttcctcggcagccttgggaagcacgggcgactggacagcagccgccgggcacggttatgggggcggggtgggcggggaggctagattgtttcctggtactgtcactgccactggggctttgatttggaggaatggggcaggggactatctgaagcgcttccatcctaaagccataatgaaaatatcttcctctcttccccattctatacaaaatactaagtggttttcttgctcccactccctaccccttagttaaatagggtttattttccactcatgcccttatgcctttttttcttatagttttttaacttattgactgtgcatgacccagtggtttgaattgtttttagttcaagtcattggtaaaaactaggtttaaggagatgagctactgtttaaagtgagctggcctgcctaattaattccttgtgaaaactaaatgattttttcagtttggggatcattctcacaacataactatgcatgtagaggacaagatttattttctttcctccctttgcccagtagccacatctggtttactcaggcagcatctactaagaaattcagcacctgcatatctctgtgacatggtcacttagagcttatcttccctatgaatctccagatctgtgagtcgagcagatttcatgttgcagattcacctttaatgcaaagactgtattatcctcacatgactttttttcttgtcttactgtaccttaaaaggtgatagagtaattctgtattttctaacgggaagattcaaaggagctgaatgtgttatgcttccaaacaactgaatgtaaaacactcctagccagttgttgcattccctatatttatttacttccaatattttactgtaaaagtagggagaaatattatgttgatagttgtttcatattctctcaggaactttaatgttcccgactcgggtgattccagctgtgttgctggcagtgttgtctcaaccctctccctaaaatgactgagccctgggttcatctaatgtggttttccttaggaagagatagaaggcacagaagatcacagctagagaattgagaattaactatactactagccattttagggcaccaaaacttgggattaaacacttcctacttcccactcccaactcctgaaatgaagtcttgctatctgtgactagttttatttttgtgcttttaatagtccgagcagtcttaccttgtttacacatgtattgacaccatttgcttcaggccatggagcactgtttctccctttttactatttataggattccgttttttcacaagacttttaataaaaagaaattgtagaaataaacacattaaaatttgcccagctgtcgtctaagccctcttgattgacttgcccaagtggcaatagagttctaatatctataataaagggagatttgctattattagtggaatgttgaccccgtatgtagagaaacagtacgtgcctttgcctctttatgcacacagagacccagggtgagggagtatttgttcccagtttttaagatagtataaaaaagcaaatacttggtgagtgatttaaaaataaaaccaaaacaaaacacaaaaagatattccacaggacatgccactttattataaaacctgacacaggcatagtaccaagtatttcctgcattgttgctaaaattgttttattgtagctccacattctggtgtagtttaaaatgcctttgggggcagtttgaagcagttcttcatgccacttagtttgaaaataaaattctagatatgcaaatgattttcttagaaaacttcacaaaataaaagatcttgtttttttttccatagcacagtaatgaatgtggttatcaatcacatacttttttggattatattgtagcaaaaagttgattagcttaccaagattattaatagcaatgtatgtgttataatacaacttagtacattaaagctacgaaaactcatcctggctgtaggatagtaataaaggaagaattatgacttcattatgaaaaaaagaagttttaaagttttcaattacgagcaatttggaagaaaaaacctaaggtgcttttcaaaagagtaactgaaattgttgcaggccaaaacagcaatatgatatctcagatttagttcaataagaacagtgaaacttttggttcactaataaattctgagtaaattagtggtgaagacaaaatataacttgttttagtgagccactgaggaaagaatatgcttattacaaagacaaaatgtggtgcagaaactatcttgcacctgtgtgcataaactgttagtcgtgactgacttggtgtgttgctattgtgtttctatatactccgtccaatatagataatgttttaataacaactgtgggataaaagttatcttccccttggaaagactaatgagcacaatgatattaatcacttttatggtgaataataaatgcaataattgcctcatgggtgagaaa

SEQ ID NO: 102600 - DNA, 657 bp, Homo sapiens
  Payload ID: 19
  Gene Symbol: DNPH1
  Gene Name: 2'-deoxynucleoside 5'-phosphate N-hydrolase 1
  Uniprot ID: O43598
  ENST ID: ENST00000230431
  CDS Start-End: 29-553
ggcgccggagagcgcgggcggctggggaatggctgctgccatggtgccggggcgcagcgagagctgggagcgcggggagcctggccgcccggccctgtacttctgcgggagcattcgcggcggacgcgaggacaggacgctgtacgagcggatcgtgtctcggctgcggcgattcgggacagtgctcaccgagcacgtggcggccgccgagctgggcgcgcgcggggaagaggctgctgggggtgacaggctcatccatgagcaggacctggagtggctgcagcaggcggacgtggtcgtggcagaagtgacacagccatccttgggtgtaggctatgagctgggccgggccgtggcctttaacaagcggatcctgtgcctgttccgcccgcagtctggccgcgtgctttcggccatgatccggggagcagcagatggctctcggttccaggtgtgggactatgaggagggagaggtggaggccctgctggatcgatacttcgaggctgatcctccagggcaggtggctgcctcccctgacccaaccacttgacttaatctcactttcttaaattcttctattctcagacactgctctagtaccattccttcctcttagccccaggagcaaattaaaaggtacagttaaaatcctaa

SEQ ID NO: 102601 - DNA, 796 bp, Homo sapiens
  Payload ID: 19
  Gene Symbol: DNPH1
  Gene Name: 2'-deoxynucleoside 5'-phosphate N-hydrolase 1
  Uniprot ID: O43598
  ENST ID: ENST00000393987
  CDS Start-End: 23-469
ggagagcgcgggcggctggggaatggctgctgccatggtgccggggcgcagcgagagctgggagcgcggggagcctggccgcccggccctgtacttctgcgggagcattcgcggcggacgcgaggacaggacgctgtacgagcggatcgtgtctcggctgcggcgattcgggacagtgctcaccgagcacgtggcggccgccgagctgggcgcgcgcggggaagaggctgctgggggtgacaggctcatccatgagcaggacctggagtggctgcagcaggcggacgtggtcgtggcagaagtgacacagccatccttgggtgtaggctatgagctgggccgggccgtggcctttaacaagcggatcctgtgcctgttccgcccgcagtctggccgcggtgagcaccccaagcctccctcctggctttctatggacccagccctcagctccttccctggtgggctctgagcaccgcgcctctcccaaggggtaagggagctgtgagggtgtggatgggaggcagcttcacctttccctgccctttccagtgctttcggccatgatccggggagcagcagatggctctcggttccaggtgtgggactatgaggagggagaggtggaggccctgctggatcgatacttcgaggctgatcctccagggcaggtggctgcctcccctgacccaaccacttgacttaatctcactttcttaaattcttctattctcagacactgctctagtaccattccttcctcttagccccaggagcaaattaaaaggtacagttaaaa

SEQ ID NO: 102602 - DNA, 834 bp, Homo sapiens
  Payload ID: 19
  Gene Symbol: DNPH1
  Gene Name: 2'-deoxynucleoside 5'-phosphate N-hydrolase 1
  ENST ID: ENST00000509253
  CDS Start-End: 1-732
gctgctgccatggtgccggggcgcagcgagagctgggagcgcggggagcctggccgcccggccctgtacttctgcgggagcattcgcggcggacgcgaggacaggacgctgtacgagcggatcgtgtctcggctgcggcgattcgggacagtgctcaccgagcacgtggcggccgccgagctgggcgcgcgcggtgaggccctggggccgcgggacgcggggacgcgggcgcggacctggctggggtggcagggacccggcctgtccgcccccccgacccccggcagctgcgctcccggcgcccggagcccgccctcctaccccggtgctccatccagcgccccagcccgagaaggaaacgggccggggctcgggctgcgtgggtcccagcaagcctgcgggtgggaagaggctgctgggggtgacaggctcatccatgagcaggacctggagtggctgcagcaggcggacgtggtcgtggcagaagtgacacagccatccttgggtgtaggctatgagctgggccgggccgtggcctttaacaagcggatcctgtgcctgttccgcccgcagtctggccgcgtgctttcggccatgatccggggagcagcagatggctctcggttccaggtgtgggactatgaggagggagaggtggaggccctgctggatcgatacttcgaggctgatcctccagggcaggtggctgcctcccctgacccaaccacttgacttaatctcactttcttaaattcttctattctcagacactgctctagtaccattccttcctcttagccccaggagcaaattaaaaggtacagttaaaatcct

SEQ ID NO: 102603 - DNA, 2266 bp, Homo sapiens
  Payload ID: 20
  Gene Symbol: HACL1
  Gene Name: 2-hydroxyacyl-CoA lyase 1
  Uniprot ID: Q9UJ83
  ENST ID: ENST00000321169
  CDS Start-End: 369-2105
aaacgctccagctggccgactcggagacaatggcgagaggcctcagagttcggcttcttacctgctttgcataggcagcaatctcctgctagtcccgcctccctctggcattctggcgcgcgaatggaggagccgagaagagagcgcagttctgattggagaacgcgcgtgtttacattctcacctctcccgggaagtggacgaatttagaccgcctcttccttcccgttgtttaaggcagttggttgccctcctgtccgtcagaggtgcagtaccagaggtggcgtgctgccgatttcgcgtttgccttgctggatgattccgcttgtttgccggctgcgtgagtgcttagagcttttcggtggaagatgccggacagtaacttcgcagagcgcagcgaggagcaggtgtctggtgctaaagtcatcgctcaggccctgaaaacgcaagatgtggagtacatatttggcatcgtaggcatcccagtgaccgaaatcgccattgctgcccagcagctaggcatcaagtacatcgggatgaggaatgagcaagcggcttgttatgctgcctccgcgattggatatctgacaagcaggccaggagtctgccttgttgtttctggcccaggtctcatccatgccttgggcggtatggcaaatgcaaacatgaactgctggcccttgcttgtgattggtggttcctctgaaagaaaccaagaaacaatgggagctttccaggagtttcctcaggttgaagcttgtagattatataccaagttctctgcccgcccaagcagcatagaagctattccttttgttattgaaaaggcagtgagaagcagtatctatggtcgtccaggtgcttgctatgttgacataccagcagattttgtgaaccttcaggtgaatgtgaattctataaagtacatggaacgctgcatgtcacctcctattagcatggcagaaacctctgctgtgtgcacggcggcttctgttattaggaatgccaaacaaccccttcttatcatcgggaaaggtgctgcttacgctcatgcagaagagagtatcaagaaattggtggagcaatataaactgccatttttgcccacccctatggggaagggtgttgtccctgacaaccatccatactgtgtaggtgcagccagatccagggctttgcaatttgctgatgtaattgtgttatttggtgccagactaaattggattttacattttggactgcctccaagatatcagccagatgtgaagtttatccaggttgatatctgtgcagaagaattggggaataatgtaaagcccgctgttactttgctaggaaacatacatgctgtcactaagcagcttttagaggaacttgataaaacaccatggcagtatcctccagagagcaagtggtggaaaactctgagagaaaaaatgaagagcaatgaagctgcatccaaggaactagcttctaaaaaatccctgcctatgaattattacacagtattctaccatgttcaagaacaactacctagagactgtttcgtggtaagtgaaggagcaaatactatggacattggacggactgtgcttcagaactaccttcctcgtcacaggcttgatgctggtactttcggaacaatgggagttggtttgggatttgctattgcagctgccgtggtggctaaagatagaagccctgggcaatggatcatctgtgtggaaggagacagtgcatttgggttttctggcatggaggtagaaaccatctgcaggtacaacttgccaatcatactgttggtagtgaataacaatggaatttaccaaggttttgatacagatacttggaaagaaatgttaaaatttcaagatgctactgcagtggtccctccaatgtgtttgctgccaaattcacattatgagcaagtcatgactgcatttggaggcaaagggtattttgtacaaacaccagaagaactccaaaaatccctgaggcagagcctagcagacacaactaaaccttctcttatcaacatcatgattgagccacaagccacacggaaggcccaggattttcattggctgacccgctctaatatgtaaataaagacgccagttggtggtcttgagttttctctttcttgcaagatgaaattttattttccacagcaaaattactctactgttaaaattgtgcaaaataaaataaacatttaaaatgacattttacagtaaaggaattgattaaaaacagaaaaagttag

SEQ ID NO: 102604 - DNA, 1771 bp, Homo sapiens
  Payload ID: 20
  Gene Symbol: HACL1
  Gene Name: 2-hydroxyacyl-CoA lyase 1
  ENST ID: ENST00000383779
  CDS Start-End: 95-454
ccagaggtggcgtgctgccgatttcgcgtttgccttgctggatgattccgcttgtttgccggctgcgtgagtgcttagagcttttcggtggaagatgccggacagtaacttcgcagagcgcagcgaggagcaggtgtctggtgctaaagtcatcgctcaggccctgaaaacgcaagatgtggagtacatatttggcatcgtaggcatcccagtgaccgaaatcgccattgctgcccagcagctaggcatcaagtacatcgggatgaggaatgagcaagcggcttgttatgctgcctccgcgattggatatctgacaagcaggccaggagtctgccttgttgtttctggcccaggtctcatccatgccttgggcggtatggcaaatgcaaacatgaactgctggttgaagcttgtagattatataccaagttctctgcccgcccaagcagcatagaagctattccttttgttattgaaaaggcagtgagaagcagtatctatggtcgtccaggtgcttgctatgttgacataccagcagattttgtgaaccttcaggtgaatgtgaattctataaagtacatggaacgctgcatgtcacctcctattagcatggcagaaacctctgctgtgtgcacggcggcttctgttattaggaatgccaaacaaccccttcttatcatcgggaaaggtgctgcttacgctcatgcagaagagagtatcaagaaattggtggagcaatataaactgccatttttgcccacccctatggggaagggtgttgtccctgacaaccatccatactgtgtaggtgcagccagatccaggttgatatctgtgcagaagaattggggaataatgtaaagcccgctgttactttgctaggaaacatacatgctgtcactaagcagcttttagaggaacttgataaaacaccatggcagtatcctccagagagcaagtggtggaaaactctgagagaaaaaatgaagagcaatgaagctgcatccaaggaactagcttctaaaaaatccctgcctatgaattattacacagtattctaccatgttcaagaacaactacctagagactgtttcgtggtaagtgaaggagcaaatactatggacattggacggactgtgcttcagaactaccttcctcgtcacaggcttgatgctggtactttcggaacaatgggagttggtttgggatttgctattgcagctgccgtggtggctaaagatagaagccctgggcaatggatcatctgtgtggaaggagacagtgcatttgggttttctggcatggaggtagaaaccatctgcaggtacaacttgccaatcatactgttggtagtgaataacaatggaatttaccaaggttttgatacagatacttggaaagaaatgttaaaatttcaagatgctactgcagtggtccctccaatgtgtttgctgccaaattcacattatgagcaagtcatgactgcatttggaggcaaagggtattttgtacaaacaccagaagaactccaaaaatccctgaggcagagcctagcagacacaactaaaccttctcttatcaacatcatgattgagccacaagccacacggaaggcccaggattttcattggctgacccgctctaatatgtaaataaagacgccagttggtggtcttgagttttctctttcttgcaagatgaaattttattttccacagcaaaattactctactgttaaaattgtgcaaaataaaataaacatttaaaatga

SEQ ID NO: 102605 - DNA, 1880 bp, Homo sapiens
  Payload ID: 20
  Gene Symbol: HACL1
  Gene Name: 2-hydroxyacyl-CoA lyase 1
  Uniprot ID: Q9UJ83
  ENST ID: ENST00000456194
  CDS Start-End: 107-1762
agaggtgcagtaccagaggtggcgtgctgccgatttcgcgtttgccttgctggatgattccgcttgtttgccggctgcgtgagtgcttagagcttttcggtggaagatgccggacagtaacttcgcagagcgcagcgaggagcaggtgtctggtgctaaagtcatcgctcaggccctgaaaacgcaagatgtggagtacatatttggcatcgtaggcatcccagtgaccgaaatcgccattgctgcccagcagctaggcatcaagtacatcgggatgaggaatgagcaagcggcttgttatgctgcctccgcgattggatatctgacaagcaggcccttgcttgtgattggtggttcctctgaaagaaaccaagaaacaatgggagctttccaggagtttcctcaggttgaagcttgtagattatataccaagttctctgcccgcccaagcagcatagaagctattccttttgttattgaaaaggcagtgagaagcagtatctatggtcgtccaggtgcttgctatgttgacataccagcagattttgtgaaccttcaggtgaatgtgaattctataaagtacatggaacgctgcatgtcacctcctattagcatggcagaaacctctgctgtgtgcacggcggcttctgttattaggaatgccaaacaaccccttcttatcatcgggaaaggtgctgcttacgctcatgcagaagagagtatcaagaaattggtggagcaatataaactgccatttttgcccacccctatggggaagggtgttgtccctgacaaccatccatactgtgtaggtgcagccagatccagggctttgcaatttgctgatgtaattgtgttatttggtgccagactaaattggattttacattttggactgcctccaagatatcagccagatgtgaagtttatccaggttgatatctgtgcagaagaattggggaataatgtaaagcccgctgttactttgctaggaaacatacatgctgtcactaagcagcttttagaggaacttgataaaacaccatggcagtatcctccagagagcaagtggtggaaaactctgagagaaaaaatgaagagcaatgaagctgcatccaaggaactagcttctaaaaaatccctgcctatgaattattacacagtattctaccatgttcaagaacaactacctagagactgtttcgtggtaagtgaaggagcaaatactatggacattggacggactgtgcttcagaactaccttcctcgtcacaggcttgatgctggtactttcggaacaatgggagttggtttgggatttgctattgcagctgccgtggtggctaaagatagaagccctgggcaatggatcatctgtgtggaaggagacagtgcatttgggttttctggcatggaggtagaaaccatctgcaggtacaacttgccaatcatactgttggtagtgaataacaatggaatttaccaaggttttgatacagatacttggaaagaaatgttaaaatttcaagatgctactgcagtggtccctccaatgtgtttgctgccaaattcacattatgagcaagtcatgactgcatttggaggcaaagggtattttgtacaaacaccagaagaactccaaaaatccctgaggcagagcctagcagacacaactaaaccttctcttatcaacatcatgattgagccacaagccacacggaaggcccaggattttcattggctgacccgctctaatatgtaaataaagacgccagttggtggtcttgagttttctctttcttgcaagatgaaattttattttccacagcaaaattactctactgttaaaattgtgcaaaataaaataaacatttaaaatg

SEQ ID NO: 102606 - DNA, 861 bp, Homo sapiens
  Payload ID: 20
  Gene Symbol: HACL1
  Gene Name: 2-hydroxyacyl-CoA lyase 1
  ENST ID: ENST00000421993
  CDS Start-End: 130-861
agttggttgccctcctgtccgtcagaggtgcagtaccagaggtggcgtgctgccgatttcgcgtttgccttgctggatgattccgcttgtttgccggctgcgtgagtgcttagagcttttcggtggaagatgccggacagtaacttcgcagagcgcagcgaggagcaggtgtctggtgctaaagtcatcgctcaggccctgaaaacgcaagatgtggagtacatatttggcatcgtaggcatcccagtgaccgaaatcgccattgctgcccagcagctaggcatcaagtacatcgggatgaggaatgagcaagcggcttgttatgctgcctccgcgattggatatctgacaagcaggcccttgcttgtgattggtggttcctctgaaagaaaccaagaaacaatgggagctttccaggagtttcctcaggttgaagcttgtagattatataccaagttctctgcccgcccaagcagcatagaagctattccttttgttattgaaaaggcagtgagaagcagtatctatggtcgtccaggtgcttgctatgttgacataccagcagattttgtgaaccttcaggtgaatgtgaattctataaagtacatggaacgctgcatgtcacctcctattagcatggcagaaacctctgctgtgtgcacggcggcttctgttattaggaatgccaaacaaccccttcttatcatcgggaaaggtgctgcttacgctcatgcagaagagagtatcaagaaattggtggagcaatataaactgccatttttgcccacccctatggggaagggtgttgtccctgacaaccatccatactgtgtaggtgcagccagatccaggtgtgtggca

SEQ ID NO: 102607 - DNA, 1637 bp, Homo sapiens
  Payload ID: 20
  Gene Symbol: HACL1
  Gene Name: 2-hydroxyacyl-CoA lyase 1
  ENST ID: ENST00000422591
  CDS Start-End: 107-520
agaggtgcagtaccagaggtggcgtgctgccgatttcgcgtttgccttgctggatgattccgcttgtttgccggctgcgtgagtgcttagagcttttcggtggaagatgccggacagtaacttcgcagagcgcagcgaggagcaggtgtctggtgctaaagtcatcgctcaggccctgaaaacgcaagatgtggagtacatatttggcatcgtaggcatcccagtgaccgaaatcgccattgctgcccagcagctaggcatcaagtacatcgggatgaggaatgagcaagcggcttgttatgctgcctccgcgattggatatctgacaagcaggccaggagtctgccttgttgtttctggcccaggtctcatccatgccttgggcggtatggcaaatgcaaacatgaactgctggcccttgcttgtgattggtggttcctctgaaagaaaccaagaaacaatgggagctttccaggagtttcctcaggtacatggaacgctgcatgtcacctcctattagcatggcagaaacctctgctgtgtgcacggcggcttctgttattaggaatgccaaacaaccccttcttatcatcgggaaaggtgctgcttacgctcatgcagaagagagtatcaagaaattggtggagcaatataaactgccatttttgcccacccctatggggaagggtgttgtccctgacaaccatccatactgtgtaggtgcagccagatccagggctttgcaatttgctgatgtaattgtgttatttggtgccagactaaattggattttacattttggactgcctccaagatatcagccagatgtgaagtttatccaggttgatatctgtgcagaagaattggggaataatgtaaagcccgctgttactttgctaggaaacatacatgctgtcactaagcagcttttagaggaacttgataaaacaccatggcagtatcctccagagagcaagtggtggaaaactctgagagaaaaaatgaagagcaatgaagctgcatccaaggaactagcttctaaaaaatccctgcctatgaattattacacagtattctaccatgttcaagaacaactacctagagactgtttcgtggtaagtgaaggagcaaatactatggacattggacggactgtgcttcagaactaccttcctcgtcacaggcttgatgctggtactttcggaacaatgggagttggtttgggatttgctattgcagctgccgtggtggctaaagatagaagccctgggcaatggatcatctgtgtggaaggagacagtgcatttgggttttctggcatggaggtagaaaccatctgcaggtacaacttgccaatcatactgttggtagtgaataacaatggaatttaccaaggttttgatacagatacttggaaagaaatgttaaaatttcaagatgctactgcagtggtccctccaatgtgtttgctgccaaattcacattatgagcaagtcatgactgcatttggaggcaaagggtattttgtacaaacaccagaagaactccaaaaatccctgaggcagagcctagcagacacaactaaaccttctcttatcaacatcatgattgagccacaagccacacggaaggcccag

SEQ ID NO: 102608 - DNA, 1269 bp, Homo sapiens
  Payload ID: 20
  Gene Symbol: HACL1
  Gene Name: 2-hydroxyacyl-CoA lyase 1
  ENST ID: ENST00000435217
  CDS Start-End: 107-1120
agaggtgcagtaccagaggtggcgtgctgccgatttcgcgtttgccttgctggatgattccgcttgtttgccggctgcgtgagtgcttagagcttttcggtggaagatgccggacagtaacttcgcagagcgcagcgaggagcaggtgtctggtgctaaagtcatcgctcaggccctgaaaacgcaagatgtggagtacatatttggcatcgtaggcatcccagtgaccgaaatcgccattgctgcccagcagctaggcatcaagtacatcgggatgaggaatgagcaagcggttgatatctgtgcagaagaattggggaataatgtaaagcccgctgttactttgctaggaaacatacatgctgtcactaagcagcttttagaggaacttgataaaacaccatggcagtatcctccagagagcaagtggtggaaaactctgagagaaaaaatgaagagcaatgaagctgcatccaaggaactagcttctaaaaaatccctgcctatgaattattacacagtattctaccatgttcaagaacaactacctagagactgtttcgtggtaagtgaaggagcaaatactatggacattggacggactgtgcttcagaactaccttcctcgtcacaggcttgatgctggtactttcggaacaatgggagttggtttgggatttgctattgcagctgccgtggtggctaaagatagaagccctgggcaatggatcatctgtgtggaaggagacagtgcatttgggttttctggcatggaggtagaaaccatctgcaggtacaacttgccaatcatactgttggtagtgaataacaatggaatttaccaaggttttgatacagatacttggaaagaaatgttaaaatttcaagatgctactgcagtggtccctccaatgtgtttgctgccaaattcacattatgagcaagtcatgactgcatttggaggcaaagggtattttgtacaaacaccagaagaactccaaaaatccctgaggcagagcctagcagacacaactaaaccttctcttatcaacatcatgattgagccacaagccacacggaaggcccaggattttcattggctgacccgctctaatatgtaaataaagacgccagttggtggtcttgagttttctctttcttgcaagatgaaattttattttccacagcaaaattactctactgttaaaattgtgcaaaataaaataaacatttaaaatgacattttacagtaaaggaattgattaaaaac

SEQ ID NO: 102609 - DNA, 569 bp, Homo sapiens
  Payload ID: 20
  Gene Symbol: HACL1
  Gene Name: 2-hydroxyacyl-CoA lyase 1
  ENST ID: ENST00000414979
  CDS Start-End: 99-569
agtaccagaggtggcgtgctgccgatttcgcgtttgccttgctggatgattccgcttgtttgccggctgcgtgagtgcttagagcttttcggtggaagatgccggacagtaacttcgcagagcgcagcgaggagcaggtgtctggtgctaaagtcatcgctcaggccctgaaaacgcaagatgtggagtacatatttggcatcgtaggcatcccagtgaccgaaatcgccattgctgcccagcagctaggcatcaagtacatcgggatgaggaatgagcaagcggttgaagcttgtagattatataccaagttctctgcccgcccaagcagcatagaagctattccttttgttattgaaaaggcagtgagaagcagtatctatggtcgtccaggtgcttgctatgttgacataccagcagattttgtgaaccttcaggtgaatgtgaattctataaagtacatggaacgctgcatgtcacctcctattagcatggcagaaacctctgctgtgtgcacggcggcttctgttattaggaatgccaaacaaccccttcttatcatcgggaaa

SEQ ID NO: 102610 - DNA, 1734 bp, Homo sapiens
  Payload ID: 20
  Gene Symbol: HACL1
  Gene Name: 2-hydroxyacyl-CoA lyase 1
  Uniprot ID: Q9UJ83
  ENST ID: ENST00000451445
  CDS Start-End: 125-1615
gttgccctcctgtccgtcagaggtgcagtaccagaggtggcgtgctgccgatttcgcgtttgccttgctggatgattccgcttgtttgccggctgcgtgagtgcttagagcttttcggtggaagatgccggacagtaacttcgcagagcgcagcgaggagcaggtgtctggtgctaaagtcatcgctcaggccctgaaaacgcaagatgtggagtacatatttggcatcgtaggcatcccagtgaccgaaatcgccattgctgcccagcagctaggcatcaagtacatcgggatgaggaatgagcaagcggcttgttatgctgcctccgcgattggatatctgacaagcaggccaggagtctgccttgttgtttctggcccaggtctcatccatgccttgggcggtatggcaaatgcaaacatgaactgctggtacatggaacgctgcatgtcacctcctattagcatggcagaaacctctgctgtgtgcacggcggcttctgttattaggaatgccaaacaaccccttcttatcatcgggaaaggtgctgcttacgctcatgcagaagagagtatcaagaaattggtggagcaatataaactgccatttttgcccacccctatggggaagggtgttgtccctgacaaccatccatactgtgtaggtgcagccagatccagggctttgcaatttgctgatgtaattgtgttatttggtgccagactaaattggattttacattttggactgcctccaagatatcagccagatgtgaagtttatccaggttgatatctgtgcagaagaattggggaataatgtaaagcccgctgttactttgctaggaaacatacatgctgtcactaagcagcttttagaggaacttgataaaacaccatggcagtatcctccagagagcaagtggtggaaaactctgagagaaaaaatgaagagcaatgaagctgcatccaaggaactagcttctaaaaaatccctgcctatgaattattacacagtattctaccatgttcaagaacaactacctagagactgtttcgtggtaagtgaaggagcaaatactatggacattggacggactgtgcttcagaactaccttcctcgtcacaggcttgatgctggtactttcggaacaatgggagttggtttgggatttgctattgcagctgccgtggtggctaaagatagaagccctgggcaatggatcatctgtgtggaaggagacagtgcatttgggttttctggcatggaggtagaaaccatctgcaggtacaacttgccaatcatactgttggtagtgaataacaatggaatttaccaaggttttgatacagatacttggaaagaaatgttaaaatttcaagatgctactgcagtggtccctccaatgtgtttgctgccaaattcacattatgagcaagtcatgactgcatttggaggcaaagggtattttgtacaaacaccagaagaactccaaaaatccctgaggcagagcctagcagacacaactaaaccttctcttatcaacatcatgattgagccacaagccacacggaaggcccaggattttcattggctgacccgctctaatatgtaaataaagacgccagttggtggtcttgagttttctctttcttgcaagatgaaattttattttccacagcaaaattactctactgttaaaattgtgcaaaataaaataaacatttaaaatga

SEQ ID NO: 102611 - DNA, 1721 bp, Homo sapiens
  Payload ID: 20
  Gene Symbol: HACL1
  Gene Name: 2-hydroxyacyl-CoA lyase 1
  Uniprot ID: Q9UJ83
  ENST ID: ENST00000457447
  CDS Start-End: 107-1663
agaggtgcagtaccagaggtggcgtgctgccgatttcgcgtttgccttgctggatgattccgcttgtttgccggctgcgtgagtgcttagagcttttcggtggaagatgccggacagtaacttcgcagagcgcagcgaggagcaggtgtctggtgctaaagtcatcgctcaggccctgaaaacgcaagatgtggagtacatatttggcatcgtaggcatcccagtgaccgaaatcgccattgctgcccagcagctaggcatcaagtacatcgggatgaggaatgagcaagcggcttgttatgctgcctccgcgattggatatctgacaagcaggccaggagtctgccttgttgtttctggcccaggtctcatccatgccttgggcggtatggcaaatgcaaacatgaactgctggcccttgcttgtgattggtggttcctctgaaagaaaccaagaaacaatgggagctttccaggagtttcctcaggcagtgagaagcagtatctatggtcgtccaggtgcttgctatgttgacataccagcagattttgtgaaccttcaggtgaatgtgaattctataaagtacatggaacgctgcatgtcacctcctattagcatggcagaaacctctgctgtgtgcacggcggcttctgttattaggaatgccaaacaaccccttcttatcatcgggaaaggtgctgcttacgctcatgcagaagagagtatcaagaaattggtggagcaatataaactgccatttttgcccacccctatggggaagggtgttgtccctgacaaccatccatactgtgtaggtgcagccagatccagggctttgcaatttgctgatgtaattgtgttatttggtgccagactaaattggattttacattttggactgcctccaagatatcagccagatgtgaagtttatccaggttgatatctgtgcagaagaattggggaataatgtaaagcccgctgttactttgctaggaaacatacatgctgtcactaagcaggaactagcttctaaaaaatccctgcctatgaattattacacagtattctaccatgttcaagaacaactacctagagactgtttcgtggtaagtgaaggagcaaatactatggacattggacggactgtgcttcagaactaccttcctcgtcacaggcttgatgctggtactttcggaacaatgggagttggtttgggatttgctattgcagctgccgtggtggctaaagatagaagccctgggcaatggatcatctgtgtggaaggagacagtgcatttgggttttctggcatggaggtagaaaccatctgcaggtacaacttgccaatcatactgttggtagtgaataacaatggaatttaccaaggttttgatacagatacttggaaagaaatgttaaaatttcaagatgctactgcagtggtccctccaatgtgtttgctgccaaattcacattatgagcaagtcatgactgcatttggaggcaaagggtattttgtacaaacaccagaagaactccaaaaatccctgaggcagagcctagcagacacaactaaaccttctcttatcaacatcatgattgagccacaagccacacggaaggcccaggattttcattggctgacccgctctaatatgtaaataaagacgccagttggtggtcttgagttttctctttcttgcaagatgaaattttatt

SEQ ID NO: 102612 - DNA, 2214 bp, Homo sapiens
  Payload ID: 20
  Gene Symbol: HACL1
  Gene Name: 2-hydroxyacyl-CoA lyase 1
  ENST ID: ENST00000628377
  CDS Start-End: 390-749
attctccctttacagccccgaaaacgctccagctggccgactcggagacaatggcgagaggcctcagagttcggcttcttacctgctttgcataggcagcaatctcctgctagtcccgcctccctctggcattctggcgcgcgaatggaggagccgagaagagagcgcagttctgattggagaacgcgcgtgtttacattctcacctctcccgggaagtggacgaatttagaccgcctcttccttcccgttgtttaaggcagttggttgccctcctgtccgtcagaggtgcagtaccagaggtggcgtgctgccgatttcgcgtttgccttgctggatgattccgcttgtttgccggctgcgtgagtgcttagagcttttcggtggaagatgccggacagtaacttcgcagagcgcagcgaggagcaggtgtctggtgctaaagtcatcgctcaggccctgaaaacgcaagatgtggagtacatatttggcatcgtaggcatcccagtgaccgaaatcgccattgctgcccagcagctaggcatcaagtacatcgggatgaggaatgagcaagcggcttgttatgctgcctccgcgattggatatctgacaagcaggccaggagtctgccttgttgtttctggcccaggtctcatccatgccttgggcggtatggcaaatgcaaacatgaactgctggttgaagcttgtagattatataccaagttctctgcccgcccaagcagcatagaagctattccttttgttattgaaaaggcagtgagaagcagtatctatggtcgtccaggtgcttgctatgttgacataccagcagattttgtgaaccttcaggtgaatgtgaattctataaagtacatggaacgctgcatgtcacctcctattagcatggcagaaacctctgctgtgtgcacggcggcttctgttattaggaatgccaaacaaccccttcttatcatcgggaaaggtgctgcttacgctcatgcagaagagagtatcaagaaattggtggagcaatataaactgccatttttgcccacccctatggggaagggtgttgtccctgacaaccatccatactgtgtaggtgcagccagatccagggctttgcaatttgctgatgtaattgtgttatttggtgccagactaaattggattttacattttggactgcctccaagatatcagccagatgtgaagtttatccaggttgatatctgtgcagaagaattggggaataatgtaaagcccgctgttactttgctaggaaacatacatgctgtcactaagcagcttttagaggaacttgataaaacaccatggcagtatcctccagagagcaagtggtggaaaactctgagagaaaaaatgaagagcaatgaagctgcatccaaggaactagcttctaaaaaatccctgcctatgaattattacacagtattctaccatgttcaagaacaactacctagagactgtttcgtggtaagtgaaggagcaaatactatggacattggacggactgtgcttcagaactaccttcctcgtcacaggcttgatgctggtactttcggaacaatgggagttggtttgggatttgctattgcagctgccgtggtggctaaagatagaagccctgggcaatggatcatctgtgtggaaggagacagtgcatttgggttttctggcatggaggtagaaaccatctgcaggtacaacttgccaatcatactgttggtagtgaataacaatggaatttaccaaggttttgatacagatacttggaaagaaatgttaaaatttcaagatgctactgcagtggtccctccaatgtgtttgctgccaaattcacattatgagcaagtcatgactgcatttggaggcaaagggtattttgtacaaacaccagaagaactccaaaaatccctgaggcagagcctagcagacacaactaaaccttctcttatcaacatcatgattgagccacaagccacacggaaggcccaggattttcattggctgacccgctctaatatgtaaataaagacgccagttggtggtcttgagttttctctttcttgcaagatgaaattttattttccacagcaaaattactctactgttaaaattgtgcaaaataaaataaacatttaaaatgacattttacagtaaaggaattgattaaaaacagaaaaagttag

SEQ ID NO: 102613 - DNA, 2415 bp, Homo sapiens
  Payload ID: 21
  Gene Symbol: OGFOD1
  Gene Name: 2-oxoglutarate and iron-dependent oxygenase domain containing 1
  ENST ID: ENST00000336111
  CDS Start-End: 56-175
cacgataaaggggacatgccgggagttgcagtaccctcaggaagaagtcattgtcatggacatggacccttttcttcactgtgtgatcccaaacttcatccaaagccaagacttcttagaagggcttcagaaggaactgatgaacttggacttccatgagaatctgatgatttgaagaagagaagagagcctcacatctccactttaaggaaaattctgtttgaagatttccggtcctggctttctgatatttctaaaattgacctggaatcaaccattgacatgtcctgtgctaaatatgaattcactgatgccctgctgtgccatgatgatgagctggaagggcgccggattgccttcatcctgtacctggttcctccctgggacaggagcatgggtggtaccctggacctgtacagcattgatgaacactttcagccgaagcagattgtcaagtctcttatcccttcgtggaacaaactggttttctttgaagtatctcctgtgtcctttcaccaggtgtctgaagtgctgtctgaagaaaagtcacgtttgtctataagtggctggtttcatggtccatcattgactcggcctcccaactactttgaaccccccatacctcggagccctcacatcccacaagatcatgagattttgtatgattggatcaaccctacttatctggacatggattaccaagttcaaattcaagaagagtttgaagaaagttctgaaattctcctgaaggagtttcttaagcctgagaaattcacgaaagtctgtgaggccttggagcatggacatgtggaatggagcagccgaggtccccctaacaaaaggttttatgagaaagctgaggagagtaagcttcctgagatattgaaggagtgcatgaagttatttcgctctgaggcactattcttgctgctctccaacttcacaggcctgaagcttcatttcttggccccttcggaagaagatgagatgaatgataaaaaagaggcagaaaccactgatatcactgaagaagggactagccatagtcctcctgagccagagaataatcagatggccatcagcaacaacagccaacagagcaatgagcagacagacccagagccagaggaaaatgaaacaaagaaagaatcaagtgttcccatgtgccaaggggaactgaggcattggaagaccggtcactacactttaattcatgaccatagcaaggctgaatttgccctagacttaattctgtactgtggctgtgaaggctgggagccagaatatggcggttttacttcttacattgccaaaggtgaagatgaagagctgctaacagtgaatccagaaagcaattctttggcattggtctacagagacagagagactctgaaatttgtcaagcatattaaccaccgaagcctggaacaaaagaaaaccttcccaaacagaacaggtttctgggacttttcattcatctattatgaatgacagcactgggcaaagctgaacaaaaatgtgacccttcgtaattactgggaagtctgaaagagctaagcatggagtcaaggagaactacatggtagcttgcctgacagtgttcttaaaactggttgtcttttactaggactcataatgattgtcctcaaccgagaccttgagcttgcagctaagtacttatctcttgattaaaaaaaaaaagttggcttttttttttttaacatttagtcctttttccatattggcttcttcagtgaatttttaagttcaatttgtttttattgaggtaaaatatttataacataaaactgaccagcttacccatttttaaatatgcaattcagtggattaagtacattctcattgttgtccagccatcaccatcatccatctccagaagttttccatcttcccaaattctgtgcccattgaacaataactccccacctccccttcccctagcaacagccataccttttgtctctatcatcaacttcactactcatatttctcatgtaagtggaatcatacagtatttgtccttttgtgactggtttcacttagcataaagtctttaagatgcatccatgtttccagtgtttcggtttttttagaaaaactcatacgtgattgcagccgggcatggtggctcacgcctgtaatcccagcacttgggaggccaaggcaggcggatcacctgaggtcaggagttaaagaccagcctgacaaacatggagaaaccccatctctactaaaaatacaaaattagctgggcgtggtggcacatgcctgtaatcccagctactcaggaggctggggcaggagaattggttgaacccaggaggcggaggttgcagtgagccgagattgtgccactgcactccagcctgggcaacaagagtgaaactctgtctc

SEQ ID NO: 102614 - DNA, 474 bp, Homo sapiens
  Payload ID: 21
  Gene Symbol: OGFOD1
  Gene Name: 2-oxoglutarate and iron-dependent oxygenase domain containing 1
  ENST ID: ENST00000569802
  CDS Start-End: 59-199
aaacacgataaaggggacatgccgggagttgcagtaccctcaggaagaagtcattgtcatggacatggacccttttcttcactgtgtgatcccaaacttcatccaaagccaagacttcttagaagggcttcagaaggaactgatgaacttggacttccatgagaagtataatgatttatataagttccagcagagctgattggtcagatggttgtatcctgaccttccccagatctttctgtctttggaccttatacacatgactgaattaaccaggataaatacatgaaagatatgactcttaataattcagaaagctgaaaactaaactgctttccatggaaaattctgtttgaagatttccggtcctggctttctgatatttctaaaattgacctggaatcaaccattgacatgtcctgtgctaaatatgaattcactgatgccctgctgtgccatgatgatgagctggaa

SEQ ID NO: 102615 - DNA, 567 bp, Homo sapiens
  Payload ID: 21
  Gene Symbol: OGFOD1
  Gene Name: 2-oxoglutarate and iron-dependent oxygenase domain containing 1
  ENST ID: ENST00000565682
  CDS Start-End: 91-420
acacgataaaggggacatgccgggagttgcagtaccctcaggaaggtagcgtcttgatctgcgtggcgtggttctgtgccttgggaagagatgaatgggaagcggccagcggagcccggcccagcccgggtgggaaaaaagggaaagaaggaggtgatggcggagttttcggacgctgttacggaagaaaccttgaaaaagcaggtggctgaggcctggagccgcaggacgccgttcagtcacgaagtcattgtcatggacatggacccttttcttcactgtgtgatcccaaacttcatccaaagccaagacttcttagaagggcttcagaaggaactgatgaacttggacttccatgagaagtataatgatttatataagttccagcaggaaatcccttttttttctctattttcatgatcaagtctgatgatttgaagaagagaagagagcctcacatctccactttaaggaaaattctgtttgaagatttccggtcctggctttctgatatttctaaaattgacctggaatcaaccattgacatgtcctgtgctaaatatgaat

SEQ ID NO: 102616 - DNA, 586 bp, Homo sapiens
  Payload ID: 21
  Gene Symbol: OGFOD1
  Gene Name: 2-oxoglutarate and iron-dependent oxygenase domain containing 1
  ENST ID: ENST00000562150
  CDS Start-End: 93-586
aaacacgataaaggggacatgccgggagttgcagtaccctcaggaaggtagcgtcttgatctgcgtggcgtggttctgtgccttgggaagagatgaatgggaagcggccagcggagcccggcccagcccgggtgggaaaaaagggaaagaaggaggtgatggcggagttttcggacgctgttacggaagaaaccttgaaaaagcaggtggctgaggcctggagccgcaggacgccgttcaaagtcattgtcatggacatggacccttttcttcactgtgtgatcccaaacttcatccaaagccaagacttcttagaagggcttcagaaggaactgatgaacttggacttccatgagaagtataatgatttatataagttccagcagtctgatgatttgaagaagagaagagagcctcacatctccactttaaggaaaattctgtttgaagatttccggtcctggctttctgatatttctaaaattgacctggaatcaaccattgacatgtcctgtgctaaatatgaattcactgatgccctgctgtgccatgatgatgagctggaagggcgccggattgccttcat

SEQ ID NO: 102617 - DNA, 4647 bp, Homo sapiens
  Payload ID: 21
  Gene Symbol: OGFOD1
  Gene Name: 2-oxoglutarate and iron-dependent oxygenase domain containing 1
  Uniprot ID: Q8N543
  ENST ID: ENST00000566157
  CDS Start-End: 124-1752
actttggtgcttcccattgggtagggccgggaaacacgataaaggggacatgccgggagttgcagtaccctcaggaaggtagcgtcttgatctgcgtggcgtggttctgtgccttgggaagagatgaatgggaagcggccagcggagcccggcccagcccgggtgggaaaaaagggaaagaaggaggtgatggcggagttttcggacgctgttacggaagaaaccttgaaaaagcaggtggctgaggcctggagccgcaggacgccgttcagtcacgaagtcattgtcatggacatggacccttttcttcactgtgtgatcccaaacttcatccaaagccaagacttcttagaagggcttcagaaggaactgatgaacttggacttccatgagaagtataatgatttatataagttccagcagtctgatgatttgaagaagagaagagagcctcacatctccactttaaggaaaattctgtttgaagatttccggtcctggctttctgatatttctaaaattgacctggaatcaaccattgacatgtcctgtgctaaatatgaattcactgatgccctgctgtgccatgatgatgagctggaagggcgccggattgccttcatcctgtacctggttcctccctgggacaggagcatgggtggtaccctggacctgtacagcattgatgaacactttcagccgaagcagattgtcaagtctcttatcccttcgtggaacaaactggttttctttgaagtatctcctgtgtcctttcaccaggtgtctgaagtgctgtctgaagaaaagtcacgtttgtctataagtggctggtttcatggtccatcattgactcggcctcccaactactttgaaccccccatacctcggagccctcacatcccacaagatcatgagattttgtatgattggatcaaccctacttatctggacatggattaccaagttcaaattcaagaagagtttgaagaaagttctgaaattctcctgaaggagtttcttaagcctgagaaattcacgaaagtctgtgaggccttggagcatggacatgtggaatggagcagccgaggtccccctaacaaaaggttttatgagaaagctgaggagagtaagcttcctgagatattgaaggagtgcatgaagttatttcgctctgaggcactattcttgctgctctccaacttcacaggcctgaagcttcatttcttggccccttcggaagaagatgagatgaatgataaaaaagaggcagaaaccactgatatcactgaagaagggactagccatagtcctcctgagccagagaataatcagatggccatcagcaacaacagccaacagagcaatgagcagacagacccagagccagaggaaaatgaaacaaagaaagaatcaagtgttcccatgtgccaaggggaactgaggcattggaagaccggtcactacactttaattcatgaccatagcaaggctgaatttgccctagacttaattctgtactgtggctgtgaaggctgggagccagaatatggcggttttacttcttacattgccaaaggtgaagatgaagagctgctaacagtgaatccagaaagcaattctttggcattggtctacagagacagagagactctgaaatttgtcaagcatattaaccaccgaagcctggaacaaaagaaaaccttcccaaacagaacaggtttctgggacttttcattcatctattatgaatgacagcactgggcaaagctgaacaaaaatgtgacccttcgtaattactgggaagtctgaaagagctaagcatggagtcaaggagaactacatggtagcttgcctgacagtgttcttaaaactggttgtcttttactaggactcataatgattgtcctcaaccgagaccttgagcttgcagctaagtacttatctcttgattaaaaaaaaaaagttggcttttttttttttaacatttagtcctttttccatattggcttcttcagtgaatttttaagttcaatttgtttttattgaggtaaaatatttataacataaaactgaccagcttacccatttttaaatatgcaattcagtggattaagtacattctcattgttgtccagccatcaccatcatccatctccagaagttttccatcttcccaaattctgtgcccattgaacaataactccccacctccccttcccctagcaacagccataccttttgtctctatcatcaacttcactactcatatttctcatgtaagtggaatcatacagtatttgtccttttgtgactggtttcacttagcataaagtctttaagatgcatccatgtttccagtgtttcggtttttttagaaaaactcatacgtgattgcagccgggcatggtggctcacgcctgtaatcccagcacttgggaggccaaggcaggcggatcacctgaggtcaggagttaaagaccagcctgacaaacatggagaaaccccatctctactaaaaatacaaaattagctgggcgtggtggcacatgcctgtaatcccagctactcaggaggctggggcaggagaattggttgaacccaggaggcggaggttgcagtgagccgagattgtgccactgcactccagcctgggcaacaagagtgaaactctgtctcaaaaaaaaaaaagaagaaaaaaacataagtgattgcagaattttgttcttctcataatttctggtttagaaaattatggagccttacatcctgatcatgctgggccttagaattctgacacagtgagtcatcacatttcctcccactgcctgtggccttgttccaccatgactctcacagtacagtgtaggcttagtgtagtattattcccttggaaagggtctggcctaccatcacatgccccaagaaacttctggttggtaaagaagataggctgcttattgccatgtgtagtcacttccaagtgcccactgcctttccatcctgcaattgtggcctgtgtataattaaatgattttagcctcacgtgttgcttctgttttcctaaatactgtagggtcaactatataactaattgctttttattttaagagacggaatgctaaaaccacatcagaatgccaagaggctgtgcatcttgttaatttttttcttgaactgttccagggagttacatcataattacctgtgtgtgggtatgcatgggtggatgaaagatgctgttctcattccatcccaatagagtcttctgtttcctttctcttttttacatttatttttagcttttgcagtagtgtttagtgtgggttttactaattaatagaaaaagcactgggcctttaaacttcttaactactcttctctttcatctcctaaaacttttgagtattcattcttttctgaagtttgcatttaaatgaaaatgactttcgctttggcttttaggtttagtttcaaaaaggtttaattctgcaccctagccagttaagaaatgttttagcaggtatgcccttgatatggatatttatatattttacacatgtagtaatattatttctataacttactgttataaaacactaatttttaaatgatgagataaaaagaaatatctagaactagttctaacattgtcttcccctatgcatatggtaacgaaccattttacaccatactattttggagaccacaattttttttgcgtttgagatggagtctcactctgtggcccaggctggagtacagtggcatgatatcggctcactgtgacctctgtctcctgggttcaagcaattctcctgcctcagcctcctaagtagctgggattacaggcacctgcctccatacccagctaatttttttatatttttagtagagacagggtttcaccatgttggccaggctggagaccacaattttttaaccacagtgtagcaacactcaagtgggattgcgaatactgttactaatggttaatgtcacagcttgccttttctatattccagctgactaaaggtcatctcactcacttgccttctgatgtgttttcatgagttgaggggaaagggtgtcagtggcataacttcaggaagacccagggaaaagtgcttgggtaggtgaaactgtcatgtgtgccaagcttggaaaatagtttgagactcatggctgtaggcaccatccaaggccaattttccaattctggaaagccaaatctgaatcttagaatacctcacaagtgttaaaatgtgctttttagtgtctcctttatctcagtgtgtttatgatctgtcaacacataatcatcttttatacactacaaaaagggactcgggtgtctgaggggagagaatccctaggagcccaactctgatgttgctgtcagttacatcatctacagcagcacctcttagattgtgaaggatggtgtaacttaaaagattgtgtttctgcactgaagatagatacacagtgatagtgaagtttgttttccttatagtacttcattttgcatcttgattgctttttagggcctggggccaatgtcaacaactcttaggtagcaaaagaagaattagaacatgggcatcttttttatacctctttcagataaaagctatgatgttcacctgt

SEQ ID NO: 102618 - DNA, 584 bp, Homo sapiens
  Payload ID: 21
  Gene Symbol: OGFOD1
  Gene Name: 2-oxoglutarate and iron-dependent oxygenase domain containing 1
  ENST ID: ENST00000561646
  CDS Start-End: 59-584
aaacacgataaaggggacatgccgggagttgcagtaccctcaggaagaagtcattgtcatggacatggacccttttcttcactgtgtgatcccaaacttcatccaaagccaagacttcttagaagggcttcagaaggaactgatgaacttggacttccatgagaagtataatgatttatataagttccagcagtctgatgatttgaagaagagaagagagcctcacatctccactttaaggaaaattctgtttgaagatttccggtcctggctttctgatatttctaaaattgacctggaatcaaccattgacatgtcctgtgctaaatatgaattcactgatgccctgctgtgccatgatgatgagctggaagggcgccggattgccttcatcctgtacctggttcctccctgggacaggagcatgggtggtaccctggacctgtacagcattgatgaacactttcagccgaagcagattgtcaagtctcttatcccttcgtggaacaaactggttttctttgaagtatctcctgtgtcctttcaccaggtgtctgaagtgctgtctgaagaaaagtcacgtt

SEQ ID NO: 102619 - DNA, 1681 bp, Homo sapiens
  Payload ID: 21
  Gene Symbol: OGFOD1
  Gene Name: 2-oxoglutarate and iron-dependent oxygenase domain containing 1
  ENST ID: ENST00000568397
  CDS Start-End: 52-1551
aggaaggtagcgtcttgatctgcgtggcgtggttctgtgccttgggaagagatgaatgggaagcggccagcggagcccggcccagcccgggtgggaaaaaagggaaagaaggaggtgatggcggagttttcggacgctgttacggaagaaaccttgaaaaagcaggtggctgaggcctggagccgcaggacgccgttcagtcacgaagtcattgtcatggacatggacccttttcttcactgtgtgatcccaaacttcatccaaagccaagacttcttagaagggcttcagaaggaactgatgaacttggacttccatgagaagtataatgatttatataagttccagcagtctgatgatttgaagaagagaagagagcctcacatctccactttaaggaaaattctgtttgaagatttccggtcctggctttctgatatttctaaaattgacctggaatcaaccattgacatgtcctgtgctaaatatgaattcactgatgccctgctgtgccatgatgatgagctggaagggcgccggattgccttcatcctgtacctggttcctccctgggacaggagcatgggtggtaccctggacctgtacagcattgatgaacactttcagccgaagcagattgtcaagtctcttatcccttcgtggaacaaactggttttctttgaagtatctcctgtgtcctttcaccagcatgagattttgtatgattggatcaaccctacttatctggacatggattaccaagttcaaattcaagaagagtttgaagaaagttctgaaattctcctgaaggagtttcttaagcctgagaaattcacgaaagtctgtgaggccttggagcatggacatgtggaatggagcagccgaggtccccctaacaaaaggttttatgagaaagctgaggagagtaagcttcctgagatattgaaggagtgcatgaagttatttcgctctgaggcactattcttgctgctctccaacttcacaggcctgaagcttcatttcttggccccttcggaagaagatgagatgaatgataaaaaagaggcagaaaccactgatatcactgaagaagggactagccatagtcctcctgagccagagaataatcagatggccatcagcaacaacagccaacagagcaatgagcagacagacccagagccagaggaaaatgaaacaaagaaagaatcaagtgttcccatgtgccaaggggaactgaggcattggaagaccggtcactacactttaattcatgaccatagcaaggctgaatttgccctagacttaattctgtactgtggctgtgaaggctgggagccagaatatggcggttttacttcttacattgccaaaggtgaagatgaagagctgctaacagtgaatccagaaagcaattctttggcattggtctacagagacagagagactctgaaatttgtcaagcatattaaccaccgaagcctggaacaaaagaaaaccttcccaaacagaacaggtttctgggacttttcattcatctattatgaatgacagcactgggcaaagctgaacaaaaatgtgacccttcgtaattactgggaagtctgaaagagctaagcatggagtcaaggagaactacatggtagcttgcctgacagtgttcttaaaactggttgtcttt

SEQ ID NO: 102620 - DNA, 1780 bp, Homo sapiens
  Payload ID: 22
  Gene Symbol: OGFOD2
  Gene Name: 2-oxoglutarate and iron-dependent oxygenase domain containing 2
  Uniprot ID: Q6N063
  ENST ID: ENST00000228922
  CDS Start-End: 33-1085
acggaagctggtagggctgtgggtgcttcactatggcgacggtgggggctccgcggcacttctgccgctgcgcctgcttctgcaccgataacttgtacgtggcgcgctatgggctgcacgtgcgcttccgaggcgagcagcagctgcgccgggactacggcccgatcctgcgcagccgaggctgtgttagcgccaaggacttccagcagctgttagcagagcttgagcaggaggtggagcggcggcagcggctggggcaggagtcagcagctaggaaagccctcatcgcgagttcctaccacccggcacggcctgaggtctacgactcactgcaggatgcagctctggcccccgagttcctggccgtgactgagtacagcgtgtccccagacgcagacctcaagggccttctccagcggctggagacagtatcggaggagaagcgcatctaccgggtgcctgttttcacagcgcccttctgccaggccctgctggaagagctggagcacttcgagcaatcggacatgcctaaggggaggcccaacaccatgaacaactacggggtgctgctgcacgagctcgggctggacgagccgctgatgacaccactgcgggagcgcttcctgcagccgctgatggccctgctgtaccctgactgtggcgggggccggctcgacagccaccgggcctttgtggtcaaatacgcaccgggccaggacctggagctgggctgccactatgataatgccgagctcaccctcaatgtggccttgggcaaggtcttcacagggggcgccctgtattttgggggcctcttccaggcacccacagccctgacggagcccctggaggtggagcacgtggtgggccagggtgtcctccaccgtggcggccagctgcatggagcccggcccttgggcactggtgagcgttggaaccttgtcgtctggctccgagcctctgctgtgcgcaacagcctctgtcccatgtgctgccgtgagcccgacctggtggacgatgagggcttcggtgatggcttcacccgagaggagcccgccacggtggatgtatgtgcgctcacctgagcttgcttgggcccagtgtgggggtggcaggcaggtgagggctccgttgccttggtctgggggcagaaataaaatccccgcagcctactgcacttcttggctcaacggtgtgccagcttctgggtcattctatgggcaaagatgctgccttagttcaggtttgtcagaagcagggtctggaatggggcttcagcgagggagtcagggaagcaggggaggggagggagcagctgggcaaggaagtggcttcagaggacgtccagcctcagctggccccacggagagctccaggcagagcccacagtaccacagtgtgcccacaccaccggttactggctcctggatgagggggccagagaggagtgaataacttcccagacacttatctccagggcagggtgccttccagtagccaagggaagcctccagagagcacagatgtgaaccctcagcagcaggcatcaccccccagtggactcgggtgggccaccagtagcatcttctagatggcagaggggtgaatggcagggccaggaaccaggctgcccgggttcccattctgcttctgccacttccagctgtgtggctttaggtgagccttcaccttttggtgccttcgtttcctcatttagcacctacctcctagagctgttttgggagtcaaatgcgctgacgtatataaagtgctttgcaag

SEQ ID NO: 102621 - DNA, 2308 bp, Homo sapiens
  Payload ID: 22
  Gene Symbol: OGFOD2
  Gene Name: 2-oxoglutarate and iron-dependent oxygenase domain containing 2
  Uniprot ID: Q6N063
  ENST ID: ENST00000397389
  CDS Start-End: 740-1612
tgcaagagttgtcatttgttggctgcggtgagaccacgccccgtcgccctcccacacctgaccccgccctcccgcgtccattgggaacgccaccggaagtaatgcgagacggagcgttttggtggagacactcactggggcaatctgaggtaatccaacagactgtggcggagggaccggaagcgccaggcagggacccggggtagatgctaaatccaaactgaaacgtacagggctggatgattgaagcaccagcgggaactagtcggacctccgagctctttaaactgtcctcagctcggctggttctccacgagctccgggcagacggcggggggtgggtcggcgtttaagtcaaaggccttggggctccgagtcccttcctctccccgtcctgtgaaggcacgacccagttcagctgtctgtaaagtggagccattagtccctgcctcgtagtgggaaaactgggaggcggaacgaggaggccgccggtcccaacccggcccaggagcatctttctccgcagaccgtttcctggcgagatcctgcgcagccgaggctgtgttagcgccaaggacttccagcagctgttagcagaggctgctgccagggctgctgccccactccctcctcctccttcccctggagtcagtggtgggaagcttcccaggagagtcctcagcaacctctggaacacaggacttggccatgactgtctcctgtccctgtgtgggcccagatggttgagcttgagcaggaggtggagcggcggcagcggctggggcaggagtcagcagctaggaaagccctcatcgcgagttcctaccacccggcacggcctgaggtctacgactcactgcaggatgcagctctggcccccgagttcctggccgtgactgagtacagcgtgtccccagacgcagacctcaagggccttctccagcggctggagacagtatcggaggagaagcgcatctaccgggtgcctgttttcacagcgcccttctgccaggccctgctggaagagctggagcacttcgagcaatcggacatgcctaaggggaggcccaacaccatgaacaactacggggtgctgctgcacgagctcgggctggacgagccgctgatgacaccactgcgggagcgcttcctgcagccgctgatggccctgctgtaccctgactgtggcgggggccggctcgacagccaccgggcctttgtggtcaaatacgcaccgggccaggacctggagctgggctgccactatgataatgccgagctcaccctcaatgtggccttgggcaaggtcttcacagggggcgccctgtattttgggggcctcttccaggcacccacagccctgacggagcccctggaggtggagcacgtggtgggccagggtgtcctccaccgtggcggccagctgcatggagcccggcccttgggcactggtgagcgttggaaccttgtcgtctggctccgagcctctgctgtgcgcaacagcctctgtcccatgtgctgccgtgagcccgacctggtggacgatgagggcttcggtgatggcttcacccgagaggagcccgccacggtggatgtatgtgcgctcacctgagcttgcttgggcccagtgtgggggtggcaggcaggtgagggctccgttgccttggtctgggggcagaaataaaatccccgcagcctactgcacttcttggctcaacggtgtgccagcttctgggtcattctatgggcaaagatgctgccttagttcaggtttgtcagaagcagggtctggaatggggcttcagcgagggagtcagggaagcaggggaggggagggagcagctgggcaaggaagtggcttcagaggacgtccagcctcagctggccccacggagagctccaggcagagcccacagtaccacagtgtgcccacaccaccggttactggctcctggatgagggggccagagaggagtgaataacttcccagacacttatctccagggcagggtgccttccagtagccaagggaagcctccagagagcacagatgtgaaccctcagcagcaggcatcaccccccagtggactcgggtgggccaccagtagcatcttctagatggcagaggggtgaatggcagggccaggaaccaggctgcccgggttcccattctgcttctgccacttccagctgtgtggctttaggtgagccttcaccttttggtgccttcgtttcctcatttagcacctacctcctagagctgttttgggagtcaaatgcgctgacgtatataaagtgctttgcaaga

SEQ ID NO: 102622 - DNA, 1488 bp, Homo sapiens
  Payload ID: 22
  Gene Symbol: OGFOD2
  Gene Name: 2-oxoglutarate and iron-dependent oxygenase domain containing 2
  Uniprot ID: Q6N063
  ENST ID: ENST00000454694
  CDS Start-End: 512-1072
gtcctgtgaaggcacgacccagttcagctgtctgtaaagtggagccattagtccctgcctcgtagtgggaaaactgggaggcggaacgaggaggccgccggtcccaacccggcccaggagcatctttctccgcagaccgtttcctggcgagatcctgcgcagccgaggctgtgttagcgccaaggacttccagcagctgttagcagagcttgagcaggaggtggagcggcggcagcggctggggcaggagtcagcagctaggaaagccctcatcgcgagttcctaccacccggcacggcctgaggtctacgactcactgcaggatgcagctctggcccccgagttcctggccgtgactgagtacagcgtgtccccagacgcagacctcaagggccttctccagcggctggagacagtatcggaggagaagcgcatctaccgggtgcctgttttcacagcgcccttctgccaggccctgctggaagagctggagcacttcgagcaatcggacatgcctaaggggaggcccaacaccatgaacaactacggggtgctgctgcacgagctcgggctggacgagccgctgatgacaccactgcgggagcgcttcctgcagccgctgatggccctgctgtaccctgactgtggcgggggccggctcgacagccaccgggcctttgtggtcaaatacgcaccgggccaggacctggagctgggctgccactatgataatgccgagctcaccctcaatgtggccttgggcaaggtcttcacagggggcgccctgtattttgggggcctcttccaggcacccacagccctgacggagcccctggaggtggagcacgtggtgggccagggtgtcctccaccgtggcggccagctgcatggagcccggcccttgggcactggtgagcgttggaaccttgtcgtctggctccgagcctctgctgtgcgcaacagcctctgtcccatgtgctgccgtgagcccgacctggtggacgatgagggcttcggtgatggcttcacccgagaggagcccgccacggtggatgtatgtgcgctcacctgagcttgcttgggcccagtgtgggggtggcaggcaggtgagggctccgttgccttggtctgggggcagaaataaaatccccgcagcctactgcacttcttggctcaacggtgtgccagcttctgggtcattctatgggcaaagatgctgccttagttcaggtttgtcagaagcagggtctggaatggggcttcagcgagggagtcagggaagcaggggaggggagggagcagctgggcaaggaagtggcttcagaggacgtccagcctcagctggccccacggagagctccaggcagagcccacagtaccacagtgtgcccacaccaccggttactggctcctggatgagggggccagagaggagtgaataacttcccagacacttatctccagggcagggtgccttccagtagccaa

SEQ ID NO: 102623 - DNA, 1426 bp, Homo sapiens
  Payload ID: 22
  Gene Symbol: OGFOD2
  Gene Name: 2-oxoglutarate and iron-dependent oxygenase domain containing 2
  ENST ID: ENST00000536439
  CDS Start-End: 947-1426
caagtagggcaaaaaatgccccacttctcttcggatttcttgctgggctcacttattggctaaacccagcaggaaatgctgggcaagggaggtttgcgtgttgtttaacctctgattcagtttcctcatctgtaaaatgggagcaacagtaaccccctctcttaaggcactgcgacgatcaagtgagttaatctgcatagagtgcctgtcacagggcccgcacgtagtgtttggaaagtgtttcctattcttattggcactgatagcctgggctaggggctcctgtgggaggcagatacaagtttcccctcatggagcctgtgctttgttgggagtcatgggtggaatgaatccccctcctcccagcctgggggtgctctcctcattgccttccactccccggcagctgagatagtgctgaggctgttggctggggcagggcctaggctgcgaggtggccccatcgtgggcacactagccctgcacccctgggcattggtgcgtccgccaagaaatgtttaggtttccattctcagcctggtttcttccccctcagggcccagcaagaaagaacagccccttctggccttcctgctgggggacagaggctcccagagccacttctgagttggggtacagacttcggtggctcatcagatgaaaggaggtgcagagagagcctgaagttggctctgtgatcccgacttggctgtcactggcctgctgggtgtccctgggctacttccttcccctctctgggcctcaggacccatatgtgatgaaacaggaagactgaagcccaggcctggccggcccacggccacattcaggccaacagaccatccctccttccacagaggagaagcgcatctaccgggtgcctgttttcacagcgcccttctgccaggccctgctggaagagctggagcacttcgagcaatcggacatgcctaaggggaggcccaacaccatgaacaactacggggtgctgctgcacgagctcgggctggacgagccgctgatgacaccactgcgggagcgcttcctgcagccgctgatggccctgctgtaccctgactgtggcgggggccggctcgacagccaccgggcctttgtggtcaaatacgcaccgggccaggacctggagctgggctgccactatgataatgccgagctcaccctcaatgtggccttgggcaaggtcttcacagggggcgccctgtattttgggggcctcttccaggcacccacagccctgacggagcccctggaggtggagcacgtggtgggccagggtgtcctccaccgtggcggccagctgcatggagcccggcccttgggcactggtgagcgttggaaccttgtcgtctggctccgagcctctgctgtgcgcaacagcctctgtcccatgtgctgccgtgagccc

SEQ ID NO: 102624 - DNA, 1481 bp, Homo sapiens
  Payload ID: 22
  Gene Symbol: OGFOD2
  Gene Name: 2-oxoglutarate and iron-dependent oxygenase domain containing 2
  Uniprot ID: Q6N063
  ENST ID: ENST00000545317
  CDS Start-End: 829-1389
ggatgattgaagcaccagcgggaactagtcggacctccgagctctttaaactgtcctcagctcggctggttctccacgagctccgggcagacggcggggggtgggtcggcgtttaagtcaaaggccttggggctccgagtcccttcctctccccgtcctgtgaaggcacgacccagttcagctgtctgtaaagtggagccattagtccctgcctcgtagtgggaaaactgggaggcggaacgaggaggccgccggtcccaacccggcccaggagcatctttctccgcagaccgtttcctggcgagatcctgcgcagccgaggctgtgttagcgccaaggacttccagcagctgttagcagagtggcctcaggaggatgggaggccccacctggtaacaaccctgtgccaccccagcttgagcaggaggtggagcggcggcagcggctggggcaggagtcagcagctaggaaagccctcatcgcgagttcctaccacccggcacggcctgaggtctacgactcactgcaggatgcagctctggcccccgagttcctggccgtgactgagtacagcgtgtccccagacgcagacctcaagggccttctccagcggctggagacaccctgaaaagcaaaggcctcatctccatggcacaggtgatgaaacaggaagactgaagcccaggcctggccggcccacggccacattcaggccaacagaccatccctccttccacagaggagaagcgcatctaccgggtgcctgttttcacagcgcccttctgccaggccctgctggaagagctggagcacttcgagcaatcggacatgcctaaggggaggcccaacaccatgaacaactacggggtgctgctgcacgagctcgggctggacgagccgctgatgacaccactgcgggagcgcttcctgcagccgctgatggccctgctgtaccctgactgtggcgggggccggctcgacagccaccgggcctttgtggtcaaatacgcaccgggccaggacctggagctgggctgccactatgataatgccgagctcaccctcaatgtggccttgggcaaggtcttcacagggggcgccctgtattttgggggcctcttccaggcacccacagccctgacggagcccctggaggtggagcacgtggtgggccagggtgtcctccaccgtggcggccagctgcatggagcccggcccttgggcactggtgagcgttggaaccttgtcgtctggctccgagcctctgctgtgcgcaacagcctctgtcccatgtgctgccgtgagcccgacctggtggacgatgagggcttcggtgatggcttcacccgagaggagcccgccacggtggatgtatgtgcgctcacctgagcttgcttgggcccagtgtgggggtggcaggcaggtgagggctccgttgccttggtctgggggcagaaataaaatccccgcagcctactgca

SEQ ID NO: 102625 - DNA, 1956 bp, Homo sapiens
  Payload ID: 22
  Gene Symbol: OGFOD2
  Gene Name: 2-oxoglutarate and iron-dependent oxygenase domain containing 2
  Uniprot ID: Q6N063
  ENST ID: ENST00000536150
  CDS Start-End: 699-1259
aggtaatccaacagactgtggcggagggaccggaagcgccaggcagggacccggggtagatgctaaatccaaactgaaacgtacagggctggatgattgaagcaccagcgggaactagtcggacctccgagctctttaaactgtcctcagctcggctggttctccacgagctccgggcagacggcggggggtgggtcggcgtttaagtcaaaggccttggggctccgagtcccttcctctccccgtcctgtgaaggcacgacccagttcagctgtctgtaaagtggagccattagtccctgcctcgtagtgggaaaactgggaggcggaacgaggaggccgccggtcccaacccggcccaggagcatctttctccgcagaccgtttcctggcgagcttgagcaggaggtggagcggcggcagcggctggggcaggagtcagcagctaggaaagccctcatcgcgagttcctaccacccggcacggcctgaggtctacgactcactgcaggatgcagctctggcccccgagttcctggccgtgactgagtacagcgtgtccccagacgcagacctcaagggccttctccagcggctggagacagtatcggaggagaagcgcatctaccgggtgcctgttttcacagcgcccttctgccaggccctgctggaagagctggagcacttcgagcaatcggacatgcctaaggggaggcccaacaccatgaacaactacggggtgctgctgcacgagctcgggctggacgagccgctgatgacaccactgcgggagcgcttcctgcagccgctgatggccctgctgtaccctgactgtggcgggggccggctcgacagccaccgggcctttgtggtcaaatacgcaccgggccaggacctggagctgggctgccactatgataatgccgagctcaccctcaatgtggccttgggcaaggtcttcacagggggcgccctgtattttgggggcctcttccaggcacccacagccctgacggagcccctggaggtggagcacgtggtgggccagggtgtcctccaccgtggcggccagctgcatggagcccggcccttgggcactggtgagcgttggaaccttgtcgtctggctccgagcctctgctgtgcgcaacagcctctgtcccatgtgctgccgtgagcccgacctggtggacgatgagggcttcggtgatggcttcacccgagaggagcccgccacggtggatgtatgtgcgctcacctgagcttgcttgggcccagtgtgggggtggcaggcaggtgagggctccgttgccttggtctgggggcagaaataaaatccccgcagcctactgcacttcttggctcaacggtgtgccagcttctgggtcattctatgggcaaagatgctgccttagttcaggtttgtcagaagcagggtctggaatggggcttcagcgagggagtcagggaagcaggggaggggagggagcagctgggcaaggaagtggcttcagaggacgtccagcctcagctggccccacggagagctccaggcagagcccacagtaccacagtgtgcccacaccaccggttactggctcctggatgagggggccagagaggagtgaataacttcccagacacttatctccagggcagggtgccttccagtagccaagggaagcctccagagagcacagatgtgaaccctcagcagcaggcatcaccccccagtggactcgggtgggccaccagtagcatcttctagatggcagaggggtgaatggcagggccaggaaccaggctgcccgggttcccattctgcttctgccacttccagctgtgtggctttaggtgagccttcaccttttggtgccttcgtttcctcatttagcacctacctcctagagctgttttgggagtcaaatgcgctgacgtatataaagtgctttgcaagat

SEQ ID NO: 102626 - DNA, 1828 bp, Homo sapiens
  Payload ID: 22
  Gene Symbol: OGFOD2
  Gene Name: 2-oxoglutarate and iron-dependent oxygenase domain containing 2
  Uniprot ID: Q6N063
  ENST ID: ENST00000540324
  CDS Start-End: 1-390
atggcgacggtgggggctccgcggcacttctgccgctgcgcctgcttctgcaccgataacttgtacgtggcgcgctatgggctgcacgtgcgcttccgaggcgagcagcagctgcgccgggactacggcccgatcctgcgcagccgaggctgtgttagcgccaaggacttccagcagctgttagcagagtggcctcaggaggatgggaggccccacctggtaacaaccctgtgccaccccagcttgagcaggaggtggagcggcggcagcggctggggcaggagtcagcagctaggaaagccctcatcgcgagttcctaccacccggcacggcctgaggtctacgactcactgcaggatgcagctctggcccccgagttcctggccgtgactgagtacagcgtgtccccagacgcagacctcaagggccttctccagcggctggagacaccctgaaaagcaaaggcctcatctccatggcacagaggagaagcgcatctaccgggtgcctgttttcacagcgcccttctgccaggccctgctggaagagctggagcacttcgagcaatcggacatgcctaaggggaggcccaacaccatgaacaactacggggtgctgctgcacgagctcgggctggacgagccgctgatgacaccactgcgggagcgcttcctgcagccgctgatggccctgctgtaccctgactgtggcgggggccggctcgacagccaccgggcctttgtggtcaaatacgcaccgggccaggacctggagctgggctgccactatgataatgccgagctcaccctcaatgtggccttgggcaaggtcttcacagggggcgccctgtattttgggggcctcttccaggcacccacagccctgacggagcccctggaggtggagcacgtggtgggccagggtgtcctccaccgtggcggccagctgcatggagcccggcccttgggcactggtgagcgttggaaccttgtcgtctggctccgagcctctgctgtgcgcaacagcctctgtcccatgtgctgccgtgagcccgacctggtggacgatgagggcttcggtgatggcttcacccgagaggagcccgccacggtggatgtatgtgcgctcacctgagcttgcttgggcccagtgtgggggtggcaggcaggtgagggctccgttgccttggtctgggggcagaaataaaatccccgcagcctactgcacttcttggctcaacggtgtgccagcttctgggtcattctatgggcaaagatgctgccttagttcaggtttgtcagaagcagggtctggaatggggcttcagcgagggagtcagggaagcaggggaggggagggagcagctgggcaaggaagtggcttcagaggacgtccagcctcagctggccccacggagagctccaggcagagcccacagtaccacagtgtgcccacaccaccggttactggctcctggatgagggggccagagaggagtgaataacttcccagacacttatctccagggcagggtgccttccagtagccaagggaagcctccagagagcacagatgtgaaccctcagcagcaggcatcaccccccagtggactcgggtgggccaccagtagcatcttctagatggcagaggggtgaatggcagggccaggaaccaggctgcccgggttcccattctgcttctgccacttccagctgtgtggctttaggtgagccttcaccttttggtgccttcgtttcctcatttagcacctacctcctagagctgttttgggagtcaaatgcgctgacgtatataaagtgctttgcaa

SEQ ID NO: 102627 - DNA, 635 bp, Homo sapiens
  Payload ID: 22
  Gene Symbol: OGFOD2
  Gene Name: 2-oxoglutarate and iron-dependent oxygenase domain containing 2
  ENST ID: ENST00000537966
  CDS Start-End: 14-635
tgggtgcttcactatggcgacggtgggggctccgcggcacttctgccgctgcgcctgcttctgcaccgataacttgtacgtggcgcgctatgggctgcacgtgcgcttccgaggcgagcagcagctgcgccgggactacggcccgatcctgcgcagccgaggctgtgttagcgccaaggacttccagcagctgttagcagaggctgctgccagggctgctgccccactccctcctcctccttcccctggagtcagtggtgggaagcttcccaggagagtcctcagcaacctctggaacacaggacttggccatgactgtctcctgtccctgtgtgggcccagatggttgagtttcttcatctgtacagtggcctcaggaggatgggaggccccacctggtaacaaccctgtgccaccccagcttgagcaggaggtggagcggcggcagcggctggggcaggagtcagcagctaggaaagccctcatcgcgagttcctaccacccggcacggcctgaggtctacgactcactgcaggatgcagctctggcccccgagttcctggccgtgactgagtacagcgtgtccccagacgcagacctcaagggccttctccagcggctggagacagtatcgg

SEQ ID NO: 102628 - DNA, 1568 bp, Homo sapiens
  Payload ID: 22
  Gene Symbol: OGFOD2
  Gene Name: 2-oxoglutarate and iron-dependent oxygenase domain containing 2
  ENST ID: ENST00000545056
  CDS Start-End: 1089-1568
cggagggaccggaagcgccaggcagggacccggggtagatgctaaatccaaactgaaacgtacagggctggatgattgaagcaccagcgggaactagtcggacctccgagctctttaaactgtcctcagctcggctggttctccacgagctccgggcagacggcggggggtgggtcggcgtttaagtcaaaggccttggggctccgagtcccttcctctccccgtcctgtgaaggcacgacccagttcagctgtctgtaaagtggagccattagtccctgcctcgtagtgggaaaactgggaggcggaacgaggaggccgccggtcccaacccggcccaggagcatctttctccgcagaccgtttcctggcgagatcctgcgcagccgaggctgtgttagcgccaaggacttccagcagctgttagcagagtggcctcaggaggatgggaggccccacctggtaacaaccctgtgccaccccagcttgagcaggaggtggagcggcggcagcggctggggcaggagtcagcagctaggaaagccctcatcgcgagttcctaccacccggcacggcctgaggtctacgactcactgcaggatgcagctctggcccccgagttcctggccgtgactgagtacagcgtgtccccagacgcagacctcaagggccttctccagcggctggagacagtatcggggcccagcaagaaagaacagccccttctggccttcctgctgggggacagaggctcccagagccacttctgagttggggtacagacttcggtggctcatcagatgaaaggaggtgcagagagagcctgaagttggctctgtgatcccgacttggctgtcactggcctgctgggtgtccctgggctacttccttcccctctctgggcctcaggacccatatgtgatgaaacaggaagactgaagcccaggcctggccggcccacggccacattcaggccaacagaccatccctccttccacagaggagaagcgcatctaccgggtgcctgttttcacagcgcccttctgccaggccctgctggaagagctggagcacttcgagcaatcggacatgcctaaggggaggcccaacaccatgaacaactacggggtgctgctgcacgagctcgggctggacgagccgctgatgacaccactgcgggagcgcttcctgcagccgctgatggccctgctgtaccctgactgtggcgggggccggctcgacagccaccgggcctttgtggtcaaatacgcaccgggccaggacctggagctgggctgccactatgataatgccgagctcaccctcaatgtggccttgggcaaggtcttcacagggggcgccctgtattttgggggcctcttccaggcacccacagccctgacggagcccctggaggtggagcacgtggtgggccagggtgtcctccaccgtggcggccagctgcatggagcccggcccttgggcactggtgagcgttggaaccttgtcgtctggctccgagcctctgctgtgcgcaacagcctctgtcccatgtgctgccgtgagccc

SEQ ID NO: 102629 - DNA, 1949 bp, Homo sapiens
  Payload ID: 22
  Gene Symbol: OGFOD2
  Gene Name: 2-oxoglutarate and iron-dependent oxygenase domain containing 2
  Uniprot ID: Q6N063
  ENST ID: ENST00000538755
  CDS Start-End: 973-1533
ggagacactcactggggcaatctgaggtaatccaacagactgtggcggagggaccggaagcgccaggcagggacccggggtagatgctaaatccaaactgaaacgtacagggctggatgattgaagcaccagcgggaactagtcggacctccgagctctttaaactgtcctcagctcggctggttctccacgagctccgggcagacggcggggggtgggtcggcgtttaagtcaaaggccttggggctccgagtcccttcctctccccgtcctgtgaaggcacgacccagttcagctgtctgtaaagtggagccattagtccctgcctcgtagtgggaaaactgggaggcggaacgaggaggccgccggtcccaacccggcccaggagcatctttctccgcagaccgtttcctggcgagatcctgcgcagccgaggctgtgttagcgccaaggacttccagcagctgttagcagagcttgagcaggaggtggagcggcggcagcggctggggcaggagtcagcagctaggaaagccctcatcgcgagttcctaccacccggcacggcctgaggtctacgactcactgcaggatgcagctctggcccccgagttcctggccgtgactgagtacagcgtgtccccagacgcagacctcaagggccttctccagcggctggagacagtatcggggcccagcaagaaagaacagccccttctggccttcctgctgggggacagaggctcccagagccacttctgagttggggtacagacttcggtggctcatcagatgaaaggaggtgatgaaacaggaagactgaagcccaggcctggccggcccacggccacattcaggccaacagaccatccctccttccacagaggagaagcgcatctaccgggtgcctgttttcacagcgcccttctgccaggccctgctggaagagctggagcacttcgagcaatcggacatgcctaaggggaggcccaacaccatgaacaactacggggtgctgctgcacgagctcgggctggacgagccgctgatgacaccactgcgggagcgcttcctgcagccgctgatggccctgctgtaccctgactgtggcgggggccggctcgacagccaccgggcctttgtggtcaaatacgcaccgggccaggacctggagctgggctgccactatgataatgccgagctcaccctcaatgtggccttgggcaaggtcttcacagggggcgccctgtattttgggggcctcttccaggcacccacagccctgacggagcccctggaggtggagcacgtggtgggccagggtgtcctccaccgtggcggccagctgcatggagcccggcccttgggcactggtgagcgttggaaccttgtcgtctggctccgagcctctgctgtgcgcaacagcctctgtcccatgtgctgccgtgagcccgacctggtggacgatgagggcttcggtgatggcttcacccgagaggagcccgccacggtggatgtatgtgcgctcacctgagcttgcttgggcccagtgtgggggtggcaggcaggtgagggctccgttgccttggtctgggggcagaaataaaatccccgcagcctactgcacttcttggctcaacggtgtgccagcttctgggtcattctatgggcaaagatgctgccttagttcaggtttgtcagaagcagggtctggaatggggcttcagcgagggagtcagggaagcaggggaggggagggagcagctgggcaaggaagtggcttcagaggacgtccagcctcagctggccccacggagagctccaggcagagcccacagtaccacagtgtgcccacaccaccggttactggctcctggatgagggggccagagaggagtgaataacttcccagacacttatctccagggcagggtgccttccagtagccaa

SEQ ID NO: 102630 - DNA, 1465 bp, Homo sapiens
  Payload ID: 22
  Gene Symbol: OGFOD2
  Gene Name: 2-oxoglutarate and iron-dependent oxygenase domain containing 2
  Uniprot ID: Q6N063
  ENST ID: ENST00000545612
  CDS Start-End: 813-1373
gggaccggaagcgccaggcagggacccggggtagatgctaaatccaaactgaaacgtacagggctggatgattgaagcaccagcgggaactagtcggacctccgagctctttaaactgtcctcagctcggctggttctccacgagctccgggcagacggcggggggtgggtcggcgtttaagtcaaaggccttggggctccgagtcccttcctctccccgtcctgtgaaggcacgacccagttcagctgtctgtaaagtggagccattagtccctgcctcgtagtgggaaaactgggaggcggaacgaggaggccgccggtcccaacccggcccaggagcatctttctccgcagaccgtttcctggcgagatcctgcgcagccgaggctgtgttagcgccaaggacttccagcagctgttagcagagcttgagcaggaggtggagcggcggcagcggctggggcaggagtcagcagctaggaaagccctcatcgcgagttcctaccacccggcacggcctgaggtctacgactcactgcaggatgcagctctggcccccgagttcctggccgtgactgagtacagcgtgtccccagacgcagacctcaagggccttctccagcggctggagacagtatcgggtgatgaaacaggaagactgaagcccaggcctggccggcccacggccacattcaggccaacagaccatccctccttccacagaggagaagcgcatctaccgggtgcctgttttcacagcgcccttctgccaggccctgctggaagagctggagcacttcgagcaatcggacatgcctaaggggaggcccaacaccatgaacaactacggggtgctgctgcacgagctcgggctggacgagccgctgatgacaccactgcgggagcgcttcctgcagccgctgatggccctgctgtaccctgactgtggcgggggccggctcgacagccaccgggcctttgtggtcaaatacgcaccgggccaggacctggagctgggctgccactatgataatgccgagctcaccctcaatgtggccttgggcaaggtcttcacagggggcgccctgtattttgggggcctcttccaggcacccacagccctgacggagcccctggaggtggagcacgtggtgggccagggtgtcctccaccgtggcggccagctgcatggagcccggcccttgggcactggtgagcgttggaaccttgtcgtctggctccgagcctctgctgtgcgcaacagcctctgtcccatgtgctgccgtgagcccgacctggtggacgatgagggcttcggtgatggcttcacccgagaggagcccgccacggtggatgtatgtgcgctcacctgagcttgcttgggcccagtgtgggggtggcaggcaggtgagggctccgttgccttggtctgggggcagaaataaaatccccgcagcctactgca

SEQ ID NO: 102631 - DNA, 1696 bp, Homo sapiens
  Payload ID: 22
  Gene Symbol: OGFOD2
  Gene Name: 2-oxoglutarate and iron-dependent oxygenase domain containing 2
  Uniprot ID: Q6N063
  ENST ID: ENST00000538628
  CDS Start-End: 1044-1604
gggaccggaagcgccaggcagggacccggggtagatgctaaatccaaactgaaacgtacagggctggatgattgaagcaccagcgggaactagtcggacctccgagctctttaaactgtcctcagctcggctggttctccacgagctccgggcagacggcggggggtgggtcggcgtttaagtcaaaggccttggggctccgagtcccttcctctccccgtcctgtgaaggcacgacccagttcagctgtctgtaaagtggagccattagtccctgcctcgtagtgggaaaactgggaggcggaacgaggaggccgccggtcccaacccggcccaggagcatctttctccgcagaccgtttcctggcgagatcctgcgcagccgaggctgtgttagcgccaaggacttccagcagctgttagcagagcttgagcaggaggtggagcggcggcagcggctggggcaggagtcagcagctaggaaagccctcatcgcgagttcctaccacccggcacggcctgaggtctacgactcactgcaggatgcagctctggcccccgagttcctggccgtgactgagtacagcgtgtccccagacgcagacctcaagggccttctccagcggctggagacagtatcgggtgaggtcctggccctgagacctggcaggaccagggaatggcagcctgggaaacctgggtgtgggatgctggggtccctccagccaccatctctgcctccaaaaaccaaaccagcaggagctggaagggtcagtgggaccaacctgccaggagcaggacatccgcattcattcattcaatacctgccatgagcctgccctgaaaagcaaaggcctcatctccatggcacaggtgatgaaacaggaagactgaagcccaggcctggccggcccacggccacattcaggccaacagaccatccctccttccacagaggagaagcgcatctaccgggtgcctgttttcacagcgcccttctgccaggccctgctggaagagctggagcacttcgagcaatcggacatgcctaaggggaggcccaacaccatgaacaactacggggtgctgctgcacgagctcgggctggacgagccgctgatgacaccactgcgggagcgcttcctgcagccgctgatggccctgctgtaccctgactgtggcgggggccggctcgacagccaccgggcctttgtggtcaaatacgcaccgggccaggacctggagctgggctgccactatgataatgccgagctcaccctcaatgtggccttgggcaaggtcttcacagggggcgccctgtattttgggggcctcttccaggcacccacagccctgacggagcccctggaggtggagcacgtggtgggccagggtgtcctccaccgtggcggccagctgcatggagcccggcccttgggcactggtgagcgttggaaccttgtcgtctggctccgagcctctgctgtgcgcaacagcctctgtcccatgtgctgccgtgagcccgacctggtggacgatgagggcttcggtgatggcttcacccgagaggagcccgccacggtggatgtatgtgcgctcacctgagcttgcttgggcccagtgtgggggtggcaggcaggtgagggctccgttgccttggtctgggggcagaaataaaatccccgcagcctactgca

SEQ ID NO: 102632 - DNA, 4287 bp, Homo sapiens
  Payload ID: 23
  Gene Symbol: OGFOD3
  Gene Name: 2-oxoglutarate and iron-dependent oxygenase domain containing 3
  Uniprot ID: Q6PK18
  ENST ID: ENST00000313056
  CDS Start-End: 153-1112
gattgctcgggcctggccgccagcccaggggccgatggccgagcgcgtcgcactcgcgtccctgcgccgtgcctgcctcgcgctccctgttacggcgttcgtccccgggcctggcgcccgcgtccggcccggctccgcggcggcctggtccgatggctcctcagcggagggccgcaaccaaggcgcccgagggcaacggagcggccgagcgccggaaccggagcagcaccaagaaggaccgagccccgcgggaggtgcagaggctgtggcagaggccgtggctaaggaccgcgggcctgggggctggctttgtgctcaccgcactcctgctctggagcagcttgggggccgacgacggggtcgcagaggtcctggcccgccgtggcgaggtcgtggcagggagattcatcgaggtgccctgctctgaggactacgacagtcaccgcaggttcgaaggctgcactccccgaaagtgcggcagaggtgtcaccgatgtcgtcatcaccagggaggaagcggagcggattcgcagcgtagctgaaaaggggctctccctgggaggatctgacggaggggcatccattctggacttgcactcaggggccctgtctgtcgggaagcactttgtgaacctgtacagatacttcggggataaaatacagaacatcttctcagaggaggacttccggttataccgggaggtgcggcagaaggtccagctcaccattgctgaggcttttggcatcagcgcatcctcgctgcatctgaccaagcccaccttcttctcccgcataaacagcacggaagcgcggacggcgcacgacgagtactggcatgcgcacgtggacaaggtgacctacggctccttcgactacacctcgctgctgtacctctccaactacctggaggacttcggcggagggcggttcatgttcatggaggagggtgccaacaagacggtggagccgagagctggtcgcgtctccttcttcacctcggggtccgagaacctacaccgcgtggagaaggtccactggggcacccgttacgccatcaccatcgccttcagctgcaaccccgaccatggcatcgaggacccagcgttcccgtagccagcagccgggccaaggtaacttcaggagggcccgtgtggaggcagccgcgccagtcgtgcacccacccccacgtccacccgctcctgttgcacagagtgccttaggaattctctgattttgatttgctgacgtgttaatcttttcatctgtgagtaaatgaagggaaccagcttttcacttctccagcatcatgtgtgcttgggctgtaggcctgggagcctgaggtggaggccaggaaagggacccagcaggacggggcacaagtccccatctgtgaatggacgggactcatccacccaggttcagcaaccccccgggactcgtccaggttcagcaaccccccggcccatcaaagactggctaaagcatcagccataaatggggacaaacgtggggccagcagcttctgttcggggtctcggcatcagcaaaccgcagcagctttggagaagggtccgtgagtggcggctctggaggcagcaacggggtcctttggggtgggtgggagttctgctggattcaggtggaggtgaacatctgccgttcccacagccctgcgtgcacccccaatgctgctggcccacaaatcaccgtgggccacggccccaccacaccaggcttggccctgtcagcggccagcatcccaagggccagggtccgagtgtcctcaccaaggaggctcttggcgtcgctgtgccggctcccatgggccttctgctgggtcgagggtaggtctcctcctccccctttgccctggcattaaactgatggtcaggctgggcgcggtggctcacacctgtaatctcagcactgcgggaggccgaggcaggaggatcacttgaggtcaggagttcaagaccagcctggccaacatggcgaaaccctgtctctactaaaaacacaaaaacaaattaatcccagctactggggaggctgaggcaggagaatcgcttgaacccagggggcagaagttgcagtgagccgagatcgtgccactacactccagcctgggtgacagagtgagactccatcttaaaaatataaaaataaagtggtggtcagaggagccccgaatagaccagttgtggagaggcctgggtggggtggctggcagggagggcaggccaagcccagtttctgcccacagtcacctcgaggtgactgtccagggctttgggcaccttcccgggagggggacggccgcccaccctgagtggtgttggaagctgggctctcctggatgccctgacccagctgcctggggagagccctgggcccctcctccctcagcacctcctccctcagcccctcctgcctcggtccctcctcccttagcctgtctggcatagatccatgttccctagcccctggcacaggtgcctctgactggaggaggccccacctgtggcccgggagctgctctgggggttgataaagggcagcattattgggtcctgggaaggagcgggcgtgaggccagctgaggcatggtgacccctgggaaggagcgggcgtgaggccagctgaggcatggtgacccctgggaaggagcgggcgtgaggccagctgaggcatggtgacccctgggaaggagcgggcgtgaggccagctgaggcatggtgacccctgggaaggagcgggcgtgaggccagctgaggcatggtgacccctgggtacgggggacttgggggccgcaccttggtttgcccagggcccctcctgcaccacgggccacatgcggaggacggcgtgggataggctccctgggtccacagcttctgcccgtgtatggggaaccctccttggtcagggctgcaggctctgggcagatggggcaggaaccctgaggctcccgcgccctcccatggcctctgatgtgggacactggagcgaggcacgattctgaaggactccatggatctgggaggatgaggcccacctccggttggtggccaaagccgtccttgcggggccggctgcttcacggacactctccgggtcgggctggtgggccccatcgtgggtgggaagtcgcctgagcctgggccgcccttgagcttctcccagtcttgactttccagagggtccgtggctgtggtcatggtcggggcaggtggaaaatgctgcatggaaacctgatcctgtcaccttggagtaaatgatgatgtcgccggcttctcgccacgtctaaaggataaatgcatttgaagaaagtgggtgttgggtttgttatgggttaaagtgcttttgaaataagtaaattattagtttgattttcattcttggctacttacactattcatgataatcacagagatacttggacaaagaaatatatttgggcaaaagcaagaatttccttctttttttttttgagacggagtctaactctgtcgcccaggctggagtgcagtggcgcaatctcggctcactgcaaggtccacctcctgggttcccaccattctcctgcctcaacctcccgagtagctgggactacaggcgcccgccaccatgcccggctaattttttttgtatttttagtagagatgggatttcaccgtgttagccagaatgaagaatttccttctgaagtgggaacatatggctcatgctggtaatcccagcactttgggaggccaaggtaggaagatcacttgagcccaggagttggagacccatctgtgcaacatagtgagacgctgtctgtacaagaaacttttaaaaaatgtagctgggcgtggcagtgtgctcctgtggtcccagctactcggagctgaggcaggacgactgcttgagcccaggaggtcgaggctacagtgagctgtgacggctccactgcattccagcctgggagacagcaagatactgtctcaaaaaaaaatttatcattgaagcctgggcattttaaaaaaataaaaaggtgggaaaatacgtgggcacagcagtgaatcctcacaccctgggctttgcccaagaagtgctcgtgaacctgatgaaagtgtcgggtgtggccgacgtgaggctgttccaggagccacgaggggtgattggttccgctagaaggttccagggaggaactggagtctcaggtgtgtcctctgatgagtgatctatttttaagtaaaagtgtttcattaaagtcaaagatgattattcctttcaaaataaagaa

SEQ ID NO: 102633 - DNA, 1652 bp, Homo sapiens
  Payload ID: 23
  Gene Symbol: OGFOD3
  Gene Name: 2-oxoglutarate and iron-dependent oxygenase domain containing 3
  Uniprot ID: Q6PK18
  ENST ID: ENST00000329197
  CDS Start-End: 92-1087
ctgcgccgtgcctgcctcgcgctccctgttacggcgttcgtccccgggcctggcgcccgcgtccggcccggctccgcggcggcctggtccgatggctcctcagcggagggccgcaaccaaggcgcccgagggcaacggagcggccgagcgccggaaccggagcagcaccaagaaggaccgagccccgcgggaggtgcagaggctgtggcagaggccgtggctaaggaccgcgggcctgggggctggctttgtgctcaccgcactcctgctctggagcagcttgggggccgacgacggggtcgcagaggtcctggcccgccgtggcgaggtcgtggcagggagattcatcgaggtgccctgctctgaggactacgacagtcaccgcaggttcgaaggctgcactccccgaaagtgcggcagaggtgtcaccgatgtcgtcatcaccagggaggaagcggagcggattcgcagcgtagctgaaaaggggctctccctgggaggatctgacggaggggcatccattctggacttgcactcaggggccctgtctgtcgggaagcactttgtgaacctgtacagatacttcggggataaaatacagaacatcttctcagaggaggacttccggttataccgggaggtgcggcagaaggtccagctcaccattgctgaggcttttggcatcagcgcatcctcgctgcatctgaccaagcccaccttcttctcccgcataaacagcacggaagcgcggacggcgcacgacgagtactggcatgcgcacgtggacaaggtgacctacggctccttcgactacacctcgctgctgtacctctccaactacctggaggacttcggcggagggcggttcatgttcatggaggagggtgccaacaagacggtggagccgagagctggatgtttttgtttccggatgatgtcttgtgggttccaagaagttaatggaccgagagccagtgaagctgctggtgcgaaggctggagtcaggtgtcctccggggactcaccacccgcccgagaggggagagacacatgcgattctggaagctgagagcattgcttattgttgattccttggttgccgtgctgagtcctgctttaaggaagcaggtcgcgtctccttcttcacctcggggtccgagaacctacaccgcgtggagaaggtccactggggcacccgttacgccatcaccatcgccttcagctgcaaccccgaccatggcatcgaggacccagcgttcccgtagccagcagccgggccaaggtaacttcaggagggcccgtgtggaggcagccgcgccagtcgtgcacccacccccacgtccacccgctcctgttgcacagagtgccttaggaattctctgattttgatttgctgacgtgttaatcttttcatctgtgagtaaatgaagggaaccagcttttcacttctccagcatcatgtgtgcttgggctgtaggcctgggagcctgaggtggaggccaggaaagggacccagcaggacggggcacaagtccccatctgtgaatggacgggactcatccacccaggttcagcaaccccccgggactcgtccaggttcagcaaccccccggcccatcaaagactggctaaagcatcagccataaatgggga

SEQ ID NO: 102634 - DNA, 1274 bp, Homo sapiens
  Payload ID: 23
  Gene Symbol: OGFOD3
  Gene Name: 2-oxoglutarate and iron-dependent oxygenase domain containing 3
  ENST ID: ENST00000580445
  CDS Start-End: 153-533
gattgctcgggcctggccgccagcccaggggccgatggccgagcgcgtcgcactcgcgtccctgcgccgtgcctgcctcgcgctccctgttacggcgttcgtccccgggcctggcgcccgcgtccggcccggctccgcggcggcctggtccgatggctcctcagcggagggccgcaaccaaggcgcccgagggcaacggagcggccgagcgccggaaccggagcagcaccaagaaggaccgagccccgcgggaggtgcagaggctgtggcagaggccgtggctaaggaccgcgggcctgggggctggctttgtgctcaccgcactcctgctctggagcagcttgggggccgacgacggggtcgcagaggtcctggcccgccgtggcgaggtcgtggcagggagattcatcgaggtgccctgctctgaggactacgacagtcaccgcaggctgcactccccgaaagtgcggcagaggtgtcaccgatgtcgtcatcaccagggaggaagcggagcggattcgcagcgtagctgaaaaggggctctccctgggaggatctgacggaggggcatccattctggacttgcactcaggggccctgtctgtcgggaagcactttgtgaacctgtacagatacttcggggataaaatacagaacatcttctcagaggaggacttccggttataccgggaggtgcggcagaaggtccagctcaccattgctgaggcttttggcatcagcgcatcctcgctgcatctgaccaagcccaccttcttctcccgcataaacagcacggaagcgcggacggcgcacgacgagtactggcatgcgcacgtggacaaggtgacctacggctccttcgactacacctcgctgctgtacctctccaactacctggaggacttcggcggagggcggttcatgttcatggaggagggtgccaacaagacggtggagccgagagctggatgtttttgtttccggatgatgtcttgtgggttccaagaagttaatggaccgagagccagtgaagctgctggtgcgaaggctggagtcaggtgtcctccggggactcaccacccgcccgagaggggagagacacatgcgattctggaagctgagagcattgcttattgttgattccttggttgccgtgctgagtcctgctttaaggaagcaggtcgcgtctccttcttcacctcggggtccgagaacctacaccgcgtggagaaggtccactggggcacccgttacgccatcaccatcgccttcag

SEQ ID NO: 102635 - DNA, 896 bp, Homo sapiens
  Payload ID: 23
  Gene Symbol: OGFOD3
  Gene Name: 2-oxoglutarate and iron-dependent oxygenase domain containing 3
  ENST ID: ENST00000583897
  CDS Start-End: 1-724
cagcttgggggccgacgacggggtcgcagaggtcctggcccgccgtggcgaggtcgtggcagggagattcatcgaggtgccctgctctgaggactacgacagtcaccgcaggctgcactccccgaaagtgcggcagaggtgtcaccgatgtcgtcatcaccagggaggaagcggagcggattcgcaggcatccattctggacttgcactcaggggccctgtctgtcgggaagcactttgtgaacctgtacagatacttcggggataaaatacagaacatcttctcagaggaggacttccggttataccgggaggtgcggcagaaggtccagctcaccattgctgaggcttttggcatcagcgcatcctcgctgcatctgaccaagcccaccttcttctcccgcataaacagcacggaagcgcggacggcgcacgacgagtactggcatgcgcacgtggacaaggtgacctacggctccttcgactacacctcgctgctgtacctctccaactacctggaggacttcggcggagggcggttcatgttcatggaggagggtgccaacaagacggtggagccgagagctggtcgcgtctccttcttcacctcggggtccgagaacctacaccgcgtggagaaggtccactggggcacccgttacgccatcaccatcgccttcagctgcaaccccgaccatggcatcgaggacccagcgttcccgtagccagcagccgggccaaggtaacttcaggagggcccgtgtggaggcagccgcgccagtcgtgcacccacccccacgtccacccgctcctgttgcacagagtgccttaggaattctctgattttgatttgctgacgtgttaatcttttcatctgtgagtaaatgaagggaacca

SEQ ID NO: 102636 - DNA, 385 bp, Homo sapiens
  Payload ID: 23
  Gene Symbol: OGFOD3
  Gene Name: 2-oxoglutarate and iron-dependent oxygenase domain containing 3
  ENST ID: ENST00000582593
  CDS Start-End: 1-286
cgacgagtactggcatgcgcacgtggacaaggtgacctacggctccttcgactacacctcgctgctgtacctctccaactacctggaggacttcggcggagggcggttcatgttcatggaggagggtgccaacaagacggtggagccgagagctggggaagggtttggacgtccagcctctgcaagcaggagcccagcctgtctgccctcaccccagaagtcccagtcacagcagttttgtgggaaaatgaaaaactcacagagcacaagacaggcgttttcttgagaagtcaagcagctgaagcctcctgggactcgaaattacacaactttttagcatattttgatcttagtcattttaagcatgataaatacttgagtcaaa

SEQ ID NO: 102637 - DNA, 872 bp, Homo sapiens
  Payload ID: 23
  Gene Symbol: OGFOD3
  Gene Name: 2-oxoglutarate and iron-dependent oxygenase domain containing 3
  ENST ID: ENST00000577495
  CDS Start-End: 827-872
gcactcgcgtccctgcgccgtgcctgcctcgcgctccctgttacggcgttcgtccccgggcctggcgcccgcgtccggcccggctccgcggcggcctggtccgatggctcctcagcggagggccgcaaccaaggcgcccgagggcaacggagcggccgagcgccggaaccggagcaggtagcgcaccaagaaggaccgagccccgcgggaggtgcagaggctgtggcagaggccgtggctaaggaccgcgggcctgggggctggctttgtgctcaccgcactcctgctctggagcagcttgggggccgacgacggggtcgcagaggtcctggcccgccgtggcgaggtcgtggcagggagattcatcgaggtgccctgctctgaggactacgacagtcaccgcaggttcgaaggctgcactccccgaaagtgcggcagaggtgtcaccgatgtcgtcatcaccagggaggaagcggagcggattcgcagcgtagctgaaaaggggctctccctgggaggatctgacggaggggcatccattctggacttgcactcaggggccctgtctgtcgggaagcactttgtgaacctgtacagatacttcggggataaaatacagaacatcttctcagaggaggacttccggttataccgcacggaagcgcggacggcgcacgacgagtactggcatgcgcacgtggacaaggtgagcgcgcccgtgggcagggtgagcgtgcccgtggacaaggtgacctacggctccttcgactacacctcgctgctgtacctctccaactacctggaggacttcggcggagggcggttcatgttcatggaggagggtgccaacaagacggtggagccgagagctg

SEQ ID NO: 102638 - DNA, 657 bp, Homo sapiens
  Payload ID: 23
  Gene Symbol: OGFOD3
  Gene Name: 2-oxoglutarate and iron-dependent oxygenase domain containing 3
  ENST ID: ENST00000583445
  CDS Start-End: 1-657
tgtgaacctgtacagatacttcggggataaaatacagaacatcttctcagaggaggacttccggttataccgggaggtgcggcagaaggtccagctcaccattgctgaggcttttggcatcagcgcatcctcgctgcatctgaccaagcccaccttcttctcccgcataaacagcacggaagcgcggacggcgcacgacgagtactggcatgcgcacgtggacaaggtgacctacggctccttcgactacacctcgctgctgtacctctccaactacctggaggacttcggcggagggcggttcatgttcatggaggagggtgccaacaagacggtggagccgagagctgttgttctgagtcatctctgcattaggggaagggtttggacgtccagcctctgcaagcaggagcccagcctgtctgccctcaccccagaagtcccagtcacagcagttttgtgggaaaatgaaaaactcacagagcacaagacaggcgttttcttgagaagtcaagcagctgaagcctcctgggactcgaaattacacaactttttagcatattttgatcttagtcattttaagcatgataaatacttgagtcaaacattttgtattacgatcttctttcagataattaaaacaacctgtctcctgca

SEQ ID NO: 102639 - DNA, 3281 bp, Homo sapiens
  Payload ID: 24
  Gene Symbol: PXYLP1
  Gene Name: 2-phosphoxylose phosphatase 1
  Uniprot ID: Q8TE99
  ENST ID: ENST00000286353
  CDS Start-End: 138-1580
tcccctcgcgccgggaggagctggcggcgagcgccgagccgggcgcgcagcgacggagctggggccggcctgggaccatgggcggacatgttcccgatttgaggtgaaaccatgaagagaaaatagaatacttaataatgcttttccgcaaccgcttcttgctgctgctggccctggctgcgctgctggcctttgtgagcctcagcctgcagttcttccacctgatcccggtgtcgactcctaagaatggaatgagtagcaagagtcgaaagagaatcatgcccgaccctgtgacggagccccctgtgacagaccccgtttatgaagctcttttgtactgcaacatccccagcgtggccgagcgcagcatggaaggtcatgccccgcatcattttaagctggtctcagtgcatgtgttcattcgccacggagacaggtacccactgtatgtcattcccaaaacaaagcgaccagaaattgactgcactctggtggctaacaggaaaccgtatcacccaaaactggaagctttcattagtcacatgtcaaaaggatccggagcctctttcgaaagccccttgaactccttgcctctttacccaaatcacccattgtgtgagatgggagagctcacacagacaggagttgtgcagcatttgcagaacggtcagctgctgagggatatctatctaaagaaacacaaactcctgcccaatgattggtctgcagaccagctctatttagagaccactgggaaaagccggaccctacaaagtgggctggccttgctttatggctttctcccagattttgactggaagaagatttatttcaggcaccagccaagtgcgctgttctgctctggaagctgctattgcccggtaagaaaccagtatctggaaaaggagcagcgtcgtcagtacctcctacgtttgaaaaacagccagctggagaagacctacggggagatggccaagatcgtggatgtccccaccaagcagcttagagctgccaaccccatagactccatgctctgccacttctgccacaatgtcagctttccctgtaccagaaatggctgtgttgacatggagcacttcaaggtaattaagacccatcagatcgaggatgaaagggaaagacgggagaagaaattgtacttcgggtattctctcctgggtgcccaccccatcctgaaccaaaccatcggccggatgcagcgtgccaccgagggcaggaaagaagagctctttgccctctactctgctcatgatgtcactctgtcaccagttctcagtgccttgggcctttcagaagccaggttcccaaggtttgcagccaggttgatctttgagctttggcaagacagagaaaagcccagtgaacattccgtccggattctttacaatggcgtcgatgtcacattccacacctctttctgccaagaccaccacaagcgttctcccaagcccatgtgcccgcttgaaaacttggtccgctttgtgaaaagggacatgtttgtagccctgggtggcagtggtacaaattattatgatgcatgtcacagggaaggattctaaaaggtatgcagtacagcagtatagaatccatgccaatacagagcatagggaaaggtccacttctagttttgtctgttactaagggtagaagattattgctttttaaaggctaaatattgtttgtgggaaccacagatggttggggttgaacagtaagcacattgctgcaatgtggtacgtgaattgcttggtacaaaatggccagttcacagaggaatagaaggtactttatcatagccagacttcgcttagaatgccagaataatatagttcaagacctgaagttgccaatccaagtttgcactcttctggcctgccccatgttactatgtgatggaaccagcacacctcaaccaaaatttttttaatcttagacatttttaccttgtccttgttaagaatttcttgaagtgatttatctaaaataaaggttggcaaactttttctgtaaagggccagattgtaaatatttcagactgtgtggaccaaaaggccacatacagtctctgtcataactactcaactctgtttctgaagcaggaaagccaccacagacagtacataaaggaatatgtgtagctgggttcccaggccggacaaaacagatggtgaccagatttggcccctgggctgtagtttgctgacccctcatctaaaaaataggctatactacaattgcacttccagcactttgagaacgagttgaataccaagaattattcaatggttcctccagtaacttctgctagaaacacagaatttggtctgtatctgacactagaacaaaacttgagggtaaataaacattgaattagaatgaatcatagaaaactgattagaagaatacttgatgtttatgatgattgtggtacaagatagttttaagtatgttctaaatatttgtctgctgtagtctatttgctgtatatgctgaaatttttgtatgccatttagtatttttatagtttaggaaaatattttctaagaccagttttagatgactcttattcctgtagtaatattcaatttgctgtacctgcttggtggttagaaggaggctagaagatgaattcaggcactttcttccaataaaactaattatggctcattccctttgacaagctgtagaactggattcatttttaaaccattttcatcagtttcaaatggtaaattctgattgatttttaaatgcgtttttggaagaactttgctattagatagtttacagatctttataaggtgttttatatattagaagcaattataattacatctgtgatttctgaactaatggtgctaattcagagaaatggaaagtgaaagtgagattctctgttgtcatcggcattccaactttttctctttgtttttgtccagtgttgcatttgaatatgtctgtttctataaataaattttttaagaatacctatactatacaactaatggtttgtacctataagtcactcgagttattttcaagtgagagccagtattttatttttcccccttcattcaaatgtcatgcagagaaccagtattttaaaattttattttaactgctttactaactgctgaaagttgtgttatctctcaagtattcaaagactaaatgtgttttctttccttcccactcacaatatatctgaattagaactgctaaacacagcttgaagacttaaaaataaaagtgactcggaa

SEQ ID NO: 102640 - DNA, 3160 bp, Homo sapiens
  Payload ID: 24
  Gene Symbol: PXYLP1
  Gene Name: 2-phosphoxylose phosphatase 1
  Uniprot ID: Q8TE99
  ENST ID: ENST00000393010
  CDS Start-End: 279-1721
ccgagccgggcgcgcagcgacggagctggggccggcctgggaccatgggcgtgagtgcaatctacggatcagtctctgatggtgggtcgttaacctcagtggggactccaagatttccatgaagaaaatcagttgtcttcattcaagaattggggtctggctcagaattcctgcagctggtgaaaatctgttttctagaagaggtttaattaatgcctgcagtctgacatgttcccgatttgaggtgaaaccatgaagagaaaatagaatacttaataatgcttttccgcaaccgcttcttgctgctgctggccctggctgcgctgctggcctttgtgagcctcagcctgcagttcttccacctgatcccggtgtcgactcctaagaatggaatgagtagcaagagtcgaaagagaatcatgcccgaccctgtgacggagccccctgtgacagaccccgtttatgaagctcttttgtactgcaacatccccagcgtggccgagcgcagcatggaaggtcatgccccgcatcattttaagctggtctcagtgcatgtgttcattcgccacggagacaggtacccactgtatgtcattcccaaaacaaagcgaccagaaattgactgcactctggtggctaacaggaaaccgtatcacccaaaactggaagctttcattagtcacatgtcaaaaggatccggagcctctttcgaaagccccttgaactccttgcctctttacccaaatcacccattgtgtgagatgggagagctcacacagacaggagttgtgcagcatttgcagaacggtcagctgctgagggatatctatctaaagaaacacaaactcctgcccaatgattggtctgcagaccagctctatttagagaccactgggaaaagccggaccctacaaagtgggctggccttgctttatggctttctcccagattttgactggaagaagatttatttcaggcaccagccaagtgcgctgttctgctctggaagctgctattgcccggtaagaaaccagtatctggaaaaggagcagcgtcgtcagtacctcctacgtttgaaaaacagccagctggagaagacctacggggagatggccaagatcgtggatgtccccaccaagcagcttagagctgccaaccccatagactccatgctctgccacttctgccacaatgtcagctttccctgtaccagaaatggctgtgttgacatggagcacttcaaggtaattaagacccatcagatcgaggatgaaagggaaagacgggagaagaaattgtacttcgggtattctctcctgggtgcccaccccatcctgaaccaaaccatcggccggatgcagcgtgccaccgagggcaggaaagaagagctctttgccctctactctgctcatgatgtcactctgtcaccagttctcagtgccttgggcctttcagaagccaggttcccaaggtttgcagccaggttgatctttgagctttggcaagacagagaaaagcccagtgaacattccgtccggattctttacaatggcgtcgatgtcacattccacacctctttctgccaagaccaccacaagcgttctcccaagcccatgtgcccgcttgaaaacttggtccgctttgtgaaaagggacatgtttgtagccctgggtggcagtggtacaaattattatgatgcatgtcacagggaaggattctaaaaggtatgcagtacagcagtatagaatccatgccaatacagagcatagggaaaggtccacttctagttttgtctgttactaagggtagaagattattgctttttaaaggctaaatattgtttgtgggaaccacagatggttggggttgaacagtaagcacattgctgcaatgtggtacgtgaattgcttggtacaaaatggccagttcacagaggaatagaaggtactttatcatagccagacttcgcttagaatgccagaataatatagttcaagacctgaagttgccaatccaagtttgcactcttctggcctgccccatgttactatgtgatggaaccagcacacctcaaccaaaatttttttaatcttagacatttttaccttgtccttgttaagaatttcttgaagtgatttatctaaaataaaggttggcaaactttttctgtaaagggccagattgtaaatatttcagactgtgtggaccaaaaggccacatacagtctctgtcataactactcaactctgtttctgaagcaggaaagccaccacagacagtacataaaggaatatgtgtagctgggttcccaggccggacaaaacagatggtgaccagatttggcccctgggctgtagtttgctgacccctcatctaaaaaataggctatactacaattgcacttccagcactttgagaacgagttgaataccaagaattattcaatggttcctccagtaacttctgctagaaacacagaatttggtctgtatctgacactagaacaaaacttgagggtaaataaacattgaattagaatgaatcatagaaaactgattagaagaatacttgatgtttatgatgattgtggtacaagatagttttaagtatgttctaaatatttgtctgctgtagtctatttgctgtatatgctgaaatttttgtatgccatttagtatttttatagtttaggaaaatattttctaagaccagttttagatgactcttattcctgtagtaatattcaatttgctgtacctgcttggtggttagaaggaggctagaagatgaattcaggcactttcttccaataaaactaattatggctcattccctttgacaagctgtagaactggattcatttttaaaccattttcatcagtttcaaatggtaaattctgattgatttttaaatgcgtttttggaagaactttgctattagatagtttacagatctttataaggtgttttatatattagaagcaattataattacatctgtgatttctgaactaatggtgctaattcagagaaatggaaagtgaaagtgagattctctgttgtcatcggcattccaactttttctctttgtttttgtccagtgttgcatttgaatatgtctgtttctataaataaattttttaagaatacctatactata

SEQ ID NO: 102641 - DNA, 568 bp, Homo sapiens
  Payload ID: 24
  Gene Symbol: PXYLP1
  Gene Name: 2-phosphoxylose phosphatase 1
  ENST ID: ENST00000505013
  CDS Start-End: 132-568
cagttgcttatagtctaggaagggatcacttgtgtaacatgggagcaaatgctgcctagcggaatattcgtgacttgggacatgttcccgatttgaggtgaaaccatgaagagaaaatagaatacttaataatgcttttccgcaaccgcttcttgctgctgctggccctggctgcgctgctggcctttgtgagcctcagcctgcagttcttccacctgatcccggtgtcgactcctaagaatggaatgagtagcaagagtcgaaagagaatcatgcccgaccctgtgacggagccccctgtgacagaccccgtttatgaagctcttttgtactgcaacatccccagcgtggccgagcgcagcatggaaggtcatgccccgcatcattttaagctggtctcagtgcatgtgttcattcgccacggagacaggtacccactgtatgtcattcccaaaacaaagcgaccagaaattgactgcactctggtggctaacaggaaaccgtatcacccaaaactggaagctttcattagtcacatgtcaaaaggatccggagcctctttcgaaag

SEQ ID NO: 102642 - DNA, 2066 bp, Homo sapiens
  Payload ID: 24
  Gene Symbol: PXYLP1
  Gene Name: 2-phosphoxylose phosphatase 1
  ENST ID: ENST00000502783
  CDS Start-End: 338-1666
gggaggagctggcggcgagcgccgagccgggcgcgcagcgacggagctggggccggcctgggaccatgggcggacatgttcccgatttgaggtgaaaccatgaagagaaaatagaatacttaataatgcttttccgcaaccgcttcttgctgctgctggccctggctgcgctgctggcctttgtgagcctcagcctgcagttctaattggaaaagaggtcaaaagaaggtgggcatcagaagtttaaaaatattccagatggcaaatgaattgtaaaatctgaatcctttccaaaaagtgtgtccacctgatcccggtgtcgactcctaagaatggaatgagtagcaagagtcgaaagagaatcatgcccgaccctgtgacggagccccctgtgacagaccccgtttatgaagctcttttgtactgcaacatccccagcgtggccgagcgcagcatggaaggtcatgccccgcatcattttaagctggtctcagtgcatgtgttcattcgccacggagacaggtacccactgtatgtcattcccaaaacaaagcgaccagaaattgactgcactctggtggctaacaggaaaccgtatcacccaaaactggaagctttcattagtcacatgtcaaaaggatccggagcctctttcgaaagccccttgaactccttgcctctttacccaaatcacccattgtgtgagatgggagagctcacacagacaggagttgtgcagcatttgcagaacggtcagctgctgagggatatctatctaaagaaacacaaactcctgcccaatgattggtctgcagaccagctctatttagagaccactgggaaaagccggaccctacaaagtgggctggccttgctttatggctttctcccagattttgactggaagaagatttatttcaggcaccagccaagtgcgctgttctgctctggaagctgctattgcccggtaagaaaccagtatctggaaaaggagcagcgtcgtcagtacctcctacgtttgaaaaacagccagctggagaagacctacggggagatggccaagatcgtggatgtccccaccaagcagcttagagctgccaaccccatagactccatgctctgccacttctgccacaatgtcagctttccctgtaccagaaatggctgtgttgacatggagcacttcaaggtaattaagacccatcagatcgaggatgaaagggaaagacgggagaagaaattgtacttcgggtattctctcctgggtgcccaccccatcctgaaccaaaccatcggccggatgcagcgtgccaccgagggcaggaaagaagagctctttgccctctactctgctcatgatgtcactctgtcaccagttctcagtgccttgggcctttcagaagccaggttcccaaggtttgcagccaggttgatctttgagctttggcaagacagagaaaagcccagtgaacattccgtccggattctttacaatggcgtcgatgtcacattccacacctctttctgccaagaccaccacaagcgttctcccaagcccatgtgcccgcttgaaaacttggtccgctttgtgaaaagggacatgtttgtagccctgggtggcagtggtacaaattattatgatgcatgtcacagggaaggattctaaaaggtatgcagtacagcagtatagaatccatgccaatacagagcatagggaaaggtccacttctagttttgtctgttactaagggtagaagattattgctttttaaaggctaaatattgtttgtgggaaccacagatggttggggttgaacagtaagcacattgctgcaatgtggtacgtgaattgcttggtacaaaatggccagttcacagaggaatagaaggtactttatcatagccagacttcgcttagaatgccagaataatatagttcaagacctgaagttgccaatccaagtttgcactcttctggcctgccccatgttactatgtgatggaaccagcacacctcaaccaaaatttttttaatcttagacatttttaccttgtccttgttaaga

SEQ ID NO: 102643 - DNA, 4158 bp, Homo sapiens
  Payload ID: 24
  Gene Symbol: PXYLP1
  Gene Name: 2-phosphoxylose phosphatase 1
  ENST ID: ENST00000508812
  CDS Start-End: 1908-3323
ggaaagccagtccaagttccaaaactgaggaacttggatccgatgttcaagggcagggcgcatccagcatgggagaaagatgtaggttgggaggctaggccagcctgtctattcatattttttctgcctgcttatattccagctgcattggcagcttattagattgtgcccacccagattgagggtgggtctgcctttcccagcccactgactcaaatgtaaatctcctttggcagcacactcatagacacaccaaggagcaatactttgtgttcttcaacccaatcaagtggacacccagtattaaccatcacatctggtaacttcccaatatttcctttatatccatgtcttcactgcatcgtttccatacctgcaccccccaaccagcaaccagtgagtgcagggggccccgtgcctgagaaggctattttctccttatggtccatgtgctttctccccaccttttcttatttaatgtctgactgtcccccgcaactggattgtaaaccccgtgagggcagagaccttgtccattttattctctgaagaatccccagcatgtgctccatacatgttggatggccagatggacaaatgcataaataccgagcttagtgggtgagcaggtccgggcttacaggcttcaggaccttaggtaactcccttgacctgcctctgcctaaggtctactgtctggctgatggttactcttcctaggttgagatccaaagctgggaaaagcagagagaggatcagtttggcttgcatcctagctatagctatgggaatgtttactagtaatacatacagagtcatccactgtgcattcgggagatggggtggggaagggtggtggggagggagcctgcgtgggatagcatctggttgttttactcatgattctaagaaatttgttggttgcttttgagagggagggtcccaaggagatgctttagaggtcatgttctctgccatttctttgaaattgagaccttgtcggcatctttacacatgagggttatagatgtgtggacaggatgaaagtgatcgtagatgagatgagcagagaacaccgccataaaagagaggcttatttccaaaggtagcttacggaaatttgccctcctacttggtaatcacaccacagagaaattgcatgcccgttggtacagagttaatcatcagtaaaagatatctcgtatcctgttattcgtgttggtcctggtggcacagtggccccaggacactcatttagattcatgggttttcccacctacataatgaaactcgttatccttccatctatttatctgcccactattctttctgatgcccccacagcctctttctcttgccctgtgacatctgagctgctgtcatctgcctgaggtcagcagagtttctaattgttccacaggacagctagaggcacggggggcctgggcaaagcctgctgggaggagcagtgtcctggagcagtgtctgcccccagcccctgggtctgtccctcagctccctttatctaggtgatcggggcaagcctcaagagctgatgtggtgagtagcacagcaccagggcagaggcggcctgcagcccggggtctgctcctccaggccccttcccagccttcctcctggagcccggcctgcacatcgaccctggtgaggccaacctgaccaggccttacgggacccaaggcgtatcctgagccagcttgctgacccccatctgccatgtttggctgtgtttcacggcctcccctctgctcctctcctcttcccctccacacagccagcttcatcagtttttcaggcccagctaggtgtctcctctgggaagcctgtttggatgcccctcaccccagactggttcggcaaccctcagtgctccacatgaggagtcaatgagatatttcatcaaaagcatggagcacagcgtctgccccagttcagcagtccacctgatcccggtgtcgactcctaagaatggaatgagtagcaagagtcgaaagagaatcatgcccgaccctgtgacggagccccctgtgacagaccccgtttatgaagctcttttgtactgcaacatccccagcgtggccgagcgcagcatggaaggtcatgccccgcatcattttaagctggtctcagtgcatgtgttcattcgccacggagacaggtacccactgtatgtcattcccaaaacaaagcgaccagaaattgactgcactctggtggctaacaggaaaccgtatcacccaaaactggaagctttcattagtcacatgtcaaaaggatccggagcctctttcgaaagccccttgaactccttgcctctttacccaaatcacccattgtgtgagatgggagagctcacacagacaggagttgtgcagcatttgcagaacggtcagctgctgagggatatctatctaaagaaacacaaactcctgcccaatgattggtctgcagaccagctctatttagagaccactgggaaaagccggaccctacaaagtgggctggccttgctttatggctttctcccagattttgactggaagaagatttatttcaggcaccagccaagtgcgctgttctgctctggaagctgctattgcccggtaagaaaccagtatctggaaaaggagcagcgtcgtcagtacctcctacgtttgaaaaacagccagctggagaagacctacggggagatggccaagatcgtggatgtccccaccaagcagcttagagctgccaaccccatagactccatgctctgccacttctgccacaatgtcagctttccctgtaccagaaatggctgtgttgacatggagcacttcaaggtaattaagacccatcagatcgaggatgaaagggaaagacgggagaagaaattgtacttcgggtattctctcctgggtgcccaccccatcctgaaccaaaccatcggccggatgcagcgtgccaccgagggcaggaaagaagagctctttgccctctactctgctcatgatgtcactctgtcaccagttctcagtgccttgggcctttcagaagccaggttcccaaggtttgcagccaggttgatctttgagctttggcaagacagagaaaagcccagtgaacattccgtccggattctttacaatggcgtcgatgtcacattccacacctctttctgccaagaccaccacaagcgttctcccaagcccatgtgcccgcttgaaaacttggtccgctttgtgaaaagggacatgtttgtagccctgggtggcagtggtacaaattattatgatgcatgtcacagggaaggattctaaaaggtatgcagtacagcagtatagaatccatgccaatacagagcatagggaaaggtccacttctagttttgtctgttactaagggtagaagattattgctttttaaaggctaaatattgtttgtgggaaccacagatggttggggttgaacagtaagcacattgctgcaatgtggtacgtgaattgcttggtacaaaatggccagttcacagaggaatagaaggtactttatcatagccagacttcgcttagaatgccagaataatatagttcaagacctgaagttgccaatccaagtttgcactcttctggcctgccccatgttactatgtgatggaaccagcacacctcaaccaaaatttttttaatcttagacatttttaccttgtccttgttaagaatttcttgaagtgatttatctaaaataaaggttggcaaactttttctgtaaagggccagattgtaaatatttcagactgtgtggaccaaaaggccacatacagtctctgtcataactactcaactctgtttctgaagcaggaaagccaccacagacagtacataaaggaatatgtgtagctgggttcccaggccggacaaaacagatggtgaccagatttggcccctgggctgtagtttgctgacccctcatctaaaaaataggctatactacaattgcacttccagcactttgagaacgagttgaataccaagaattattcaatggttcctccagtaacttctgctagaaacacagaatttggtctgtatctgacactagaacaaaacttgagggtaaataaacattgaattagaatgaatcatagaaaactga

SEQ ID NO: 102644 - DNA, 569 bp, Homo sapiens
  Payload ID: 24
  Gene Symbol: PXYLP1
  Gene Name: 2-phosphoxylose phosphatase 1
  ENST ID: ENST00000512457
  CDS Start-End: 178-569
tttctgttgcagtttgaatgatggaaagaagggcaggtggctcgaattggaaaagaggtcaaaagaaggtgggcatcagaagtttaaaaatattccagatggcaaatgaattgtaaaatctgaatcctttccaaaaagtgtgtccacctgatcccggtgtcgactcctaagaatggaatgagtagcaagagtcgaaagagaatcatgcccgaccctgtgacggagccccctgtgacagaccccgtttatgaagctcttttgtactgcaacatccccagcgtggccgagcgcagcatggaaggtcatgccccgcatcattttaagctggtctcagtgcatgtgttcattcgccacggagacaggtacccactgtatgtcattcccaaaacaaagcgaccagaaattgactgcactctggtggctaacaggaaaccgtatcacccaaaactggaagctttcattagtcacatgtcaaaaggatccggagcctctttcgaaagccccttgaactccttgcctctttacccaaatcacccattgtgtgagatgggagagctcacacagacagg

SEQ ID NO: 102645 - DNA, 629 bp, Homo sapiens
  Payload ID: 24
  Gene Symbol: PXYLP1
  Gene Name: 2-phosphoxylose phosphatase 1
  ENST ID: ENST00000514880
  CDS Start-End: 141-221
gcctcccctcgcgccgggaggagctggcggcgagcgccgagccgggcgcgcagcgacggagctggggccggcctgggaccatgggcggacatgttcccgatttgaggtgaaaccatgaagagaaaatagaatacttaataatgcttttccgcaaccgcttcttgctgctgctggccctggctgcgctgctggcctttgtgagcctcagcctgcagttctgaaaccgtatcacccaaaactggaagctttcattagtcacatgtcaaaaggatccggagcctctttcgaaagccccttgaactccttgcctctttacccaaatcacccattgtgtgagatgggagagctcacacagacaggagttgtgcagcatttgcagaacggtcagctgctgagggatatctatctaaagaaacacaaactcctgcccaatgattggtctgcagaccagctctatttagagaccactgggaaaagccggaccctacaaagtgggctggccttgctttatggctttctcccagattttgactggaagaagatttatttcaggcaccagccaagtgcgctgttctgctctggaagctgctattgcccggtaagaaaccagtatctggaaaaggagcagc

SEQ ID NO: 102646 - DNA, 797 bp, Homo sapiens
  Payload ID: 24
  Gene Symbol: PXYLP1
  Gene Name: 2-phosphoxylose phosphatase 1
  ENST ID: ENST00000513528
  CDS Start-End: 364-444
gacggagctggggccggcctgggaccatgggcgccctctcccgcacggcccccgcactcccgccgctggattccagccgagattcaagctcccgggatcccccttcccgggcggtcctgagccggctagtctccagtgagtgcaatctacggatcagtctctgatggtgggtcgttaacctcagtggggactccaagatttccatgaagaaaatcagttgtcttcattcaagaattggggtctggctcagaattcctgcagctggtgaaaatctgttttctagaagaggtttaattaatgcctgcagtctgacatgttcccgatttgaggtgaaaccatgaagagaaaatagaatacttaataatgcttttccgcaaccgcttcttgctgctgctggccctggctgcgctgctggcctttgtgagcctcagcctgcagttctaattggaaaagaggtcaaaagaaggtgggcatcagaagtttaaaaatattccagatggcaaatgaattgtaaaatctgaatcctttccaaaaagtgtgtccacctgatcccggtgtcgactcctaagaatggaatgagtagcaagagtcgaaagagaatcatgcccgaccctgtgacggagccccctgtgacagaccccgtttatgaagctcttttgtactgcaacatccccagcgtggccgagcgcagcatggaaggtcatgccccgcatcattttaagctggtctcagtgcatgtgttcattcgccacggagacaggtacccactgtatgtcattcccaaaacaaagcgacca

SEQ ID NO: 102647 - DNA, 1773 bp, Homo sapiens
  Payload ID: 24
  Gene Symbol: PXYLP1
  Gene Name: 2-phosphoxylose phosphatase 1
  ENST ID: ENST00000504264
  CDS Start-End: 83-1474
aaaattttgcagggtaaattagcctgtctgggtctgagctctttattcttggatacgttggagatcggaaagatattaagatatggacgttcttactgctcttcttttagtccacctgatcccggtgtcgactcctaagaatggaatgagtagcaagagtcgaaagagaatcatgcccgaccctgtgacggagccccctgtgacagaccccgtttatgaagctcttttgtactgcaacatccccagcgtggccgagcgcagcatggaaggtcatgccccgcatcattttaagctggtctcagtgcatgtgttcattcgccacggagacaggtacccactgtatgtcattcccaaaacaaagcgaccagaaattgactgcactctggtggctaacaggaaaccgtatcacccaaaactggaagctttcattagtcacatgtcaaaaggatccggagcctctttcgaaagccccttgaactccttgcctctttacccaaatcacccattgtgtgagatgggagagctcacacagacaggagttgtgcagcatttgcagaacggtcagctgctgagggatatctatctaaagaaacacaaactcctgcccaatgattggtctgcagaccagctctatttagagaccactgggaaaagccggaccctacaaagtgggctggccttgctttatggctttctcccagattttgactggaagaagatttatttcaggcaccagccaagtgcgctgttctgctctggaagctgctattgcccggtaagaaaccagtatctggaaaaggagcagcgtcgtcagtacctcctacgtttgaaaaacagccagctggagaagacctacggggagatggccaagatcgtggatgtccccaccaagcagcttagagctgccaaccccatagactccatgctctgccacttctgccacaatgtcagctttccctgtaccagaaatggctgtgttgacatggagcacttcaaggtaattaagacccatcagatcgaggatgaaagggaaagacgggagaagaaattgtacttcgggtattctctcctgggtgcccaccccatcctgaaccaaaccatcggccggatgcagcgtgccaccgagggcaggaaagaagagctctttgccctctactctgctcatgatgtcactctgtcaccagttctcagtgccttgggcctttcagaagccaggttcccaaggtttgcagccaggttgatctttgagctttggcaagacagagaaaagcccagtgaacattccgtccggattctttacaatggcgtcgatgtcacattccacacctctttctgccaagaccaccacaagcgttctcccaagcccatgtgcccgcttgaaaacttggtccgctttgtgaaaagggacatgtttgtagccctgggtggcagtggtacaaattattatgatgcatgtcacagggaaggattctaaaaggtatgcagtacagcagtatagaatccatgccaatacagagcatagggaaaggtccacttctagttttgtctgttactaagggtagaagattattgctttttaaaggctaaatattgtttgtgggaaccacagatggttggggttgaacagtaagcacattgctgcaatgtggtacgtgaattgcttggtacaaaatggccagttcacagaggaatagaaggtactttatcatagccagacttcgcttagaatgccagaataatatagttcaagacctgaagttgccaatccaagtt

SEQ ID NO: 102648 - DNA, 478 bp, Homo sapiens
  Payload ID: 24
  Gene Symbol: PXYLP1
  Gene Name: 2-phosphoxylose phosphatase 1
  ENST ID: ENST00000514680
  CDS Start-End: 193-478
agcgacggagctggggccggcctgggaccatgggcgtgagtgcaatctacggatcagtctctgatggtgggtcgttaacctcagtggggactccaagatttccatgaagaaaatcagttgtcttcattcaagaattggggacatgttcccgatttgaggtgaaaccatgaagagaaaatagaatacttaataatgcttttccgcaaccgcttcttgctgctgctggccctggctgcgctgctggcctttgtgagcctcagcctgcagttcttccacctgatcccggtgtcgactcctaagaatggaatgagtagcaagagtcgaaagagaatcatgcccgaccctgtgacggagccccctgtgacagaccccgtttatgaagctcttttgtactgcaacatccccagcgtggccgagcgcagcatggaaggtcatgccccgcatcattttaagctggtctcagtgcatgtgttcattc

SEQ ID NO: 102649 - DNA, 2465 bp, Homo sapiens
  Payload ID: 25
  Gene Symbol: BPNT1
  Gene Name: 3'(2'), 5'-bisphosphate nucleotidase 1
  Uniprot ID: O95861
  ENST ID: ENST00000322067
  CDS Start-End: 177-1103
gcttgcgcgcagtttcccgcatgctcagtagctgaggtagggatgccatccttctcaaaagacttattgacagtgccaaagctcggtactggacacaacgagggacctgggtctacgataacgcgcttttgctcctcctgaagtgtctttggtccaacgttgttccagagtgtaccatggcttccagtaacactgtgttgatgcggttggtagcctccgcatattctattgctcaaaaggcaggaatgatagtcagacgtgttattgctgaaggagacctgggtattgtggagaagacctgtgcaacagacctgcagaccaaagctgaccgattggcacagatgagcatatgttcttcattggcccggaaattccccaaactcacaattataggggaagaggatctgccttctgaggaagtggatcaagagctgattgaagacagtcagtgggaagaaatactgaagcaaccatgcccatcgcagtacagtgctattaaagaagaagatctcgtggtctgggttgatcctctggatggaaccaaggaatataccgaaggtcttcttgacaatgtaacagttcttattggaattgcttatgaaggaaaagccatagcaggagttattaaccagccatattacaactatgaggcaggaccagatgctgtgttggggaggacaatctggggagttttaggtttaggcgcctttgggtttcagctgaaagaagtccctgctgggaaacacattatcacaactactcgatcccatagcaacaagttggttactgactgtgttgctgctatgaaccccgatgctgtgctgcgagtaggaggagcaggaaataagattattcagctgattgaaggcaaagcctctgcttatgtatttgcaagtcctggttgtaagaagtgggatacttgtgctccagaagttattttacatgctgtgggaggcaagttaaccgatatccatgggaatgttcttcagtaccacaaggatgtgaagcatatgaactctgcaggagtcctggccacactgaggaattatgactactatgcaagccgagttccagaatctattaaaaatgcacttgttccttaaaggaaagtttcatttggccgggcgcggtggctcatgcctgtaatcccagcactttgggaggccgaggcaggtggatcacttgagctcaggagtttgagaccagcctgggcaatatcgtgagaccccatctctacaaaaatacaaattaactgggcatcctgtcatgcgcctgtcatcccagctacttgagaggctgaagcagaagaatctcttgagcccggaaggcagaggttgcagtgagctgagatcgtgccactgcactccagcctgagtgacaggagttaagccctgtctcagaaaaaaaaaaaacaaaaacccaaaaagtacttaaagtttcatttacttagctaggagaaagacttggttctcaaaataatacattttaagattaattgggtagaattagagttccacctttattcattgttgagcagtgatttatatttagttattatatttaggaatagaaaatagaattaaataatttaacttgattaatcaaccagaccaattttgacgtctggagaacttataaactcaatatgttatatttgttttcctgtatttaggtggagaaatgagaaaaagctttagttccaattgacagttcaggtcaatgttcaatgaacattcctatcttctaaaccagatttctctttttttttcctgagacggagtctcgctctgtagcctaggctagaatgtagtggcgtgatctcggctcactgcaagctccgcctcccgggttcatgccattctcctgcctcagcctcccgagtagctgggactgcaggcaccgccaccacgcctggctaattttttgtatttttagtagagaaggtgtttcaccgtgttagccaggatggtcttgatctcctgacatcgtgatctgtctgcctcggactcccaaagtgctgggattacaggtgtgagccaccgcacctggcctaaaccagatttctttagggcacaattttttctggaatctcactcttgtttttcacagtaattttaaaaacgtttctactccaattaagaatatatatgatgttattatatatgcttatgaaacagatttatgagaaaagttttttttaaataaattatttaatcctagctctttgttattcaccagctttttaaaaaagtgtttgaaaattatacattctcgactttggggattagtttattcttgtggcatcattataaggcttaattgtggaaagctaagtacttgcttctattccttccaatgagagattataacataaactattaaaattattctgctaatatacctagatttttatttttaggtctctgtccattgcttttaattaaaattatctgttttcaaatcaa

SEQ ID NO: 102650 - DNA, 1152 bp, Homo sapiens
  Payload ID: 25
  Gene Symbol: BPNT1
  Gene Name: 3'(2'), 5'-bisphosphate nucleotidase 1
  ENST ID: ENST00000354807
  CDS Start-End: 96-971
ctcggtactggacacaacgagggacctgggtctacgataacgcgcttttgctcctcctgaagtgtctttggtccaacgttgttccagagtgtaccatggcttccagtaacactgtgttgatgcggttggtagcctccgcatattctattgctcaaaaggcaggaatgatagtcagacgtgttattgctgaaggagacctgggtattgtggagaagacctgtgcaacagacctgcagaccaaagctgaccgattggcacagatgagcatatgttcttcattggcccggaaattccccaaactcacaattataggggaagaggatctgccttctgaggaagtggatcaagagctgattgaagacagtcagtgggaagaaatactgaagcaaccatgcccatcgcagtacagtgctattaaagaagaagatctcgtggtctgggttgatcctctggatggaaccaaggaatataccgaaggtcttcttgacaatgtaacagttcttattggaattgcttatgaaggaaaagccatagcaggagttattaaccagccatattacaactatgagaacaatgaaaaacagcagttaagggaacacaggaatgaagcaaaggcaggaccagatgctgtgttggggaggacaatctggggagttttaggtttaggcgcctttgggtttcagctgaaagaagtccctgctgggaaacacattatcacaactactcgatcccatagcaacaagttggttactgactgtgttgctgctatgaaccccgatgctgtgctgcgagtaggaggagcaggaaataagattattcagctgattgaaggcaaagcctctgcttatgtatttgcaagtcctggttgtaagaagtgggatacttgtgctccagaagttattttacatgctgtgggaggcaagttaaccgatatccatgggaatgttcttcagtaccacaaggatgtgtgagccaccgcacctggcctaaaccagatttctttagggcacaattttttctggaatctcactcttgtttttcacagtaattttaaaaacgtttctactccaattaagaatatatatgatgttattatatatgcttatgaaacagatttatgagaaaagttttttttaaataaattatttaatc

SEQ ID NO: 102651 - DNA, 2357 bp, Homo sapiens
  Payload ID: 25
  Gene Symbol: BPNT1
  Gene Name: 3'(2'), 5'-bisphosphate nucleotidase 1
  Uniprot ID: O95861
  ENST ID: ENST00000414869
  CDS Start-End: 177-995
gcttgcgcgcagtttcccgcatgctcagtagctgaggtagggatgccatccttctcaaaagacttattgacagtgccaaagctcggtactggacacaacgagggacctgggtctacgataacgcgcttttgctcctcctgaagtgtctttggtccaacgttgttccagagtgtaccatggcttccagtaacactgtgttgatgcggttggtagcctccgcatattctattgctcaaaaggcaggaatgatagtcagacgtgttattgctgaaggagacctgggtattgtggagaagacctgtgcaacagacctgcagaccaaagctgaccgattggcacagatgagcatatgttcttcattggcccggaaattccccaaactcacaattataggggaagagctcgtggtctgggttgatcctctggatggaaccaaggaatataccgaaggtcttcttgacaatgtaacagttcttattggaattgcttatgaaggaaaagccatagcaggagttattaaccagccatattacaactatgaggcaggaccagatgctgtgttggggaggacaatctggggagttttaggtttaggcgcctttgggtttcagctgaaagaagtccctgctgggaaacacattatcacaactactcgatcccatagcaacaagttggttactgactgtgttgctgctatgaaccccgatgctgtgctgcgagtaggaggagcaggaaataagattattcagctgattgaaggcaaagcctctgcttatgtatttgcaagtcctggttgtaagaagtgggatacttgtgctccagaagttattttacatgctgtgggaggcaagttaaccgatatccatgggaatgttcttcagtaccacaaggatgtgaagcatatgaactctgcaggagtcctggccacactgaggaattatgactactatgcaagccgagttccagaatctattaaaaatgcacttgttccttaaaggaaagtttcatttggccgggcgcggtggctcatgcctgtaatcccagcactttgggaggccgaggcaggtggatcacttgagctcaggagtttgagaccagcctgggcaatatcgtgagaccccatctctacaaaaatacaaattaactgggcatcctgtcatgcgcctgtcatcccagctacttgagaggctgaagcagaagaatctcttgagcccggaaggcagaggttgcagtgagctgagatcgtgccactgcactccagcctgagtgacaggagttaagccctgtctcagaaaaaaaaaaaacaaaaacccaaaaagtacttaaagtttcatttacttagctaggagaaagacttggttctcaaaataatacattttaagattaattgggtagaattagagttccacctttattcattgttgagcagtgatttatatttagttattatatttaggaatagaaaatagaattaaataatttaacttgattaatcaaccagaccaattttgacgtctggagaacttataaactcaatatgttatatttgttttcctgtatttaggtggagaaatgagaaaaagctttagttccaattgacagttcaggtcaatgttcaatgaacattcctatcttctaaaccagatttctctttttttttcctgagacggagtctcgctctgtagcctaggctagaatgtagtggcgtgatctcggctcactgcaagctccgcctcccgggttcatgccattctcctgcctcagcctcccgagtagctgggactgcaggcaccgccaccacgcctggctaattttttgtatttttagtagagaaggtgtttcaccgtgttagccaggatggtcttgatctcctgacatcgtgatctgtctgcctcggactcccaaagtgctgggattacaggtgtgagccaccgcacctggcctaaaccagatttctttagggcacaattttttctggaatctcactcttgtttttcacagtaattttaaaaacgtttctactccaattaagaatatatatgatgttattatatatgcttatgaaacagatttatgagaaaagttttttttaaataaattatttaatcctagctctttgttattcaccagctttttaaaaaagtgtttgaaaattatacattctcgactttggggattagtttattcttgtggcatcattataaggcttaattgtggaaagctaagtacttgcttctattccttccaatgagagattataacataaactattaaaattattctgctaatatacctagatttttatttttaggtctctgtccattgcttttaattaaaattatctgttttcaaatcaa

SEQ ID NO: 102652 - DNA, 2379 bp, Homo sapiens
  Payload ID: 25
  Gene Symbol: BPNT1
  Gene Name: 3'(2'), 5'-bisphosphate nucleotidase 1
  Uniprot ID: O95861
  ENST ID: ENST00000544404
  CDS Start-End: 256-1017
gcttgcgcgcagtttcccgcatgctcagtagctgaggtagggatgccatccttctcaaaagacttattgacagtgccaaagctcggtactggacacaacgagggacctgggtctacgataacgcgcttttgctcctcctgaagtgtctttggtccaacgttgttccaggtttgtcaccgtttctctccggccggtcagggcaagagccagacctgtgcaacagacctgcagaccaaagctgaccgattggcacagatgagcatatgttcttcattggcccggaaattccccaaactcacaattataggggaagaggatctgccttctgaggaagtggatcaagagctgattgaagacagtcagtgggaagaaatactgaagcaaccatgcccatcgcagtacagtgctattaaagaagaagatctcgtggtctgggttgatcctctggatggaaccaaggaatataccgaaggtcttcttgacaatgtaacagttcttattggaattgcttatgaaggaaaagccatagcaggagttattaaccagccatattacaactatgaggcaggaccagatgctgtgttggggaggacaatctggggagttttaggtttaggcgcctttgggtttcagctgaaagaagtccctgctgggaaacacattatcacaactactcgatcccatagcaacaagttggttactgactgtgttgctgctatgaaccccgatgctgtgctgcgagtaggaggagcaggaaataagattattcagctgattgaaggcaaagcctctgcttatgtatttgcaagtcctggttgtaagaagtgggatacttgtgctccagaagttattttacatgctgtgggaggcaagttaaccgatatccatgggaatgttcttcagtaccacaaggatgtgaagcatatgaactctgcaggagtcctggccacactgaggaattatgactactatgcaagccgagttccagaatctattaaaaatgcacttgttccttaaaggaaagtttcatttggccgggcgcggtggctcatgcctgtaatcccagcactttgggaggccgaggcaggtggatcacttgagctcaggagtttgagaccagcctgggcaatatcgtgagaccccatctctacaaaaatacaaattaactgggcatcctgtcatgcgcctgtcatcccagctacttgagaggctgaagcagaagaatctcttgagcccggaaggcagaggttgcagtgagctgagatcgtgccactgcactccagcctgagtgacaggagttaagccctgtctcagaaaaaaaaaaaacaaaaacccaaaaagtacttaaagtttcatttacttagctaggagaaagacttggttctcaaaataatacattttaagattaattgggtagaattagagttccacctttattcattgttgagcagtgatttatatttagttattatatttaggaatagaaaatagaattaaataatttaacttgattaatcaaccagaccaattttgacgtctggagaacttataaactcaatatgttatatttgttttcctgtatttaggtggagaaatgagaaaaagctttagttccaattgacagttcaggtcaatgttcaatgaacattcctatcttctaaaccagatttctctttttttttcctgagacggagtctcgctctgtagcctaggctagaatgtagtggcgtgatctcggctcactgcaagctccgcctcccgggttcatgccattctcctgcctcagcctcccgagtagctgggactgcaggcaccgccaccacgcctggctaattttttgtatttttagtagagaaggtgtttcaccgtgttagccaggatggtcttgatctcctgacatcgtgatctgtctgcctcggactcccaaagtgctgggattacaggtgtgagccaccgcacctggcctaaaccagatttctttagggcacaattttttctggaatctcactcttgtttttcacagtaattttaaaaacgtttctactccaattaagaatatatatgatgttattatatatgcttatgaaacagatttatgagaaaagttttttttaaataaattatttaatcctagctctttgttattcaccagctttttaaaaaagtgtttgaaaattatacattctcgactttggggattagtttattcttgtggcatcattataaggcttaattgtggaaagctaagtacttgcttctattccttccaatgagagattataacataaactattaaaattattctgctaatatacctagatttttatttttaggtctctgtccattgcttttaattaaaattatctgttttcaaatcaa

SEQ ID NO: 102653 - DNA, 2737 bp, Homo sapiens
  Payload ID: 25
  Gene Symbol: BPNT1
  Gene Name: 3'(2'), 5'-bisphosphate nucleotidase 1
  Uniprot ID: O95861
  ENST ID: ENST00000469520
  CDS Start-End: 451-1377
attagctgggtgtggtggcgcgcacctccaccagtagtcccagctacacggaaggctgaggcgggaggatggcttgagcctagaagtgggaaggcagcagtgagccgtaatcgactctgggcgacagagcaagctatctatcgcttaaaaaaaaaaaaaaaaaaaaaaaaaaaaaggtgacttgcacctacggagagcttggagaaaacacggacaagtggaattttcccgcggatcaggagtctaaagaggcagtgtgaaatcgctgttgtgcgcttgcgcgcagtttcccgcatgctcagtagctgaggtagggatgccatccttctcaaaagacttattgacagtgccaaagctcggtactggacacaacgagggacctgggtctacgataacgcgcttttgctcctcctgaagtgtctttggtccaacgttgttccagagtgtaccatggcttccagtaacactgtgttgatgcggttggtagcctccgcatattctattgctcaaaaggcaggaatgatagtcagacgtgttattgctgaaggagacctgggtattgtggagaagacctgtgcaacagacctgcagaccaaagctgaccgattggcacagatgagcatatgttcttcattggcccggaaattccccaaactcacaattataggggaagaggatctgccttctgaggaagtggatcaagagctgattgaagacagtcagtgggaagaaatactgaagcaaccatgcccatcgcagtacagtgctattaaagaagaagatctcgtggtctgggttgatcctctggatggaaccaaggaatataccgaaggtcttcttgacaatgtaacagttcttattggaattgcttatgaaggaaaagccatagcaggagttattaaccagccatattacaactatgaggcaggaccagatgctgtgttggggaggacaatctggggagttttaggtttaggcgcctttgggtttcagctgaaagaagtccctgctgggaaacacattatcacaactactcgatcccatagcaacaagttggttactgactgtgttgctgctatgaaccccgatgctgtgctgcgagtaggaggagcaggaaataagattattcagctgattgaaggcaaagcctctgcttatgtatttgcaagtcctggttgtaagaagtgggatacttgtgctccagaagttattttacatgctgtgggaggcaagttaaccgatatccatgggaatgttcttcagtaccacaaggatgtgaagcatatgaactctgcaggagtcctggccacactgaggaattatgactactatgcaagccgagttccagaatctattaaaaatgcacttgttccttaaaggaaagtttcatttggccgggcgcggtggctcatgcctgtaatcccagcactttgggaggccgaggcaggtggatcacttgagctcaggagtttgagaccagcctgggcaatatcgtgagaccccatctctacaaaaatacaaattaactgggcatcctgtcatgcgcctgtcatcccagctacttgagaggctgaagcagaagaatctcttgagcccggaaggcagaggttgcagtgagctgagatcgtgccactgcactccagcctgagtgacaggagttaagccctgtctcagaaaaaaaaaaaacaaaaacccaaaaagtacttaaagtttcatttacttagctaggagaaagacttggttctcaaaataatacattttaagattaattgggtagaattagagttccacctttattcattgttgagcagtgatttatatttagttattatatttaggaatagaaaatagaattaaataatttaacttgattaatcaaccagaccaattttgacgtctggagaacttataaactcaatatgttatatttgttttcctgtatttaggtggagaaatgagaaaaagctttagttccaattgacagttcaggtcaatgttcaatgaacattcctatcttctaaaccagatttctctttttttttcctgagacggagtctcgctctgtagcctaggctagaatgtagtggcgtgatctcggctcactgcaagctccgcctcccgggttcatgccattctcctgcctcagcctcccgagtagctgggactgcaggcaccgccaccacgcctggctaattttttgtatttttagtagagaaggtgtttcaccgtgttagccaggatggtcttgatctcctgacatcgtgatctgtctgcctcggactcccaaagtgctgggattacaggtgtgagccaccgcacctggcctaaaccagatttctttagggcacaattttttctggaatctcactcttgtttttcacagtaattttaaaaacgtttctactccaattaagaatatatatgatgttattatatatgcttatgaaacagatttatgagaaaagttttttttaaataaattatttaatcctagctctttgttattcaccagctttttaaaaaagtgtttgaaaattatacattctcgactttggggattagtttattcttgtggcatcattataaggcttaattgtggaaagctaagtacttgcttctattccttccaatgagagattataacataaactattaaaattattctgctaatatacctagatttttatttttaggtctctgtccattgcttttaattaaaattatctgttttcaaatc

SEQ ID NO: 102654 - DNA, 559 bp, Homo sapiens
  Payload ID: 25
  Gene Symbol: BPNT1
  Gene Name: 3'(2'), 5'-bisphosphate nucleotidase 1
  ENST ID: ENST00000498791
  CDS Start-End: 151-559
agtagctgaggtagggatgccatccttctcaaaagacttattgacagtgccaaagctcggtactggacacaacgagggacctgggtctacgataacgcgcttttgctcctcctgaagtgtctttggtccaacgttgttccagagtgtaccatggcttccagtaacactgtgttgatgcggttggtagcctccgcatattctattgctcaaaaggcaggaatgatagtcagacgtgttattgctgaaggagacctgggtattgtggagaagacctgtgcaacagacctgcagaccaaagctgaccgattggcacagatgagcatatgttcttcattggcccggaaattccccaaactcacaattataggggaagagctcgtggtctgggttgatcctctggatggaaccaaggaatataccgaaggtcttcttgacaatgtaacagttcttattggaattgcttatgaaggaaaagccatagcaggagttattaaccagccatattacaactatgaggcaggaccagatgctgtgttggggaggacaatctggggagttt

SEQ ID NO: 102655 - DNA, 644 bp, Homo sapiens
  Payload ID: 25
  Gene Symbol: BPNT1
  Gene Name: 3'(2'), 5'-bisphosphate nucleotidase 1
  ENST ID: ENST00000463953
  CDS Start-End: 135-644
ggtactggacacaacgagggacctgggtctacgataacgcgcttttgctcctcctgaagtgtctttggtccaacgttgttccaggtttgtcaccgtttctctccggccggtcagggcaagagccagagtgtaccatggcttccagtaacactgtgttgatgcggttggtagcctccgcatattctattgctcaaaaggcaggaatgatagtcagacgtgttattgctgaaggagacctgggtattgtggagaagacctgtgcaacagacctgcagaccaaagctgaccgattggcacagatgagcatatgttcttcattggcccggaaattccccaaactcacaattataggggaagagctcgtggtctgggttgatcctctggatggaaccaaggaatataccgaaggtcttcttgacaatgtaacagttcttattggaattgcttatgaaggaaaagccatagcaggagttattaaccagccatattacaactatgaggcaggaccagatgctgtgttggggaggacaatctggggagttttaggtttaggcgcctttgggtttcagctgaaagaagtccctgctgggaaacacattatcacaactactcgatcccatagcaacaagttggttactgactgt

SEQ ID NO: 102656 - DNA, 583 bp, Homo sapiens
  Payload ID: 25
  Gene Symbol: BPNT1
  Gene Name: 3'(2'), 5'-bisphosphate nucleotidase 1
  ENST ID: ENST00000480959
  CDS Start-End: 236-583
atgctcagtagctgaggtagggatgccatccttctcaaaagacttattgacagtgccaaagctcggtactggacacaacgagggacctgggtctacgataacgcgcttttgctcctcctgaagtgtctttggtccaacgttgttccaggtttgtcaccgtttctctccggccggtcagggcaagagccagacctgtgcaacagacctgcagaccaaagctgaccgattggcacagatgagcatatgttcttcattggcccggaaattccccaaactcacaattataggggaagaggatctgccttctgaggaagtggatcaagagctgattgaagacagtcagtgggaagaaatactgaagcaaccatgcccatcgcagtacagtgctattaaagaagaagatctcgtggtctgggttgatcctctggatggaaccaaggaatataccgaaggtcttcttgacaatgtaacagttcttattggaattgcttatgaaggaaaagccatagcaggagttattaaccagccatattacaactatgaggcaggaccagatgctgtgttggggaggacaatctgggga

SEQ ID NO: 102657 - DNA, 569 bp, Homo sapiens
  Payload ID: 25
  Gene Symbol: BPNT1
  Gene Name: 3'(2'), 5'-bisphosphate nucleotidase 1
  ENST ID: ENST00000498237
  CDS Start-End: 178-569
gatgccatccttctcaaaagacttattgacagtgccaaagctcggtactggacacaacgagggacctgggtctacgataacgcgcttttgctcctcctgaagtgtctttggtccaacgttgttccaggtttgtcaccgtttctctccggccggtcagggcaagagccagagtgtaccatggcttccagtaacactgtgttgatgcggttggtagcctccgcatattctattgctcaaaaggcaggaatgatagtcagacgtgttattgctgaaggagacctgggtattgtggagaagacctgtgcaacagacctgcagaccaaagctgaccgattggcacagatgagcatatgttcttcattggcccggaaattccccaaactcacaattataggggaagaggatctgccttctgaggaagtggatcaagagctgattgaagacagtcagtgggaagaaatactgaagcaaccatgcccatcgcagtacagtgctattaaagaagaagatctcgtggtctgggttgatcctctggatggaaccaaggaatataccgaaggtcttcttga

SEQ ID NO: 102658 - DNA, 4585 bp, Homo sapiens
  Payload ID: 26
  Gene Symbol: HMGCR
  Gene Name: 3-hydroxy-3-methylglutaryl-CoA reductase
  Uniprot ID: P04035
  ENST ID: ENST00000287936
  CDS Start-End: 157-2823
ctcttattggtcgaaggctcgtccagctccgagcgtgcgtaaggtgagggctccttccgctccgcgactgcgttaactggagccaggctgagcgtcggcgccggggttcggtggcctctagtgagatctggaggatccaaggattctgtagctacaatgttgtcaagactttttcgaatgcatggcctctttgtggcctcccatccctgggaagtcatagtggggacagtgacactgaccatctgcatgatgtccatgaacatgtttactggtaacaataagatctgtggttggaattatgaatgtccaaagtttgaagaggatgttttgagcagtgacattataattctgacaataacacgatgcatagccatcctgtatatttacttccagttccagaatttacgtcaacttggatcaaaatatattttgggtattgctggccttttcacaattttctcaagttttgtattcagtacagttgtcattcacttcttagacaaagaattgacaggcttgaatgaagctttgccctttttcctacttttgattgacctttccagagcaagcacattagcaaagtttgccctcagttccaactcacaggatgaagtaagggaaaatattgctcgtggaatggcaattttaggtcctacgtttaccctcgatgctcttgttgaatgtcttgtgattggagttggtaccatgtcaggggtacgtcagcttgaaattatgtgctgctttggctgcatgtcagttcttgccaactacttcgtgttcatgactttcttcccagcttgtgtgtccttggtattagagctttctcgggaaagccgcgagggtcgtccaatttggcagctcagccattttgcccgagttttagaagaagaagaaaataagccgaatcctgtaactcagagggtcaagatgattatgtctctaggcttggttcttgttcatgctcacagtcgctggatagctgatccttctcctcaaaacagtacagcagatacttctaaggtttcattaggactggatgaaaatgtgtccaagagaattgaaccaagtgtttccctctggcagttttatctctctaaaatgatcagcatggatattgaacaagttattaccctaagtttagctctccttctggctgtcaagtacatcttctttgaacaaacagagacagaatctacactctcattaaaaaaccctatcacatctcctgtagtgacacaaaagaaagtcccagacaattgttgtagacgtgaacctatgctggtcagaaataaccagaaatgtgattcagtagaggaagagacagggataaaccgagaaagaaaagttgaggttataaaacccttagtggctgaaacagataccccaaacagagctacatttgtggttggtaactcctccttactcgatacttcatcagtactggtgacacaggaacctgaaattgaacttcccagggaacctcggcctaatgaagaatgtctacagatacttgggaatgcagagaaaggtgcaaaattccttagtgatgctgagatcatccagttagtcaatgctaagcatatcccagcctacaagttggaaactctgatggaaactcatgagcgtggtgtatctattcgccgacagttactttccaagaagctttcagaaccttcttctctccagtacctaccttacagggattataattactccttggtgatgggagcttgttgtgagaatgttattggatatatgcccatccctgttggagtggcaggacccctttgcttagatgaaaaagaatttcaggttccaatggcaacaacagaaggttgtcttgtggccagcaccaatagaggctgcagagcaataggtcttggtggaggtgccagcagccgagtccttgcagatgggatgactcgtggcccagttgtgcgtcttccacgtgcttgtgactctgcagaagtgaaagcctggctcgaaacatctgaagggttcgcagtgataaaggaggcatttgacagcactagcagatttgcacgtctacagaaacttcatacaagtatagctggacgcaacctttatatccgtttccagtccaggtcaggggatgccatggggatgaacatgatttcaaagggtacagagaaagcactttcaaaacttcacgagtatttccctgaaatgcagattctagccgttagtggtaactattgtactgacaagaaacctgctgctataaattggatagagggaagaggaaaatctgttgtttgtgaagctgtcattccagccaaggttgtcagagaagtattaaagactaccacagaggctatgattgaggtcaacattaacaagaatttagtgggctctgccatggctgggagcataggaggctacaacgcccatgcagcaaacattgtcaccgccatctacattgcctgtggacaggatgcagcacagaatgttggtagttcaaactgtattactttaatggaagcaagtggtcccacaaatgaagatttatatatcagctgcaccatgccatctatagagataggaacggtgggtggtgggaccaacctactacctcagcaagcctgtttgcagatgctaggtgttcaaggagcatgcaaagataatcctggggaaaatgcccggcagcttgcccgaattgtgtgtgggaccgtaatggctggggaattgtcacttatggcagcattggcagcaggacatcttgtcaaaagtcacatgattcacaacaggtcgaagatcaatttacaagacctccaaggagcttgcaccaagaagacagcctgaatagcccgacagttctgaactggaacatgggcattgggttctaaaggactaacataaaatctgtgaattaaaaaagctcaatgcattgtcttgtggaggatgaatagatgtgatcactgagacagccacttggtttttggctctttcagagaggtctcaggttctttccatgcagactcctcagatctgaacacagtttagtgctttacatgctgtgctctttgaagagatttcaacaagaatattgtatgttaaagcatcagagatggtaatctacagctcacctctgaaggcaaatataagctgggaaaaaagttttgatgaaattcttgaagttcatggtgatcagtgcaattgaccttctccctcactcctgccagttgaaaatggatttttaaattatactgtagctgatgaaactcctgattttgtagttaatttattaagtctgggatgtagaacttcaagaagtaagagctaagttctaagttcatgtttgtaaattaatacttcatttggtgctggtctattttgattttggggggtaatcagcattattcttcagaaggggacctgttttcttcaagggaagaaacactcttattcccaaactacagaataatgtgttaaacatgctaaatagttctatcaggaaaacaaatcactgtatttatctccgcaggctatttgttcagagaggccttttgtttaaatataaatgtttaaatataaatgtttgtctggattggctataacatgtctttcagcattaggcttttaagaaacacagggttttgtattctttactaaagatatcagagctcttaatgttgcttagatgagggtgactgtcaagtacaagcaagactgggaccttagaaatcattgtagaaacacagttttgaaagaaaaataccatgtctctaagccaactttaattgcttaaaagacatttttatttagttgaaaaatctagttttttttgtaaactgtatcaaatctgtatatgttgtaataaaacttatgctagtttattggaagtgttcaagaaataaaaatcaacttgtgtactgataaaatactctagcctgggccagagaagataatgttctttaatgttgtccaggaaaccctggcttgcttgccgagcctaatgaaagggaaagtcagctttcagagccagtgaaggagccacgtgaatggccctagaactgtgcctagttcctgtggccaggaggttggtgactgaaacattcacacagggctctttgatggacccacgaacgctcttagctttctcagggggtcagcagagttattgaatcttaattttttttaatgtacaagttttgtataaataataaagaactccttattttgtattacatctaatgcttcaagtgttgctcttggaaagctgatgatgtctcttgtagaagatggactctgaaaaacattccaggaaaccatggcagcatggagagcctcttagtgattgtgtctgcattgttattgtggaagatttaccttttctgttgtacgtaaagcttaaattgcttttgttgtgactttttagccagtgactttttctgagcttttcatggaagtggcagtgaaaaatatgttgagtgttcattttagtgactgtaattaatatcttgctggattaatgttttgtacaattactaaattgtatacattttgttatagaatacttttttctagtttcagtaaataatgaaaaggaagttaataccaataa

SEQ ID NO: 102659 - DNA, 3681 bp, Homo sapiens
  Payload ID: 26
  Gene Symbol: HMGCR
  Gene Name: 3-hydroxy-3-methylglutaryl-CoA reductase
  Uniprot ID: P04035
  ENST ID: ENST00000343975
  CDS Start-End: 93-2600
cgactgcgttaactggagccaggctgagcgtcggcgccggggttcggtggcctctagtgagatctggaggatccaaggattctgtagctacaatgttgtcaagactttttcgaatgcatggcctctttgtggcctcccatccctgggaagtcatagtggggacagtgacactgaccatctgcatgatgtccatgaacatgtttactggtaacaataagatctgtggttggaattatgaatgtccaaagtttgaagaggatgttttgagcagtgacattataattctgacaataacacgatgcatagccatcctgtatatttacttccagttccagaatttacgtcaacttggatcaaaatatattttgggtattgctggccttttcacaattttctcaagttttgtattcagtacagttgtcattcacttcttagacaaagaattgacaggcttgaatgaagctttgccctttttcctacttttgattgacctttccagagcaagcacattagcaaagtttgccctcagttccaactcacaggatgaagtaagggaaaatattgctcgtggaatggcaattttaggtcctacgtttaccctcgatgctcttgttgaatgtcttgtgattggagttggtaccatgtcaggggtacgtcagcttgaaattatgtgctgctttggctgcatgtcagttcttgccaactacttcgtgttcatgactttcttcccagcttgtgtgtccttggtattagagctttctcgggaaagccgcgagggtcgtccaatttggcagctcagccattttgcccgagttttagaagaagaagaaaataagccgaatcctgtaactcagagggtcaagatgattatgtctctaggcttggttcttgttcatgctcacagtcgctggatagctgatccttctcctcaaaacagtacagcagatacttctaaggtttcattaggactggatgaaaatgtgtccaagagaattgaaccaagtgtttccctctggcagttttatctctctaaaatgatcagcatggatattgaacaagttattaccctaagtttagctctccttctggctgtcaagtacatcttctttgaacaaacagagacagaatctacactctcattaaaaaaccctatcacatctcctgtagtgacacaaaagaaagtcccagacaattgttgtagacgtgaacctatgctggtcagaaataaccagaaatgtgattcagtagaggaagagacagggataaaccgagaaagaaaagttgaggttataaaacccttagtggctgaaacagataccccaaacagagctacatttgtggttggtaactcctccttactcgatacttcatcagtactggtgacacaggaacctgaaattgaacttcccagggaacctcggcctaatgaagaatgtctacagatacttgggaatgcagagaaaggtgcaaaattccttagtgatgctgagatcatccagttagtcaatgctaagcatatcccagcctacaagttggaaactctgatggaaactcatgagcgtggtgtatctattcgccgacagttactttccaagaagctttcagaaccttcttctctccagtacctaccttacagggattataattactccttgcttggtggaggtgccagcagccgagtccttgcagatgggatgactcgtggcccagttgtgcgtcttccacgtgcttgtgactctgcagaagtgaaagcctggctcgaaacatctgaagggttcgcagtgataaaggaggcatttgacagcactagcagatttgcacgtctacagaaacttcatacaagtatagctggacgcaacctttatatccgtttccagtccaggtcaggggatgccatggggatgaacatgatttcaaagggtacagagaaagcactttcaaaacttcacgagtatttccctgaaatgcagattctagccgttagtggtaactattgtactgacaagaaacctgctgctataaattggatagagggaagaggaaaatctgttgtttgtgaagctgtcattccagccaaggttgtcagagaagtattaaagactaccacagaggctatgattgaggtcaacattaacaagaatttagtgggctctgccatggctgggagcataggaggctacaacgcccatgcagcaaacattgtcaccgccatctacattgcctgtggacaggatgcagcacagaatgttggtagttcaaactgtattactttaatggaagcaagtggtcccacaaatgaagatttatatatcagctgcaccatgccatctatagagataggaacggtgggtggtgggaccaacctactacctcagcaagcctgtttgcagatgctaggtgttcaaggagcatgcaaagataatcctggggaaaatgcccggcagcttgcccgaattgtgtgtgggaccgtaatggctggggaattgtcacttatggcagcattggcagcaggacatcttgtcaaaagtcacatgattcacaacaggtcgaagatcaatttacaagacctccaaggagcttgcaccaagaagacagcctgaatagcccgacagttctgaactggaacatgggcattgggttctaaaggactaacataaaatctgtgaattaaaaaagctcaatgcattgtcttgtggaggatgaatagatgtgatcactgagacagccacttggtttttggctctttcagagaggtctcaggttctttccatgcagactcctcagatctgaacacagtttagtgctttacatgctgtgctctttgaagagatttcaacaagaatattgtatgttaaagcatcagagatggtaatctacagctcacctctgaaggcaaatataagctgggaaaaaagttttgatgaaattcttgaagttcatggtgatcagtgcaattgaccttctccctcactcctgccagttgaaaatggatttttaaattatactgtagctgatgaaactcctgattttgtagttaatttattaagtctgggatgtagaacttcaagaagtaagagctaagttctaagttcatgtttgtaaattaatacttcatttggtgctggtctattttgattttggggggtaatcagcattattcttcagaaggggacctgttttcttcaagggaagaaacactcttattcccaaactacagaataatgtgttaaacatgctaaatagttctatcaggaaaacaaatcactgtatttatctccgcaggctatttgttcagagaggccttttgtttaaatataaatgtttaaatataaatgtttgtctggattggctataacatgtctttcagcattaggcttttaagaaacacagggttttgtattctttactaaagatatcagagctcttaatgttgcttagatgagggtgactgtcaagtacaagcaagactgggaccttagaaatcattgtagaaacacagttttgaaagaaaaataccatgtctctaagccaactttaattgcttaaaagacatttttatttagttgaaaaatctagttttttttgtaaactgtatcaaatctgtatatgttgtaataaaacttatgctagtttattggaagtgttcaagaaataaaaatcaacttgtgtactgataaaata

SEQ ID NO: 102660 - DNA, 268 bp, Homo sapiens
  Payload ID: 26
  Gene Symbol: HMGCR
  Gene Name: 3-hydroxy-3-methylglutaryl-CoA reductase
  ENST ID: ENST00000442032
  CDS Start-End: 214-268
gagatcccgccactgcactccagcctgggcgacagagcgagactccgtctcaaaaaaaaaaaaaaaaaaaaattaatttttattgcagcattgcataaatactgtcaacttaatttgcaggagctatcctgtagcctgcttgtgacatttgcaactgctgatgaaggtggacgattgaattctatggcatgatccaaggattctgtagctacaatgttgtcaagactttttcgaatgcatggcctctttgtggcctcccatccctggg

SEQ ID NO: 102661 - DNA, 487 bp, Homo sapiens
  Payload ID: 26
  Gene Symbol: HMGCR
  Gene Name: 3-hydroxy-3-methylglutaryl-CoA reductase
  ENST ID: ENST00000511986
  CDS Start-End: 1-348
tatttccctgaaatgcagattctagccgttagtggtaactattgtactgacaagaaacctgctgctataaattggatagagggaagaggaaaatctgttgtttgtgaagctgtcattccagccaaggttgtcagagaaatgctaggtgttcaaggagcatgcaaagataatcctggggaaaatgcccggcagcttgcccgaattgtgtgtgggaccgtaatggctggggaattgtcacttatggcagcattggcagcaggacatcttgtcaaaagtcacatgattcacaacaggtcgaagatcaatttacaagacctccaaggagcttgcaccaagaagacagcctgaatagcccgacagttctgaactggaacatgggcattgggttctaaaggactaacataaaatctgtgaattaaaaaagctcaatgcattgtcttgtggaggatgaatagatgtgatcactgagacagccacttggtttttg

SEQ ID NO: 102662 - DNA, 637 bp, Homo sapiens
  Payload ID: 26
  Gene Symbol: HMGCR
  Gene Name: 3-hydroxy-3-methylglutaryl-CoA reductase
  ENST ID: ENST00000509085
  CDS Start-End: 1-497
ttcacgagtatttccctgaaatgcagattctagccgttagtggtaactattgtactgacaagaaacctgctgctataaattggatagagggaagaggaaaatctgttgtttgtgaagctgtcattccagccaaggttgtcagagaagtattaaagactaccacagaggctatgattgaggtcaacattaacaagaatttagtgggctctgccatggctgggagcataggaggctacaacgcccatgcagcaaacattgtcaccgccatctacattgcctgtggacagatgctaggtgttcaaggagcatgcaaagataatcctggggaaaatgcccggcagcttgcccgaattgtgtgtgggaccgtaatggctggggaattgtcacttatggcagcattggcagcaggacatcttgtcaaaagtcacatgattcacaacaggtcgaagatcaatttacaagacctccaaggagcttgcaccaagaagacagcctgaatagcccgacagttctgaactggaacatgggcattgggttctaaaggactaacataaaatctgtgaattaaaaaagctcaatgcattgtcttgtggaggatgaatagatgtgatcactgagacagccacttggtttttgg

SEQ ID NO: 102663 - DNA, 3395 bp, Homo sapiens
  Payload ID: 26
  Gene Symbol: HMGCR
  Gene Name: 3-hydroxy-3-methylglutaryl-CoA reductase
  Uniprot ID: P04035
  ENST ID: ENST00000511206
  CDS Start-End: 313-2979
ctttctttaatccagtagacaatgagaaacgctgatttgggtctatggcataataggaagtagtatgccacatactgcatgtgggagttctgcaggacagattgggaagtgcatgcgtgtaagactgggaagaccagttaggagaggctattgcactgttttaagtaagacataataaagccctgcaccaggcggagagcagaaggaacgcacagaagacgcaggagaggcacatttcagagagaatccagtatgcaatggatgtcgcacacaagagagagagacgcaggatccaaggattctgtagctacaatgttgtcaagactttttcgaatgcatggcctctttgtggcctcccatccctgggaagtcatagtggggacagtgacactgaccatctgcatgatgtccatgaacatgtttactggtaacaataagatctgtggttggaattatgaatgtccaaagtttgaagaggatgttttgagcagtgacattataattctgacaataacacgatgcatagccatcctgtatatttacttccagttccagaatttacgtcaacttggatcaaaatatattttgggtattgctggccttttcacaattttctcaagttttgtattcagtacagttgtcattcacttcttagacaaagaattgacaggcttgaatgaagctttgccctttttcctacttttgattgacctttccagagcaagcacattagcaaagtttgccctcagttccaactcacaggatgaagtaagggaaaatattgctcgtggaatggcaattttaggtcctacgtttaccctcgatgctcttgttgaatgtcttgtgattggagttggtaccatgtcaggggtacgtcagcttgaaattatgtgctgctttggctgcatgtcagttcttgccaactacttcgtgttcatgactttcttcccagcttgtgtgtccttggtattagagctttctcgggaaagccgcgagggtcgtccaatttggcagctcagccattttgcccgagttttagaagaagaagaaaataagccgaatcctgtaactcagagggtcaagatgattatgtctctaggcttggttcttgttcatgctcacagtcgctggatagctgatccttctcctcaaaacagtacagcagatacttctaaggtttcattaggactggatgaaaatgtgtccaagagaattgaaccaagtgtttccctctggcagttttatctctctaaaatgatcagcatggatattgaacaagttattaccctaagtttagctctccttctggctgtcaagtacatcttctttgaacaaacagagacagaatctacactctcattaaaaaaccctatcacatctcctgtagtgacacaaaagaaagtcccagacaattgttgtagacgtgaacctatgctggtcagaaataaccagaaatgtgattcagtagaggaagagacagggataaaccgagaaagaaaagttgaggttataaaacccttagtggctgaaacagataccccaaacagagctacatttgtggttggtaactcctccttactcgatacttcatcagtactggtgacacaggaacctgaaattgaacttcccagggaacctcggcctaatgaagaatgtctacagatacttgggaatgcagagaaaggtgcaaaattccttagtgatgctgagatcatccagttagtcaatgctaagcatatcccagcctacaagttggaaactctgatggaaactcatgagcgtggtgtatctattcgccgacagttactttccaagaagctttcagaaccttcttctctccagtacctaccttacagggattataattactccttggtgatgggagcttgttgtgagaatgttattggatatatgcccatccctgttggagtggcaggacccctttgcttagatgaaaaagaatttcaggttccaatggcaacaacagaaggttgtcttgtggccagcaccaatagaggctgcagagcaataggtcttggtggaggtgccagcagccgagtccttgcagatgggatgactcgtggcccagttgtgcgtcttccacgtgcttgtgactctgcagaagtgaaagcctggctcgaaacatctgaagggttcgcagtgataaaggaggcatttgacagcactagcagatttgcacgtctacagaaacttcatacaagtatagctggacgcaacctttatatccgtttccagtccaggtcaggggatgccatggggatgaacatgatttcaaagggtacagagaaagcactttcaaaacttcacgagtatttccctgaaatgcagattctagccgttagtggtaactattgtactgacaagaaacctgctgctataaattggatagagggaagaggaaaatctgttgtttgtgaagctgtcattccagccaaggttgtcagagaagtattaaagactaccacagaggctatgattgaggtcaacattaacaagaatttagtgggctctgccatggctgggagcataggaggctacaacgcccatgcagcaaacattgtcaccgccatctacattgcctgtggacaggatgcagcacagaatgttggtagttcaaactgtattactttaatggaagcaagtggtcccacaaatgaagatttatatatcagctgcaccatgccatctatagagataggaacggtgggtggtgggaccaacctactacctcagcaagcctgtttgcagatgctaggtgttcaaggagcatgcaaagataatcctggggaaaatgcccggcagcttgcccgaattgtgtgtgggaccgtaatggctggggaattgtcacttatggcagcattggcagcaggacatcttgtcaaaagtcacatgattcacaacaggtcgaagatcaatttacaagacctccaaggagcttgcaccaagaagacagcctgaatagcccgacagttctgaactggaacatgggcattgggttctaaaggactaacataaaatctgtgaattaaaaaagctcaatgcattgtcttgtggaggatgaatagatgtgatcactgagacagccacttggtttttggctctttcagagaggtctcaggttctttccatgcagactcctcagatctgaacacagtttagtgctttacatgctgtgctctttgaagagatttcaacaagaatattgtatgttaaagcatcagagatggtaatctacagctcacctctgaaggcaaatataagctgggaaaaaagttttgatgaaattcttgaagttcatggtgatcagtgcaattgaccttctccctcactcctgccagttgaaaatggatttttaaattatactgtagctgatg

SEQ ID NO: 102664 - DNA, 527 bp, Homo sapiens
  Payload ID: 26
  Gene Symbol: HMGCR
  Gene Name: 3-hydroxy-3-methylglutaryl-CoA reductase
  ENST ID: ENST00000507942
  CDS Start-End: 195-527
agaacagttaatttctgcagtaggaggaggtcgatgtactccattcttaagtagtcgtttgaaatatttcaggatttgaggatattccttcttagacatggtcctgcagagtcgtaggaagcatttgtttctgggctatactaaatgtgcatgatttcggcgtcccacaaggatccaaggattctgtagctacaatgttgtcaagactttttcgaatgcatggcctctttgtggcctcccatccctgggaagtcatagtggggacagtgacactgaccatctgcatgatgtccatgaacatgtttactggtaacaataagatctgtggttggaattatgaatgtccaaagtttgaagaggatgttttgagcagtgacattataattctgacaataacacgatgcatagccatcctgtatatttacttccagttccagaatttacgtcaacttggatcaaaatatattttgggtattgctggccttttcacaattttctcaagttttgtattcagtacagttgtcatt

SEQ ID NO: 102665 - DNA, 3506 bp, Homo sapiens
  Payload ID: 27
  Gene Symbol: HMGCS1
  Gene Name: 3-hydroxy-3-methylglutaryl-CoA synthase 1 (soluble)
  Uniprot ID: Q01581
  ENST ID: ENST00000325110
  CDS Start-End: 208-1770
gtcccgcctcccagcgactctcggcggtgccggagtcgggtgggttggcggctataaagctggtggcgaaggggaggcgccgcggactgtcctttcgtggctcactccctttcctctgctgccgctcggtcacgcttgtgcccgaaggaggaaacagtgacagacctggagactgcagttctctatccttcacacagctctttcaccatgcctggatcacttcctttgaatgcagaagcttgctggccaaaagatgtgggaattgttgcccttgagatctattttccttctcaatatgttgatcaagcagagttggaaaaatatgatggtgtagatgctggaaagtataccattggcttgggccaggccaagatgggcttctgcacagatagagaagatattaactctctttgcatgactgtggttcagaatcttatggagagaaataacctttcctatgattgcattgggcggctggaagttggaacagagacaatcatcgacaaatcaaagtctgtgaagactaatttgatgcagctgtttgaagagtctgggaatacagatatagaaggaatcgacacaactaatgcatgctatggaggcacagctgctgtcttcaatgctgttaactggattgagtccagctcttgggatggacggtatgccctggtagttgcaggagatattgctgtatatgccacaggaaatgctagacctacaggtggagttggagcagtagctctgctaattgggccaaatgctcctttaatttttgaacgagggcttcgtgggacacatatgcaacatgcctatgatttttacaagcctgatatgctatctgaatatcctatagtagatggaaaactctccatacagtgctacctcagtgcattagaccgctgctattctgtctactgcaaaaagatccatgcccagtggcagaaagagggaaatgataaagattttaccttgaatgattttggcttcatgatctttcactcaccatattgtaaactggttcagaaatctctagctcggatgttgctgaatgacttccttaatgaccagaatagagataaaaatagtatctatagtggcctggaagcctttggggatgttaaattagaagacacctactttgatagagatgtggagaaggcatttatgaaggctagctctgaactcttcagtcagaaaacaaaggcatctttacttgtatcaaatcaaaatggaaatatgtacacatcttcagtatatggttcccttgcatctgttctagcacagtactcacctcagcaattagcagggaagagaattggagtgttttcttatggttctggtttggctgccactctgtactctcttaaagtcacacaagatgctacaccggggtctgctcttgataaaataacagcaagtttatgtgatcttaaatcaaggcttgattcaagaactggtgtggcaccagatgtcttcgctgaaaacatgaagctcagagaggacacccatcatttggtcaactatattccccagggttcaatagattcactctttgaaggaacgtggtacttagttagggtggatgaaaagcacagaagaacttacgctcggcgtcccactccaaatgatgacactttggatgaaggagtaggacttgtgcattcaaacatagcaactgagcatattccaagccctgccaagaaagtaccaagactccctgccacagcagcagaacctgaagcagctgtcattagtaatggggaacattaagatactctgtgaggtgcaagacttcagggtggggtgggcatggggtgggggtatgggaacagttggaggaatgggatatctggggataattttaaaggattacatgttatgtaaatttttatgtgactgacatggagcctggatgactatcgtgtacttgggaaagtctctttgctctatttgctgacatgcttcctgttgtggtctggccaatgccaaatgtactcgaatgatgttaagggctctgtaaaacttcatacctctttggccatttgtatgcatgatgtttggtttttaaacatggtataatgaattgtgtacttctgtcagaagaaagcagaggtactaatctccaattaaaaaattttttaacatgtaagaattttgtactttgaacaacaagattacagaaagtacctgtggtttttggaaaacatttctagcttggggaatgtgacaacattccccagtgtggtaaaattggggtaaaatgtggtaaaatgtgatacgcacaaaccctttgaaaatagcaaaacaaacatgccctttttctaaaattgataaatcctaaagaggaagaaaagagctgggacaataaaacactggctctggaatctggaatgttaagtccaggccagcagtgacaaaagttattgtaatgacctctgaacagagaaacactgccattgaagaggcttctggtatagaaaacatggtacattcaggagctgtgaatatagctctaggtgtgctcctgaatcagttcatggtagattatgctgaacaacagtgagatgttattggaggtgtggatgagggagtttgttgttgcagtccttctttgcaccttattttaaagaataaatgaaacatttttctggttacttttttaaaaatttaaaatggaagggaagaataggggcagggcattattaggctatttctgatgcttcagtgttataaattcaacatagaggctgacaacctaaattcatggtgtaacacagctcttttccttttccttttttttttttttttggtatctgttcaatgaaaataaggtatgacccaagtttttacctagtctgactagaagtattccacttcaaggtctgaagtaggacttttaccttaaaaaacaacaacaaacaaaactatcacacaggatagataagaagattggttaaacagttttgtgtagatctttttggtgctgaactatgacatgagccttatagattgtaaaatagggatagttggaactaatgtacagaactaaattttttaaactttatttgctgttaaattctgtgaagtttcagttatctaaaataaatatacacaaatatgaaatataatgtttcagattgcaaggtaatatgtaatagtagtgtttgtaagatactcttgtctaatattaactagtagtattttgatttgtacagtcataatttgttaaaatgacttcatttaacattcactgatgtagattaataatgtaagttctgatttaaagaatggtggcaaaatggtgcatgtaatacttttgcaagtgttggggagatcggtatgttttgaaaagagtaatttaacttttgggtgccaggaaatgggttttctcaaagtccattgccggcaatgggcaggcctgcaaatactggcacagagcattaatcatacaccttattaacggtgaggtgaataactttgaaataaagttttagagaaatgtttca

SEQ ID NO: 102666 - DNA, 3466 bp, Homo sapiens
  Payload ID: 27
  Gene Symbol: HMGCS1
  Gene Name: 3-hydroxy-3-methylglutaryl-CoA synthase 1 (soluble)
  Uniprot ID: Q01581
  ENST ID: ENST00000433297
  CDS Start-End: 168-1730
attggctgtgggagccaccgtcccgcctcccagcgactctcggcggtgccggagtcgggtgggttggcggctataaagctggtggcgaaggggaggcgccgcggactgtcctttcgtggctcactccctttcctctgctgccgctcggtcacgcttgctctttcaccatgcctggatcacttcctttgaatgcagaagcttgctggccaaaagatgtgggaattgttgcccttgagatctattttccttctcaatatgttgatcaagcagagttggaaaaatatgatggtgtagatgctggaaagtataccattggcttgggccaggccaagatgggcttctgcacagatagagaagatattaactctctttgcatgactgtggttcagaatcttatggagagaaataacctttcctatgattgcattgggcggctggaagttggaacagagacaatcatcgacaaatcaaagtctgtgaagactaatttgatgcagctgtttgaagagtctgggaatacagatatagaaggaatcgacacaactaatgcatgctatggaggcacagctgctgtcttcaatgctgttaactggattgagtccagctcttgggatggacggtatgccctggtagttgcaggagatattgctgtatatgccacaggaaatgctagacctacaggtggagttggagcagtagctctgctaattgggccaaatgctcctttaatttttgaacgagggcttcgtgggacacatatgcaacatgcctatgatttttacaagcctgatatgctatctgaatatcctatagtagatggaaaactctccatacagtgctacctcagtgcattagaccgctgctattctgtctactgcaaaaagatccatgcccagtggcagaaagagggaaatgataaagattttaccttgaatgattttggcttcatgatctttcactcaccatattgtaaactggttcagaaatctctagctcggatgttgctgaatgacttccttaatgaccagaatagagataaaaatagtatctatagtggcctggaagcctttggggatgttaaattagaagacacctactttgatagagatgtggagaaggcatttatgaaggctagctctgaactcttcagtcagaaaacaaaggcatctttacttgtatcaaatcaaaatggaaatatgtacacatcttcagtatatggttcccttgcatctgttctagcacagtactcacctcagcaattagcagggaagagaattggagtgttttcttatggttctggtttggctgccactctgtactctcttaaagtcacacaagatgctacaccggggtctgctcttgataaaataacagcaagtttatgtgatcttaaatcaaggcttgattcaagaactggtgtggcaccagatgtcttcgctgaaaacatgaagctcagagaggacacccatcatttggtcaactatattccccagggttcaatagattcactctttgaaggaacgtggtacttagttagggtggatgaaaagcacagaagaacttacgctcggcgtcccactccaaatgatgacactttggatgaaggagtaggacttgtgcattcaaacatagcaactgagcatattccaagccctgccaagaaagtaccaagactccctgccacagcagcagaacctgaagcagctgtcattagtaatggggaacattaagatactctgtgaggtgcaagacttcagggtggggtgggcatggggtgggggtatgggaacagttggaggaatgggatatctggggataattttaaaggattacatgttatgtaaatttttatgtgactgacatggagcctggatgactatcgtgtacttgggaaagtctctttgctctatttgctgacatgcttcctgttgtggtctggccaatgccaaatgtactcgaatgatgttaagggctctgtaaaacttcatacctctttggccatttgtatgcatgatgtttggtttttaaacatggtataatgaattgtgtacttctgtcagaagaaagcagaggtactaatctccaattaaaaaattttttaacatgtaagaattttgtactttgaacaacaagattacagaaagtacctgtggtttttggaaaacatttctagcttggggaatgtgacaacattccccagtgtggtaaaattggggtaaaatgtggtaaaatgtgatacgcacaaaccctttgaaaatagcaaaacaaacatgccctttttctaaaattgataaatcctaaagaggaagaaaagagctgggacaataaaacactggctctggaatctggaatgttaagtccaggccagcagtgacaaaagttattgtaatgacctctgaacagagaaacactgccattgaagaggcttctggtatagaaaacatggtacattcaggagctgtgaatatagctctaggtgtgctcctgaatcagttcatggtagattatgctgaacaacagtgagatgttattggaggtgtggatgagggagtttgttgttgcagtccttctttgcaccttattttaaagaataaatgaaacatttttctggttacttttttaaaaatttaaaatggaagggaagaataggggcagggcattattaggctatttctgatgcttcagtgttataaattcaacatagaggctgacaacctaaattcatggtgtaacacagctcttttccttttccttttttttttttttttggtatctgttcaatgaaaataaggtatgacccaagtttttacctagtctgactagaagtattccacttcaaggtctgaagtaggacttttaccttaaaaaacaacaacaaacaaaactatcacacaggatagataagaagattggttaaacagttttgtgtagatctttttggtgctgaactatgacatgagccttatagattgtaaaatagggatagttggaactaatgtacagaactaaattttttaaactttatttgctgttaaattctgtgaagtttcagttatctaaaataaatatacacaaatatgaaatataatgtttcagattgcaaggtaatatgtaatagtagtgtttgtaagatactcttgtctaatattaactagtagtattttgatttgtacagtcataatttgttaaaatgacttcatttaacattcactgatgtagattaataatgtaagttctgatttaaagaatggtggcaaaatggtgcatgtaatacttttgcaagtgttggggagatcggtatgttttgaaaagagtaatttaacttttgggtgccaggaaatgggttttctcaaagtccattgccggcaatgggcaggcctgcaaatactggcacagagcattaatcatacaccttattaacggtgaggtgaataactttgaaataaagttttagagaaatgtttca

SEQ ID NO: 102667 - DNA, 500 bp, Homo sapiens
  Payload ID: 27
  Gene Symbol: HMGCS1
  Gene Name: 3-hydroxy-3-methylglutaryl-CoA synthase 1 (soluble)
  ENST ID: ENST00000511774
  CDS Start-End: 214-500
tttgcccgggaggatggggcaccgtgagcggggccgggcgggggttccctcgtgagggacctgaggccgaccgtagcggatctgagaagatccgagaacacaggcgagtcgcggaggggagaacgcgagagggcgttgaggtctaggtattctaacgacagaggagttggaggtgccagagaggcagctgtgaccgcctagagctctttcaccatgcctggatcacttcctttgaatgcagaagcttgctggccaaaagatgtgggaattgttgcccttgagatctattttccttctcaatatgttgatcaagcagagttggaaaaatatgatggtgtagatgctggaaagtataccattggcttgggccaggccaagatgggcttctgcacagatagagaagatattaactctctttgcatgactgtggttcagaatcttatggagagaaataacctttcctatgattgcattgggcggctggaagttggaacagagac

SEQ ID NO: 102668 - DNA, 2428 bp, Homo sapiens
  Payload ID: 28
  Gene Symbol: HMGCS2
  Gene Name: 3-hydroxy-3-methylglutaryl-CoA synthase 2 (mitochondrial)
  Uniprot ID: P54868
  ENST ID: ENST00000369406
  CDS Start-End: 51-1577
ggtttctgctgggtttctgaactgctgggtttctgcttgctcctctggagatgcagcgtctgttgactccagtgaagcgcattctgcaactgacaagagcggtgcaggaaacctccctcacacctgctcgcctgctcccagtagcccaccaaaggttttctacagcctctgctgtccccctggccaaaacagatacttggccaaaggacgtgggcatcctggccctggaggtctacttcccagcccaatatgtggaccaaactgacctggagaagtataacaatgtggaagcaggaaagtatacagtgggcttgggccagacccgtatgggcttctgctcagtccaagaggacatcaactccctgtgcctgacggtggtgcaacggctgatggagcgcatacagctcccatgggactctgtgggcaggctggaagtaggcactgagaccatcattgacaagtccaaagctgtcaaaacagtgctcatggaactcttccaggattcaggcaatactgatattgagggcatagataccaccaatgcctgctacggtggtactgcctccctcttcaatgctgccaactggatggagtccagttcctgggatggtcgttatgccatggtggtctgtggagacattgccgtctatcccagtggtaatgctcgtcccacaggtggggccggagctgtggctatgctgattgggcccaaggcccctctggccctggagcgagggctgaggggaacccatatggagaatgtgtatgacttctacaaaccaaatttggcctcggagtacccaatagtggatgggaagctttccatccagtgctacttgcgggccttggatcgatgttacacatcataccgtaaaaaaatccagaatcagtggaagcaagctggcagcgatcgacccttcacccttgacgatttacagtacatgatctttcatacacccttttgcaagatggtccagaagtctctggctcgcctgatgttcaatgacttcctgtcagccagcagtgacacacaaaccagcttatataaggggctggaggctttcggggggctaaagctggaagacacctacaccaacaaggacctggataaagcacttctaaaggcctctcaggacatgttcgacaagaaaaccaaggcttccctttacctctccactcacaatgggaacatgtacacctcatccctgtacgggtgcctggcctcgcttctgtcccaccactctgcccaagaactggctggctccaggattggtgccttctcttatggctctggtttagcagcaagtttcttttcatttcgagtatcccaggatgctgctccaggctctcccctggacaagttggtgtccagcacatcagacctgccaaaacgcctagcctcccgaaagtgtgtgtctcctgaggagttcacagaaataatgaaccaaagagagcaattctaccataaggtgaatttctccccacctggtgacacaaacagccttttcccaggtacttggtacctggagcgagtggacgagcagcatcgccgaaagtatgcccggcgtcccgtctaaaggtgttctgcagatccatggaaagcttcctgggaaacgtatgctagcagagcttctccccgtgaatcatatttttaagatcccactcttagctggtaaatgaatttgaatcgacatagtagccccataagcatcagccctgtagagtgaggagccatctctagcgggcccttcattcctctccatgctgcaatcactgtcctgggcttatggtgctatggactaggggtcctttgtgaaagagcaagatggagcaatggagagaagacctcttcctgaatcactggactccagaaatgtgcatgcagatcagctgttgccttcaagatccagataaactttcctgtcatgtgttagaactttattattattaatattgttaaacttctgtgctgttcctgtgaatctccaaattttgtaccttgttctaagctaatatatagcaattaaaaagagagaaagaggaaatgattcctgcgtttcttggaacccagaatacaaacccagcctaacatgcagcaagcctgctagaccttgtgggtcagagggctgggtccttgcctcacaggctgcctctgtccccttgcaattccattctatttctgccacatgccaagtgctatgacaggtacaaggcaaataagaacggtagaacacagcttcccccagcccacttccctgttctaaagacaccacatagacagagagcagcagacaggggccagcaggagctgtagttcagatcttcttggtcattccttgccgctgttatttgaacaaataaacacagcgcaaaggttaacaagtttttgccttctatagccaaaaataaaaaaataaataaattttga

SEQ ID NO: 102669 - DNA, 1925 bp, Homo sapiens
  Payload ID: 28
  Gene Symbol: HMGCS2
  Gene Name: 3-hydroxy-3-methylglutaryl-CoA synthase 2 (mitochondrial)
  Uniprot ID: P54868
  ENST ID: ENST00000544913
  CDS Start-End: 62-1462
atctctttcaaggtttctgctgggtttctgaactgctgggtttctgcttgctcctctggagatgcagcgtctgttgactccagtgaagcgcattctgcaactgacaagagcggtgcaggaaacctccctcacacctgctcgcctgctcccagtagcccaccaaaggttttctacagcctctgctgtccccctggccaaaacagatacttggccaaaggacgtgggcatcctggccctggaggtctacttcccagcccaatatgtggaccaaactgacctggagaagtataacaatgtggaagcaggaaagtatacagtgggcttgggccagacccgtatgggcttctgctcagtccaagaggacatcaactccctgtgcctgacggtggtgcaacggctgatggagcgcatacagctcccatgggactctgtgggcaggctggaagtaggcactgagaccatcattgacaagtccaaagctgtcaaaacagtgctcatggaactcttccaggattcaggcaatactgatattgagggcatagataccaccaatgcctgctacggtggtactgcctccctcttcaatgctgccaactggatggagtccagttcctgggatgggctgaggggaacccatatggagaatgtgtatgacttctacaaaccaaatttggcctcggagtacccaatagtggatgggaagctttccatccagtgctacttgcgggccttggatcgatgttacacatcataccgtaaaaaaatccagaatcagtggaagcaagctggcagcgatcgacccttcacccttgacgatttacagtacatgatctttcatacacccttttgcaagatggtccagaagtctctggctcgcctgatgttcaatgacttcctgtcagccagcagtgacacacaaaccagcttatataaggggctggaggctttcggggggctaaagctggaagacacctacaccaacaaggacctggataaagcacttctaaaggcctctcaggacatgttcgacaagaaaaccaaggcttccctttacctctccactcacaatgggaacatgtacacctcatccctgtacgggtgcctggcctcgcttctgtcccaccactctgcccaagaactggctggctccaggattggtgccttctcttatggctctggtttagcagcaagtttcttttcatttcgagtatcccaggatgctgctccaggctctcccctggacaagttggtgtccagcacatcagacctgccaaaacgcctagcctcccgaaagtgtgtgtctcctgaggagttcacagaaataatgaaccaaagagagcaattctaccataaggtgaatttctccccacctggtgacacaaacagccttttcccaggtacttggtacctggagcgagtggacgagcagcatcgccgaaagtatgcccggcgtcccgtctaaaggtgttctgcagatccatggaaagcttcctgggaaacgtatgctagcagagcttctccccgtgaatcatatttttaagatcccactcttagctggtaaatgaatttgaatcgacatagtagccccataagcatcagccctgtagagtgaggagccatctctagcgggcccttcattcctctccatgctgcaatcactgtcctgggcttatggtgctatggactaggggtcctttgtgaaagagcaagatggagcaatggagagaagacctcttcctgaatcactggactccagaaatgtgcatgcagatcagctgttgccttcaagatccagataaactttcctgtcatgtgttagaactttattattattaatattgttaaacttctgtgctgttcctgtgaatctccaaattttgtaccttgttctaagctaatatatagcaattaaaaagagagaaaga

SEQ ID NO: 102670 - DNA, 773 bp, Homo sapiens
  Payload ID: 29
  Gene Symbol: HACD1
  Gene Name: 3-hydroxyacyl-CoA dehydratase 1
  ENST ID: ENST00000326961
  CDS Start-End: 29-505
gctgcgccgagccccctgcgcgctgcacatggggcgcctgacggaagcggcggcagcgggcagcggctctcgggctgcaggctgggcagggtcccctcccacgctcctgccgctgtctcccacgtcccccaggtgcgcggccaccatggcgtccagcgacgaggacggcaccaacggcggcgcctcggaggccggcgaggaccgggaggctcccggcgagcggaggcgcctgggggtcttggccaccgcctggctcaccttctacgacatcgccatgaccgcgggacggagactcattctgtcgcccaggctggagtgcattggcgcgatctccgctcactgccaacctcagcctccggagttcaagcgattctcctgcctcggcctccggagtagctgggactacaagcgtgggccaccacgccccattaatttttgtatttttggtagagacagggtatcaccatgttggccagggtggtctcgaactcctgacctcaaatgattcccccacttcggcctcccaatgtgctgggattacaggtgtgagccatcgcaccgggcctaatattttattttaattttttaaaaatagagatggcctctcactgtgttggctaggctggtctcaaactcccggcctcaagcaatcctcccacctcaacctccaaaagtgctgggattaccacttccggcttaatattttaaactttctccagggtttatagaaaaatgtgattgacaaaaatttaataaatctttacctatggtga

SEQ ID NO: 102671 - DNA, 2237 bp, Homo sapiens
  Payload ID: 29
  Gene Symbol: HACD1
  Gene Name: 3-hydroxyacyl-CoA dehydratase 1
  Uniprot ID: B0YJ81
  ENST ID: ENST00000361271
  CDS Start-End: 39-905
ggtagagctggctgcgccgagccccctgcgcgctgcacatggggcgcctgacggaagcggcggcagcgggcagcggctctcgggctgcaggctgggcagggtcccctcccacgctcctgccgctgtctcccacgtcccccaggtgcgcggccaccatggcgtccagcgacgaggacggcaccaacggcggcgcctcggaggccggcgaggaccgggaggctcccggcgagcggaggcgcctgggggtcttggccaccgcctggctcaccttctacgacatcgccatgaccgcggggtggttggttctagctattgccatggtacgtttttatatggaaaaaggaacacacagaggtttatataaaagtattcagaagacacttaaatttttccagacatttgccttgcttgagatagttcactgtttaattggaattgtacctacttctgtgattgtgactggggtccaagtgagttcaagaatctttatggtgtggctcattactcacagtataaaaccaatccagaatgaagagagtgtggtgctttttctggtcgcgtggactgtgacagagatcactcgctattccttctacacattcagccttcttgaccacttgccatacttcattaaatgggccagatataatttttttatcatcttatatcctgttggagttgctggtgaacttcttacaatatacgctgccttgccgcatgtgaagaaaacaggaatgttttcaataagacttcctaacaaatacaatgtctcttttgactactattattttcttcttataaccatggcatcatatatacctttgtttccacaactctattttcatatgttacgtcaaagaagaaaggtgcttcatggagaggtgattgtagaaaaggatgattaaatgatctctgcaaacaaggtgctttttccagaataaccaagattacctgagtccaagttttaataacaagaataaacaactttgtgaaatatcatggattgtatggtttcttaaaatataacttgagacacgtggtatttgccagtatttgtgttcctcttgtgccagatctattttttacaagaactgtgcaaatatcagtaacttttgggtaggtattgattattaggaaaataattaggtgtattatctgggggaaaaaaaaacttttgctaagttttttttgaaacatgctcaaagctttttaaatcaatatttagaaattagtttaacgatttactattatacctgctagtgatatttatgtgatatttataaatgaaaataaatgcaaaattataacaacttgttaataatgtattggtatttttgaacccacaatctattttttcaggaataaggcagcattatgactaataacagtgtttggaagcgtggatataatttgctaaagtaagacttttgatgtagataaagtagcagcataaaaacacacaaatattcaagtagatgtcacagttggaaaatattctttggaaatatttctaggcagctgaaattacttatactgctaaggaaatctgctttttatttaaattagccacttaaggacaaggttttcaactgtgaaggttttaaggggttaggaagagcataagtatttgccccactattaaaaaaaaaacatgacatctgactataatgttgtattcaggctgggagtggtagctcatgcctgtaatcccagcactttggaagactgaggcaggaggatcgtttgagcccagaagttcaaggccagtctgggcaacatagcaagaccccatccctaaaaaaattacaaacaaaaaaaattaaccaggcatggtgacacatgcctgtagttccagctgcttgggaggctgaggtgggaggatcacttgagcccaggaattcaaggttacaatgagctatgatggtaccactgtacttaagcctgggtgacagagcaagaccctgtctctgaaaaatagtgatgatgatgatgatgatgataacgatgatgaggaagatgatcatgctgtactcagaactttggttgagaaagtcttctctatactgtagaattatcttgtaacaattgttatgataatccctttgtggtacttaggtaactaaacattttggggtatgatctttggacagactcctttcattctgaattccattgaatagcaaaaggtcttgtaataaagttcctgtccttgtgtttaataaaaaaaatacaccaga

SEQ ID NO: 102672 - DNA, 717 bp, Homo sapiens
  Payload ID: 29
  Gene Symbol: HACD1
  Gene Name: 3-hydroxyacyl-CoA dehydratase 1
  ENST ID: ENST00000466335
  CDS Start-End: 1-523
gtgcgcggccaccatggcgtccagcgacgaggacggcaccaacggcggcgcctcggaggccggcgaggaccgggaggctcccggcgagcggaggcgcctgggggtcttggccaccgcctggctcaccttctacgacatcgccatgaccgcggggtggttggttctagctattgccatggtacgtttttatatggaaaaaggaacacacagaggtttatataaaagtattcagaagacacttaaatttttccagacatttgccttgcttgagatagttcactgtttaattggaattgtacctacttctgtgattgtgactggggtccaagtgagttcaagaatctttatggtgtggctcattactcacagtataaaaccaatccagaatgaagagagtgtggtgctttttctggtcgcgtggactgtgacagagatcactcgctattccttctacacattcagccttcttgaccacttgccatacttcattaaatgggccaggtggcgatatcttgcagtttagtttctccttgtcctgtgcatgcttattttgtgtgctaacgccagagaattaaaattcgtgtttcagccccacgatgccagaatgctgttataggaggtataactggtataactaataattatacaagttatgatttgtattctaaaagcttaatgatgagagaggaatcgtattaataaatattttgagtgaaa

SEQ ID NO: 102673 - DNA, 459 bp, Homo sapiens
  Payload ID: 29
  Gene Symbol: HACD1
  Gene Name: 3-hydroxyacyl-CoA dehydratase 1
  ENST ID: ENST00000498812
  CDS Start-End: 1-114
atagttcactgtttaattggaattgtacctacttctgtgattgtgactggggtccaagtgagttcaagaatctttatggtgtggctcattactcacagtataaaaccaatataatttttttatcatcttatatcctgttggagttgctggtgaacttcttacaatatacgctgccttgccgcatgtgaagaaaacaggaatgttttcaataagacttcctaacaaatacaatgtctcttttgactactattattttcttcttataaccatggcatcatatatacctttgtttccacaactctattttcatatgttacgtcaaagaagaaaggtgcttcatggagaggtgattgtagaaaaggatgattaaatgatctctgcaaacaaggtgctttttccagaataaccaagattacctgagtccaagttttaataacaagaataaacaactttgtgaaa

SEQ ID NO: 102674 - DNA, 4257 bp, Homo sapiens
  Payload ID: 30
  Gene Symbol: HACD2
  Gene Name: 3-hydroxyacyl-CoA dehydratase 2
  Uniprot ID: Q6Y1H2
  ENST ID: ENST00000383657
  CDS Start-End: 159-923
ctttgccctcagccaagatggcggctgccgtggaccctgtcccggctccgccccgcggccctggccccgcctgcccctcgtcccttcctccgccccctctcctcgcgtagtccggcccgagccgctcgcgctaggagagcgggcttcgggcacttgacatggcggcagtggcggcgactgcagcagcgaaggggaatgggggcggcggtggcagggccggggccggggacgccagcggcacgcggaagaagaagggcccggggcccctggccacggcgtacctggtcatctacaatgtggtgatgacagccgggtggctggttatagcggttggtctggtccgagcatacctggctaagggtagctaccatagcctttattattcaattgaaaagcctttgaaattctttcaaactggagccttattggagattttacattgtgctataggaattgttccatcttctgttgtcctgacttctttccaggtgatgtcaagagtttttctaatatgggcagtaacacatagcgtcaaagaggtacagagtgaagacagtgtcctcctgtttgttattgcatggacgatcacggaaatcatccgttactccttttatacattcagtctattaaaccatctgccttacctcatcaaatgggccaggtacacacttttcattgtgctgtacccaatgggagtgtcaggagaactgctcacaatatatgcagctctgccctttgtcagacaagctggcctatattccatcagtttacccaacaaatacaatttctcttttgactactatgcattcctgattctaataatgatctcctacattccaatttttccccagttatacttccacatgatacaccagagaagaaagatcctttctcatactgaagaacacaagaaatttgaatagttcctgctttctgcacctcccaccaaaacaaacttttcaatgatcaaaaaatgctgcagattttttgagttcccaatacgtttcatagaaaataagtaagaactatttttaaaatattcaaacaaaactaaaacaaaaatccagtgtcacatgggcctgagattttattttagaaaaaggttgttacataaaacaccctggccagttcatttcagcatgctctttcaaccagaagttcttaatatttatgatggcactagaaagggatttggcattttatgtccttctgtgtccttcatgtatctgatcaatgaagacctgtaacactaagtacttgagagttacagtctgaataatgaagtcgtaccagctgaatagcccagcttgcagtatagttatgtttcagtctgcagtgtgtttagcattcccttgtcaaagtgcttgactgcatgctggaaactttgtatttttgaagcggcaaactctgttctctggaatgctctgaagttatggctgggacctatcccctcacatctaatgaatgaattataaaatgtatatgtctatgaagcttcggggtagtgcctgtaatcagaaaacaacttagaacccttttgtttgtttccaattgagtcattactgcctgccactaagaaacgtgcttgaatctaataagtatgtgtgtaccgtaaagaatatatcttatctggagctcagcctcaatcatgtcttaacaaaatgacaggtctcagaaagggggagctcaatagctcaaaagtgacaagtccttttcacagcaccattctcagaacacctctgagtaacgtgtttgccagtagctattctcactgatgcactgatggccctgaagaagcggatccagtcacataggaaaggaggctgtgttagtgaaagcacatggaaggtgttgctttagaaaggtagtcaggaaaaacattcaggaatagatttatacaccattattgttttatttttaaattttcattcactcttctgtttggatacttttgctaattaacttcctatgttaatttccaccaagctataagtccatagtcagtaaaacattccccttgggctgtcatgagctaaaagcagtgtcatctccgcatgttggagcagccaagaaatagtttggtactaccgacattgtctaatccatgtcacatcctcatacaatttaattgctcaaccatgcatttaaaactcctcaagaaaggattggtactgcaactgtaggtaaactgaaaaaaaataagaaagaaagagttggatgaaaatgtgaaagcccaagtttagatgtgcattaagtattaaatagcacagtatcttcttcatggagccttttttcctcccccatcccctgcagctgcctttttttgggggcagggtgggggttgatgttgaactttaagagtttaaaagtttagcttattgagtagttgtcatttaaaatataattgcgaatatcagaaaactcatactggaaaactaaattttttttttctcttgagacggagtctcgctctgttgcccaggctggagtgcagtggcgcgatctcagctcactgcaagctccacctcccgggttcacgccatcctcctgcctcagcctcctgagtagctgggactacaggtgcctgccaccacacccagctaattttttttgtatttttagtagagacggggtttcaccgtgttagccaggatggtcttgatctcctgacctcgtgatccacccgcctcagcctcccaaagtgctgggattgcaggcatgagccactgcacccaacccctggaaaactaaatttttaagtgcttatttttatagaagtttgaaaatttaatgcaggcaggtgtgtaataaattatttttgaattgaacattaaaattctgcttcttaaagtcagcactcaacttggacatgttgaaattagaatctattcttgtatttgatagacaaaatatgtgggaaagattttttgcatgacttttctctcattttattcttccataatgtatttctactataaaatagaatcaacttgggttatatttgtcatttactttgttctgttagattttttcagttgtttttggaaaaattctagaaatcaggatgaaaaatgcagcttttccagggttgctggactgggggttttatttgggcctccttattataatttgtcactacttataaaaaacattctgttgcaaacagtggtgttgcattgaattgaactttggcaatgagaacacagcacacagctcccttttcaaaaagggtctcaaccccagtgtgtatttttgtacatcaacatttagaatacttatggcagataagtaaggcatgtcactgtgtccttcagtaacctctctcagtaactggtttctttatccctaacatgaattcatttctcctttgaagtcatttattattttataaattgagaacaaccacaccaccaaatgtcacaccttcttataaagtgtgaacaaggaaggtcatgtttttgtgggtattttgtcagacttagaggtttcatttcagggcatagtcaaaggcatcatcctcccaactacccacttgattatgtatttcagatccctccgtgggggccttcttctgacagagaattctttgaggtccgcagtagtgcttttgtcagcacagactgctaatctacatcttgctgcgttctgtttgctgaggttgggcttattcatttaacacataccaaccattatccagaggcaccatggagagttagtcatggaataaagcactgtccttgcagatgaaaaaagtctccagagcagacttctgacaggaaaggtttagatgctggagagttgaagaggtgtaagaagagatcgtgccctcatttttcacttatttttttggttattcatttataataaaaggttggcattgatatggtacaacctgcaaattacttgcagttctgagtttcagataaaacattataaaacattaaattcaatacatactgctcctttgaaatttgggtaaaaaattgtacaaccgtatatatagtcatttttgtattttttctatgttgtgaaaaccaaaattgtaattttataagtctttgattcactaaaattatataatttaaatgtattttttgtatatttagaaataaggagtccagagactacgcttaactttctatgcatgcatttgaaagctgtttttacctgataatgtagtaataagttgtattcataaaatactgatctgtgttgcatttcaaaataaactggtgtgtgctctgcctggatttgaaa

SEQ ID NO: 102675 - DNA, 529 bp, Homo sapiens
  Payload ID: 30
  Gene Symbol: HACD2
  Gene Name: 3-hydroxyacyl-CoA dehydratase 2
  ENST ID: ENST00000493515
  CDS Start-End: 1-184
gtacacacttttcattgtgctgtacccaatgggagtgtcaggagaactgctcacaatatatgcagctctgccctttgtcagacaagctggcctatattccatcagtttacccaacaaatacaatttctcttttgactactatgcattcctgattctaataatgatctcctacattccaagttaaatcagacagggttggacttctcctcattgcatggcatcatcggaatgaatcaccctaacaaagcgacatgcttgtgtccctctgtggaaaattgcatttcatgcattgtgagaaaaaaactacatccagatttcatgtgagtgtttatcttgcagaaattcttggatacagttctgcttcatgattcattttccactctttattcatgttgagtcctctctagtgctggaatcatagcgaccagaggccatctctcttcaaatgtaaaaagtggttgattttcaaacagatgataaatgtgaaatcatctaaactactaagtaataaaaattaactggtagttta

SEQ ID NO: 102676 - DNA, 590 bp, Homo sapiens
  Payload ID: 30
  Gene Symbol: HACD2
  Gene Name: 3-hydroxyacyl-CoA dehydratase 2
  ENST ID: ENST00000469317
  CDS Start-End: 295-590
gcggccggactacctgcggcgcggagcccgtcctgggcggccagattcggatgttgaacggcgccagcatggggagtggaggagctgtggctgcagagtgaccattcatttgggcggctgttttcaaaatctgggctgcgctttaatctgaaaggtggctggttatagcggttggtctggtccgagcatacctggctaagggtagctaccatagcctttattattcaattgaaaagcctttgaaattctttcaaactggagccttattggagattttacattgtgctataggtgatgtcaagagtttttctaatatgggcagtaacacatagcgtcaaagaggtacagagtgaagacagtgtcctcctgtttgttattgcatggacgatcacggaaatcatccgttactccttttatacattcagtctattaaaccatctgccttacctcatcaaatgggccaggtacacacttttcattgtgctgtacccaatgggagtgtcaggagaactgctcacaatatatgcagctctgccctttgtcagacaagctggcctatattccatcagtttacccaacaaatacaattt

SEQ ID NO: 102677 - DNA, 3228 bp, Homo sapiens
  Payload ID: 31
  Gene Symbol: HACD3
  Gene Name: 3-hydroxyacyl-CoA dehydratase 3
  Uniprot ID: Q9P035
  ENST ID: ENST00000261875
  CDS Start-End: 167-1255
actgcgcaggcgcggcccgcgagcgtggggtatctcgaggtgccgggttgcaggcgctcaggagcgctagggtttgaggcctgctttctgctcgcgccagcagagcactacctgaggcagcgaggcgcagcgagcctagcctccccgcgccctgggcagtgtggccatggagaatcaggtgttgacgccgcatgtctactgggctcagcgacaccgcgagctatatctgcgcgtggagctgagtgacgtacagaaccctgccatcagcatcactgaaaacgtgctgcatttcaaagctcaaggacatggtgccaaaggagacaatgtctatgaatttcacctggagttcttagaccttgtgaaaccagagcctgtttacaaactgacccagaggcaggtaaacattacagtacagaagaaagtgagtcagtggtgggagagactcacaaagcaggaaaagcgaccactgtttttggctcctgactttgatcgttggctggatgaatctgatgcggaaatggagctcagagctaaggaagaagagcgcctaaataaactccgactggaaagcgaaggctctcctgaaactcttacaaacttaaggaaaggatacctgtttatgtataatcttgtgcaattcttgggattctcctggatctttgtcaacctgactgtgcgattctgtatcttgggaaaagagtccttttatgacacattccatactgtggctgacatgatgtatttctgccagatgctggcagttgtggaaactatcaatgcagcaattggagtcactacgtcaccggtgctgccttctctgatccagcttcttggaagaaattttattttgtttatcatctttggcaccatggaagaaatgcagaacaaagctgtggttttctttgtgttttatttgtggagtgcaattgaaattttcaggtactctttctacatgctgacgtgcattgacatggattggaaggtgctcacatggcttcgttacactctgtggattcccttatatccactgggatgtttggcggaagctgtctcagtgattcagtccattccaatattcaatgagaccggacgattcagtttcacattgccatatccagtgaaaatcaaagttagattttccttttttcttcagatttatcttataatgatatttttaggtttatacataaattttcgtcacctttataaacagcgcagacggcgctatggacaaaaaaagaaaaagatccactaaaaagaaagatttagatggcttcttgccagtttgagcctaatctgattcttacagttttaccttcttgaaccaatgtaaaagtttttttaatgttaaatgattaaattctcagtgaggctatcttccttttccccagtaacattcctgaatttactgttatcttattgtagtacttgcatgacatggattcctgatatctgatgagaggttcattcttgtgtattcagttaatgacaccaaaaggctcagcccaccccaaccctatctcatgttcagtctgtctaatacatgccagagatttttttttcaaaaagtgctttatccctacaatgtactgacagttcttacagttgagatttgttcttttcagctattgcttgtgaaaaaaagcaagactatgtcactctatagaaggctgttaaagtgactcaggcaggaattaattattctgtacctaaggggttacttgtttaatgggatggcattgactttttgaaaatcaagtggactgagtcattgataaaacatttctaagagtggggctagagaacatactttacatctgacatcctttggcctaacaacatctattattatagtgctcagcagtgtgggcattgaagaggcgcagaatgctttgaaagaaactaatcagaatcttggaacatcatgatcatgccattcttaagtaaatcaactattttcaacactgaagaaaaatgaaacattatttagaaaacaatgagattacaagttccaaactcagccaggaatgtggctcacacctgtaatcccagcactttgggacacctaggtgggagcatcgcttgaagccaggagttcaagaccagcttgggcaacgtagtgagacccctatctctacaaaaaataaaaaaattagctgggtgtgatggcacacacctgttgtcccagctactcaagaagctgagatgggaggatcctgagctcaggaggtcaaggctgcagtgagccgagattgtgccactgcactgcagctggggtgacagtgcaagaccctgtctcaaaccaaaccaaaccacacacacacaaacacacatacacacacacacacacgaggtccaaatggtagcagggatccaaagggaacacagtatgtaggtcaaactggcagtaacagtgtacagcctttgacaaactagaaatattagagtaggccaaacacacctccaaactgtaaggctgtgcacaaacataaaaaatggcagccttccatctcctgcactggctgagtccatttacttgtgtacttgttctagtgagtggtgggactgtacatttttgaatagacctcaaaaatacttcattctgctgctgttcagttggctttttaaacctgtctgcagtaggacactgaaaacagcaagaacttcggggtgaacacccgctgatcctttaacaaggatttctggcaggaaactcacaaaaaggagaactgaaaatttagacatacagttggccattgtaaaaaacatcagtttcctctcatacattccaagtaaaccaagtaaaataagtgttggagtaacacttgcataaaagaatttaaggagtgatagctctttctgttctgccattcccaacattcctgggggaaaggagactcaatgagttaatactatttcactgagcccaagatggaaacttggtttgacctaaaacatctgattaatataggctagctgatttcttaaaaattcgttgcattgaaggatattttgcatgtctgtaacacctgtcaatacttgtttgtattgatttctgatattcttgcagctgactacgtgtaattgggcagatcagctttgcagtagattatgctgcatcctcgtggcaaaattctgtattcttagtgattgttacaaacccctttattgctgtctgagaaagtgaaagattgtgtatttctattaaaacatttacaatcaaaattc

SEQ ID NO: 102678 - DNA, 1332 bp, Homo sapiens
  Payload ID: 31
  Gene Symbol: HACD3
  Gene Name: 3-hydroxyacyl-CoA dehydratase 3
  Uniprot ID: Q9P035
  ENST ID: ENST00000442729
  CDS Start-End: 151-1074
ccgcgagcgtggggtatctcgaggtgccgggttgcaggcgctcaggagcgctagggtttgaggcctgctttctgctcgcgccagcagagcactacctgaggcagcgaggcgcagcgagcctagcctccccgcgccctgggcagtgtggccatggagaatcaggtgttgacgccgcatgtctactgggctcagcgacaccgcgagctatatctgcgcgtggagctgagtgacgtacagaaccctgccatcagcatcactgaaaacgtgctgcatttcaaagctcaaggacatggtgccaaaggagacaatgtctatgaatttcacctggagttcttagaccttgtgaaaccagaggaagaagagcgcctaaataaactccgactggaaagcgaaggctctcctgaaactcttacaaacttaaggaaaggatacctgtttatgtataatcttgtgcaattcttgggattctcctggatctttgtcaacctgactgtgcgattctgtatcttgggaaaagagtccttttatgacacattccatactgtggctgacatgatgtatttctgccagatgctggcagttgtggaaactatcaatgcagcaattggagtcactacgtcaccggtgctgccttctctgatccagcttcttggaagaaattttattttgtttatcatctttggcaccatggaagaaatgcagaacaaagctgtggttttctttgtgttttatttgtggagtgcaattgaaattttcaggtactctttctacatgctgacgtgcattgacatggattggaaggtgctcacatggcttcgttacactctgtggattcccttatatccactgggatgtttggcggaagctgtctcagtgattcagtccattccaatattcaatgagaccggacgattcagtttcacattgccatatccagtgaaaatcaaagttagattttccttttttcttcagatttatcttataatgatatttttaggtttatacataaattttcgtcacctttataaacagcgcagacggcgctatggacaaaaaaagaaaaagatccactaaaaagaaagatttagatggcttcttgccagtttgagcctaatctgattcttacagttttaccttcttgaaccaatgtaaaagtttttttaatgttaaatgattaaattctcagtgaggctatcttccttttccccagtaacattcctgaatttactgttatcttattgtagtacttgcatgacatggattcctgatatctgatgagaggttcattcttgtgtattcagttaatgacaccaaaaggctcagcccacccca

SEQ ID NO: 102679 - DNA, 789 bp, Homo sapiens
  Payload ID: 31
  Gene Symbol: HACD3
  Gene Name: 3-hydroxyacyl-CoA dehydratase 3
  ENST ID: ENST00000562832
  CDS Start-End: 372-789
tctggagcctctaagttagagacacaggcacagcgtgtttcattttcattcaccacctgcaatcctctgcccttccctctacctgttggaattaatttatcattcagaaccctgccatcagcatcactgaaaacgtgctgcatttcaaagctcaaggacatggtgccaaaggagacaatgtctatgaatttcacctggagttcttagaccttgtgaaaccagagcctgtttacaaactgacccagaggcaggtaaacattacagtacagaagaaagtgagtcagtggtgggagagactcacaaagcaggaaaagcgaccactgtttttggctcctgactttgatcgttggctggatgaatctgatgcggaaatggagctcagagctaaggaagaagagcgcctaaataaactccgactggaaagcgaaggctctcctgaaactcttacaaacttaaggaaaggatacctgtttatgtataatcttgtgcaattcttgggattctcctggatctttgtcaacctgactgtgcgattctgtatcttgggaaaagagtccttttatgacacattccatactgtggctgacatgatgtatttctgccagatgctggcagttgtggaaactatcaatgcagcaattggagtcactacgtcaccggtgctgccttctctgatccagcttcttggaagaaattttattttgtttatcatctttggcaccatggaagaaatgcagaacaaagctgtggttttctttgtgttttatttgtggagtgcaattgaaattt

SEQ ID NO: 102680 - DNA, 1471 bp, Homo sapiens
  Payload ID: 31
  Gene Symbol: HACD3
  Gene Name: 3-hydroxyacyl-CoA dehydratase 3
  ENST ID: ENST00000569894
  CDS Start-End: 387-1124
acactgggaaggagctgcctcttgcttgttaaccttgagctggaagtaggagttgggttgtttctcatccactggaaaaagtgttaagtagtttcactttacattatgatgctaaattgaagaaccctgccatcagcatcactgaaaacgtgctgcatttcaaagctcaaggacatggtgccaaaggagacaatgtctatgaatttcacctggagttcttagaccttgtgaaaccagagcctgtttacaaactgacccagaggcaggtaaacattacagtacagaagaaagtgagtcagtggtgggagagactcacaaagcaggaaaagcgaccactgtttttggctcctgactttgatcgttggctggatgaatctgatgcggaaatggagctcagagctaaggaagaagagcgcctaaataaactccgactggaaagcgaaggctctcctgaaactcttacaaacttaaggaaaggatacctgtttatgtataatcttgtgcaattcttgggattctcctggatctttgtcaacctgactgtgcgattctgtatcttgggaaaagagtccttttatgacacattccatactgtggctgacatgatgtatttctgccagatgctggcagttgtggaaactatcaatgcagcaattggagtcactacgtcaccggtgctgccttctctgatccagcttcttggaagaaattttattttgtttatcatctttggcaccatggaagaaatgcagaacaaagctgtggttttctttgtgttttatttgtggagtgcaattgaaattttcaggtactctttctacatgctgacgtgcattgacatggattggaaggtgctcacatggcttcgttacactctgtggattcccttatatccactgggatgtttggcggaagctgtctcagtgattcagtccattccaatattcaatgagaccggacgattcagtttcacattgccatatccagtgaaaatcaaagttagattttccttttttcttcagatttatcttataatgatatttttaggtttatacataaattttcgtcacctttataaacagcgcagacggcgctatggacaaaaaaagaaaaagatccactaaaaagaaagatttagatggcttcttgccagtttgagcctaatctgattcttacagttttaccttcttgaaccaatgtaaaagtttttttaatgttaaatgattaaattctcagtgaggctatcttccttttccccagtaacattcctgaatttactgttatcttattgtagtacttgcatgacatggattcctgatatctgatgagaggttcattcttgtgtattcagttaatgacaccaaaaggctcagcccaccccaaccctatctcatgttcagtctgtctaatacatgccagagatttttttttcaaaaagtgctttatccctacaatgtactgacagttctta

SEQ ID NO: 102681 - DNA, 1824 bp, Homo sapiens
  Payload ID: 31
  Gene Symbol: HACD3
  Gene Name: 3-hydroxyacyl-CoA dehydratase 3
  ENST ID: ENST00000568793
  CDS Start-End: 128-1141
gtgccgggttgcaggcgctcaggagcgctagggtttgaggcctgctttctgctcgcgccagcagagcactacctgaggcagcgaggcgcagcgagcctagcctccccgcgccctgggcagtgtggccatggagaatcagaaccctgccatcagcatcactgaaaacgtgctgcatttcaaagctcaaggacatggtgccaaaggagacaatgtctatgaatttcacctggagttcttagaccttgtgaaaccagagcctgtttacaaactgacccagaggcaggtaaacattacagtacagaagaaagtgagtcagtggtgggagagactcacaaagcaggaaaagcgaccactgtttttggctcctgactttgatcgttggctggatgaatctgatgcggaaatggagctcagagctaaggaagaagagcgcctaaataaactccgactggaaagcgaaggctctcctgaaactcttacaaacttaaggaaaggatacctgtttatgtataatcttgtgcaattcttgggattctcctggatctttgtcaacctgactgtgcgattctgtatcttgggaaaagagtccttttatgacacattccatactgtggctgacatgatgtatttctgccagatgctggcagttgtggaaactatcaatgcagcaattggagtcactacgtcaccggtgctgccttctctgatccagcttcttggaagaaattttattttgtttatcatctttggcaccatggaagaaatgcagaacaaagctgtggttttctttgtgttttatttgtggagtgcaattgaaattttcaggtactctttctacatgctgacgtgcattgacatggattggaaggtgctcacatggcttcgttacactctgtggattcccttatatccactgggatgtttggcggaagctgtctcagtgattcagtccattccaatattcaatgagaccggacgattcagtttcacattgccatatccagtgaaaatcaaagttagattttccttttttcttcagatttatcttataatgatatttttaggtttatacataaattttcgtcacctttataaacagcgcagacggcgctatggacaaaaaaagaaaaagatccactaaaaagaaagatttagatggcttcttgccagtttgagcctaatctgattcttacagttttaccttcttgaaccaatgtaaaagtttttttaatgttaaatgattaaattctcagtgaggctatcttccttttccccagtaacattcctgaatttactgttatcttattgtagtacttgcatgacatggattcctgatatctgatgagaggttcattcttgtgtattcagttaatgacaccaaaaggctcagcccaccccaaccctatctcatgttcagtctgtctaatacatgccagagatttttttttcaaaaagtgctttatccctacaatgtactgacagttcttacagttgagatttgttcttttcagctattgcttgtgaaaaaaagcaagactatgtcactctatagaaggctgttaaagtgactcaggcaggaattaattattctgtacctaaggggttacttgtttaatgggatggcattgactttttgaaaatcaagtggactgagtcattgataaaacatttctaagagtggggctagagaacatactttacatctgacatcctttggcctaacaacatctattattatagtgctcagcagtgtgggcattgaagaggcgcagaatgctttgaaagaaactaatcagaatcttggaacatcatgatcatgccatt

SEQ ID NO: 102682 - DNA, 1782 bp, Homo sapiens
  Payload ID: 31
  Gene Symbol: HACD3
  Gene Name: 3-hydroxyacyl-CoA dehydratase 3
  ENST ID: ENST00000566511
  CDS Start-End: 447-1184
ggaaatcattctcattacttttaattttaaaattcacaagagctggaggaagtgatttccccctctgttctgaaggttgtgagctcaggtttgctgagttgcacagagaacttaaaaagttcttaagttacattaagcatttctgtttgagctccttggcccttaatgtaagcaagctgaagaaccctgccatcagcatcactgaaaacgtgctgcatttcaaagctcaaggacatggtgccaaaggagacaatgtctatgaatttcacctggagttcttagaccttgtgaaaccagagcctgtttacaaactgacccagaggcaggtaaacattacagtacagaagaaagtgagtcagtggtgggagagactcacaaagcaggaaaagcgaccactgtttttggctcctgactttgatcgttggctggatgaatctgatgcggaaatggagctcagagctaaggaagaagagcgcctaaataaactccgactggaaagcgaaggctctcctgaaactcttacaaacttaaggaaaggatacctgtttatgtataatcttgtgcaattcttgggattctcctggatctttgtcaacctgactgtgcgattctgtatcttgggaaaagagtccttttatgacacattccatactgtggctgacatgatgtatttctgccagatgctggcagttgtggaaactatcaatgcagcaattggagtcactacgtcaccggtgctgccttctctgatccagcttcttggaagaaattttattttgtttatcatctttggcaccatggaagaaatgcagaacaaagctgtggttttctttgtgttttatttgtggagtgcaattgaaattttcaggtactctttctacatgctgacgtgcattgacatggattggaaggtgctcacatggcttcgttacactctgtggattcccttatatccactgggatgtttggcggaagctgtctcagtgattcagtccattccaatattcaatgagaccggacgattcagtttcacattgccatatccagtgaaaatcaaagttagattttccttttttcttcagatttatcttataatgatatttttaggtttatacataaattttcgtcacctttataaacagcgcagacggcgctatggacaaaaaaagaaaaagatccactaaaaagaaagatttagatggcttcttgccagtttgagcctaatctgattcttacagttttaccttcttgaaccaatgtaaaagtttttttaatgttaaatgattaaattctcagtgaggctatcttccttttccccagtaacattcctgaatttactgttatcttattgtagtacttgcatgacatggattcctgatatctgatgagaggttcattcttgtgtattcagttaatgacaccaaaaggctcagcccaccccaaccctatctcatgttcagtctgtctaatacatgccagagatttttttttcaaaaagtgctttatccctacaatgtactgacagttcttacagttgagatttgttcttttcagctattgcttgtgaaaaaaagcaagactatgtcactctatagaaggctgttaaagtgactcaggcaggaattaattattctgtacctaaggggttacttgtttaatgggatggcattgactttttgaaaatcaagtggactgagtcattgataaaacatttctaagagtggggctagagaacatactttacatctgacatcctttggcctaacaacatctattattata

SEQ ID NO: 102683 - DNA, 1797 bp, Homo sapiens
  Payload ID: 31
  Gene Symbol: HACD3
  Gene Name: 3-hydroxyacyl-CoA dehydratase 3
  ENST ID: ENST00000562901
  CDS Start-End: 766-1503
ggctcgcgccaaggcccgctgctggcgccgccgccatcccggcgcgtcactgcgcaggcgcggcccgcgagcgtggggtatctcgaggtgccgggttgcaggcgctcaggagcgctagggtttgaggcctgctttctgctcgcgccagcagagcactacctgaggcagcgaggcgcagcgagcctagcctccccgcgccctgggcagtgtggccatggagaatcaggtgttgacgccgcatgtctactgggctcagcgacaccgcgagctatatctgcgcgtggagctgagtgacgtacagggctagtgactatgagagaacacggctgatgtgaggagaaatggtggacaataaagacttcagcagtggcatcgtctgtgcttgagggtctcactctgttgcccaggttggagtgcagcagtgtgatcatagctcaccgtagccttgaactcctgggtttgagcagtcctcctggctcagcctaccaagtaggactacagaaccctgccatcagcatcactgaaaacgtgctgcatttcaaagctcaaggacatggtgccaaaggagacaatgtctatgaatttcacctggagttcttagaccttgtgaaaccagagcctgtttacaaactgacccagaggcaggtaaacattacagtacagaagaaagtgagtcagtggtgggagagactcacaaagcaggaaaagcgaccactgtttttggctcctgactttgatcgttggctggatgaatctgatgcggaaatggagctcagagctaaggaagaagagcgcctaaataaactccgactggaaagcgaaggctctcctgaaactcttacaaacttaaggaaaggatacctgtttatgtataatcttgtgcaattcttgggattctcctggatctttgtcaacctgactgtgcgattctgtatcttgggaaaagagtccttttatgacacattccatactgtggctgacatgatgtatttctgccagatgctggcagttgtggaaactatcaatgcagcaattggagtcactacgtcaccggtgctgccttctctgatccagcttcttggaagaaattttattttgtttatcatctttggcaccatggaagaaatgcagaacaaagctgtggttttctttgtgttttatttgtggagtgcaattgaaattttcaggtactctttctacatgctgacgtgcattgacatggattggaaggtgctcacatggcttcgttacactctgtggattcccttatatccactgggatgtttggcggaagctgtctcagtgattcagtccattccaatattcaatgagaccggacgattcagtttcacattgccatatccagtgaaaatcaaagttagattttccttttttcttcagatttatcttataatgatatttttaggtttatacataaattttcgtcacctttataaacagcgcagacggcgctatggacaaaaaaagaaaaagatccactaaaaagaaagatttagatggcttcttgccagtttgagcctaatctgattcttacagttttaccttcttgaaccaatgtaaaagtttttttaatgttaaatgattaaattctcagtgaggctatcttccttttccccagtaacattcctgaatttactgttatcttattgtagtacttgcatgacatggattcctgatatctgatgagaggttcattcttgtgtattcagttaatgacaccaaaaggctcagcccaccccaaccctatctcatgttcagtctgtctaatacatgcca

SEQ ID NO: 102684 - DNA, 1658 bp, Homo sapiens
  Payload ID: 31
  Gene Symbol: HACD3
  Gene Name: 3-hydroxyacyl-CoA dehydratase 3
  ENST ID: ENST00000566074
  CDS Start-End: 345-1082
atcgcggctccgggtacccgccaggacccctgccccctttgtccgcgtgcgcgccggagagcctgcagtgcgccaacaagaaccctgccatcagcatcactgaaaacgtgctgcatttcaaagctcaaggacatggtgccaaaggagacaatgtctatgaatttcacctggagttcttagaccttgtgaaaccagagcctgtttacaaactgacccagaggcaggtaaacattacagtacagaagaaagtgagtcagtggtgggagagactcacaaagcaggaaaagcgaccactgtttttggctcctgactttgatcgttggctggatgaatctgatgcggaaatggagctcagagctaaggaagaagagcgcctaaataaactccgactggaaagcgaaggctctcctgaaactcttacaaacttaaggaaaggatacctgtttatgtataatcttgtgcaattcttgggattctcctggatctttgtcaacctgactgtgcgattctgtatcttgggaaaagagtccttttatgacacattccatactgtggctgacatgatgtatttctgccagatgctggcagttgtggaaactatcaatgcagcaattggagtcactacgtcaccggtgctgccttctctgatccagcttcttggaagaaattttattttgtttatcatctttggcaccatggaagaaatgcagaacaaagctgtggttttctttgtgttttatttgtggagtgcaattgaaattttcaggtactctttctacatgctgacgtgcattgacatggattggaaggtgctcacatggcttcgttacactctgtggattcccttatatccactgggatgtttggcggaagctgtctcagtgattcagtccattccaatattcaatgagaccggacgattcagtttcacattgccatatccagtgaaaatcaaagttagattttccttttttcttcagatttatcttataatgatatttttaggtttatacataaattttcgtcacctttataaacagcgcagacggcgctatggacaaaaaaagaaaaagatccactaaaaagaaagatttagatggcttcttgccagtttgagcctaatctgattcttacagttttaccttcttgaaccaatgtaaaagtttttttaatgttaaatgattaaattctcagtgaggctatcttccttttccccagtaacattcctgaatttactgttatcttattgtagtacttgcatgacatggattcctgatatctgatgagaggttcattcttgtgtattcagttaatgacaccaaaaggctcagcccaccccaaccctatctcatgttcagtctgtctaatacatgccagagatttttttttcaaaaagtgctttatccctacaatgtactgacagttcttacagttgagatttgttcttttcagctattgcttgtgaaaaaaagcaagactatgtcactctatagaaggctgttaaagtgactcaggcaggaattaattattctgtacctaaggggttacttgtttaatgggatggcattgactttttgaaaatcaagtggactgagtcattgataaaacatttctaagagtggggctagagaacatactttacatctgacatcctttgg

SEQ ID NO: 102685 - DNA, 1465 bp, Homo sapiens
  Payload ID: 31
  Gene Symbol: HACD3
  Gene Name: 3-hydroxyacyl-CoA dehydratase 3
  ENST ID: ENST00000565299
  CDS Start-End: 143-1345
gtggggtatctcgaggtgccgggttgcaggcgctcaggagcgctagggtttgaggcctgctttctgctcgcgccagcagagcactacctgaggcagcgaggcgcagcgagcctagcctccccgcgccctgggcagtgtggccatggagaatcaggtgttgacgccgcatgtctactgggctcagcgacaccgcgagctatatctgcgcgtggagctgagtgacgtacagggtctcactctgttgcccaggttggagtgcagcagtgtgatcatagctcaccgtagccttgaactcctgggtttgagcagtcctcctggctcagcctaccaagtaggactacagaaccctgccatcagcatcactgaaaacgtgctgcatttcaaagctcaaggacatggtgccaaaggagacaatgtctatgaatttcacctggagttcttagaccttgtgaaaccagagcctgtttacaaactgacccagaggcaggtaaacattacagtacagaagaaagtgagtcagtggtgggagagactcacaaagcaggaaaagcgaccactgtttttggctcctgactttgatcgttggctggatgaatctgatgcggaaatggagctcagagctaaggaagaagagcgcctaaataaactccgactggaaagcgaaggctctcctgaaactcttacaaacttaaggaaaggatacctgtttatgtataatcttgtgcaattcttgggattctcctggatctttgtcaacctgactgtgcgattctgtatcttgggaaaagagtccttttatgacacattccatactgtggctgacatgatgtatttctgccagatgctggcagttgtggaaactatcaatgcagcaattggagtcactacgtcaccggtgctgccttctctgatccagcttcttggaagaaattttattttgtttatcatctttggcaccatggaagaaatgcagaacaaagctgtggttttctttgtgttttatttgtggagtgcaattgaaattttcaggtactctttctacatgctgacgtgcattgacatggattggaaggtgctcacatggcttcgttacactctgtggattcccttatatccactgggatgtttggcggaagctgtctcagtgattcagtccattccaatattcaatgagaccggacgattcagtttcacattgccatatccagtgaaaatcaaagttagattttccttttttcttcagatttatcttataatgatatttttaggtttatacataaattttcgtcacctttataaacagcgcagacggcgctatggacaaaaaaagaaaaagatccactaaaaagaaagatttagatggcttcttgccagtttgagcctaatctgattcttacagttttaccttcttgaaccaatgtaaaagtttttttaatgttaaatgattaaattctcagtgaggcta

SEQ ID NO: 102686 - DNA, 8267 bp, Homo sapiens
  Payload ID: 32
  Gene Symbol: HACD4
  Gene Name: 3-hydroxyacyl-CoA dehydratase 4
  Uniprot ID: Q5VWC8
  ENST ID: ENST00000495827
  CDS Start-End: 47-745
ggtactccttcctggaccgcgctggaagccctggcggcggcggcccatggggcccttggcgctgcccgcctggctgcagcccaggtataggaagaatgcgtatcttttcatctattacttaatccagttctgtggccactcttggatatttacaaatatgacagtcagattcttttcatttggaaaagattcaatggttgacactttttatgctattggacttgtgatgcgactttgccaatccgtatctctcctggaactgctgcacatatatgttggcattgagtcaaaccatcttctcccaaggtttttgcagctcacagaaagaataatcatcctttttgtggtgatcaccagtcaagaggaagtccaagagaaatatgtggtgtgtgttttattcgtcttttggaatctattggatatggttaggtacacttatagcatgttatcagtcataggaatatcctatgctgtcttgacatggctcagtcaaacactatggatgccaatttatcctttgtgtgttcttgctgaagcatttgccatctatcaatcgctgccttattttgaatcatttggcacttattccaccaagctgccctttgacttatccatctatttcccatatgtgctgaaaatatatctcatgatgctctttataggtatgtattttacctacagtcatctatactcagaaagaagagacatcctcggaatctttcccattaaaaaaaagaagatgtgaagtacagcattccagtgtgacacgagaaaagacaggctgtggattcagtgcagtaaataaaacacaggaagtattctggtggaaaaataccttgtatttgataaaaatccattacatgaaataactgcacatacccccaaaactctagacataacaggctatgtttttcacacattgtatttttaagacatatatattctccataccctgcttcaccaaaattcctgcttcatttggattttatacaagttatacttacattgtatgaagtctgattattttcctgtaagtttaatgagaaataggagattagctgcaatagattcaattaaattaagaaaccaaacttgataacctaaattacatgtattctttttcacttccaagttcccaaatagatctgtaggagaagagggatggaaaatatattccacagttgcctagaataacatatttcatagacagatgtctgtcttcagatctaataatactcaccctaaacattagatatgtttagaaaattaaatatctttccaagccctatgtcttagctcaggttgctataatagaacaccataaaccgaatggcttaaacaacagcaaacgcttctcacagttctggaggctgggaattccgctcaggatcaaggcatcagctaatgcagtttctggtgagggccctcttcccagtttgcagatagatgtccttctttgtcctcacatgagagagagatcaactctcttatgtctcttataatggcactaaccccattcatgagggctctaccctcatgatctaattacctcccaatggccccacctccaaataccatcatattggaggttagggcttaacacatgaattttgggggaacacaaagattcactccatagcattctgtacctggtcctacaaaattcatgtcctcctcacatgcaaaatacatacattccatctcgacagcctcaaaagtcttaactcattcctgcatcaactctaaagtccaaagtctcgtctaaatcagatgtgggtgagattcaaggtagaattcatcctgaggtaaaattcctttccagctttgaacttgtgaaatgaaacaagttatgtgcttccacagtacaatggtgggacacacaaagggtggacattcctattcccaaagcaagaaacaggaaaaaaggaaggtgtaatgggtccccagcaagtccaaaacctagcaaggcaaacaccatgagatcttcagtcttagtaataatcctctttggcctgatactctggcttcaggacccagtgaggcagaggtattgcccccaggactatgttggaggaggatgacccccatatcaccaggcggaagctgtcaggcctgttgaaaccaaggcaatgactgccccttttgaaactgagaaggtaccactgatgttctctgaatcattgttccgggtcagtttctccttttcttgaagaatagtgtacattcacagctgaatagctctatggtcccaaattcaagaagtccaacagtcttccctcattctgtcccatctccattcctttcaatacaaactagcagtgttcctgctggggtggctgattaggtctgtggttcacacccacataaatctaattggatgacttgtctgctacactcttagtgttctctaccaaacgtgttttcttatctttttgtaatgcagacagactgataatttcccacatcttttaagttctggttccgtttttgttaagaattctgtcttcattttttgtcacattttactttaagcagtcaagataaaccgaggcactccttcaacactggttggagatctcttcagttcaatatctaatttcatggctcacaattttactttccacaaaacactagaacatgaacacaatcatccaagttctttggcatattataacaaagatcacctttcttccagtttcccataacaggttcctcattttcatttgagacttcatcagaatggcctttattgtccatgtctaccaacattatcttcatggtgatttacgtgttctctatgaagatggaggctttctctcccaccctcttctctttgagccctcaccaaaatcacctctatcaatcccttcatggcaatactggctttttctagcaaaaaaactagtacctcaaaactcttccagtactcttccaggtactctagtacctcaaaactcttccagcttctatctgttacctaacgtcaaagctgcttccacatctttatatattggttatagcatcaccacacttcttggtactaattgctgtcttagcttggctgctataacaaaataccataaactgggtggcttagacaacaaatatatttctcacagttctggaggcagggaagtccaagataaaggtgctagacaattaagttcctgatgaggttccaaggtgctagctgattcttcttcatggtttgcagatgaatgccttcttgctatatgttcacatggtggagggagaaaccatctctcccttatttcttattgtaaaggtactaatcccatttatgaaggttccagcttcaaatgccatcacactggagattagattttcaacatgtgaatttaatgggggacaccagcattcagtccctagtgctctgatagagtattcattaatgtcatgtatttgttaacatcttgtaagttatttgggctttgatgccttaaaagaagaccctggccaggcatgctggctcatacctgtaatcctagcactatgagaggctgaggtgggcagatcagttgaggtcaggagttcaagaccagcctggccaacatggtgaaaccccatttctactaaaaatacaaaaattagccaggcatggtggcgcatgcctgtaatcccagctacacgggaggctgggggcatgagaatcgcttgagcccaggagatggaggttgcagtgagcagagattgagccactgcactccagcctgggtgacagagtgagactctatctcaaaagagaagaccctaatgaaaatagtaaacctttagcaaatacacaaatgatgccccattctgtattctttttaattttaaaaataatgacacacacatacaggaagataaaaggtataaaaatatactaagtactttttaaaaaggaaaattcatgttttggattattactgaattgttgctaattactgtaatgtaagtcatatgtccttacatagttttgaaaaatgctttctttgaaaatctaaaaaaagtgtgaataactgatagtcattgctgtatcattgatgtatcactcaatttttggtaaagaattataaagatcttacctagaaactatgtaaaaaggtattaaatatattgtgatgtaagaataggataataaaaatgtaattttaaaaatgggtaacttatttccactaaagaaaacatttggaaagaaacaattgagtattaggctacttgaaatctttataaatatatttggattttaaaaaattatccttttaaaaagctacattttttctgcttttatagttatcttctaaatttcagaaaaattatgaaaagctttagtgtgcaaggagaacataaaccctttgcaaattttaggtgagttaatcttaatcactccaaataaagatggctccttacactgccgaagtacatgtacaatcaatcactaaaacaaagagaaaattagagaaactacactttactgggtcattataataaattaaaatttcattattaaataatgctttaattttttaaaaccagattaacttaaaaacttcttaaaattgaaaaccaaaagaaacacaagtgaatttataattattttaaaacagaaatgaggattgacagtaatttgagatatctgcaacaattgtaacataaaaagatcttacatttcctttggtgacagacacaattgttaatactactgtggttggttgcctgtattcacaatggaaaggaatactaaatttcattatcaattagtgaaaataaaggtgtaatttctttttctacttaagtacatgttccccaggttaagaaacccagacatagtgaagtcaagacagtaactatctggttaatcggatgttaccaaaatcgcaaagttgatgtctttgactatctgtcttaactgtatgttcaccaaatccctatttcattttgtacagtgtagacaaaggcttactttctcaaatctaagtaacatagatgaaataggaaccattagatattttgaaaacatatctaagacaacttttttcagtaatttttttattgtggtaaaatgtaaaatatactatcttattcctttttaagtgtgcagttcagtagtagtaagtaatttatattgtgcaaccatcaccactgtccatctccagaactttttttaccttgcaaaacttataccctatactcattaagcaatggttccctattctcccatctgccctgtccctggcaaccaccagtctactttttgtctctatgattttgattgctctaagtacctcatataaatgtaatcatacagtatctgtctttcgtaattggcttatttcacttagcataatgtctgcaagtttcctccattttgtatatgtcagaattttcttcctttttgaggatgactgataaggagggacttactcctgtcattttgctatttgttttctacatagcttagcttttttgtccctcatttcctgcattacgtcttttgtgtgtagtttacttttttatagtgaagcatttaagtatctttctcagttcttttgtgtatattctgtagctgttttctttgtggttaccatagggtgacatttaatatccggaaggtaatttggacttatgccagctgaacttcaaaaatatacaaaaattctgctctttatatctctgtctatcactcctttaagtttcacaaaattatatacactgtgtgtccaaaatcaatttttaaaaatgcagtagtctctatgtagaaaacaaaaagtggagttacaaaccattgttacaaaagtactagattttataattgcccatgtatttttctttactgagatccttatttcttcatgtggctttgagttgctgtttagtgtctttccatttcaacttgcaggacccctattagcatttctggcaggggcaggtctagtggtaacatactttctcagcttttgtttatctggggatgtcttaatttctctctcacgtttgaagaacagttttgtcaaatacaggaaatgtggttgatgatatatttttttcctaacactttgaatatgtgagctcactgcattctggcctccaaagtttctgatgagaaatctgataatcttattaaggatcacttatatgtgatgaattgattttttcatgctactttcaagattctctttctgtctttggcttttgatagttgtgtggatctcttggaattcattctacttggagtttgttggtcattatctggctgttcttcaaatattctctctgctcctttctttctctcttttccttctgggatcctcacaatgtgtatgttggtctgcttgatgggtcccacagatccttataccctgttcacttttttccaatttttttctattgctcagactaataatttccattgtcctattttcatgtatactgattcttctgctgcccaaatctgcctttgaatacctctagtgagtttttcatttcaattatcgtactttccagctcttgaatttcttttttgtatcgtcttagattttctctatattgatattaccattttgttcatccattggttttttgactttttccgcatgctctttggttctttaaaaaacatccttaaggcagtcgttgtagagcctttagtggatccaccatcaagtctttttcagagatagtttttgtttttgttttcatttgaaagggacatactttcctgtttctttgtatgccttgttatttttttgctgaaaactgaacgtttcaatctaataatatggtaactacatctcactaaggtccctaagttaatgtttttttttaaactattccttactttgcctgccttgagcaagttgtcaaatgtgagaaactgtatttatttcagaagtacaaatagatacaatctcaatgtccaaaatatttccccaaagaaagaatcttacaattatttaagtttacttatggagaaaacattttatggtactaaagtgttaaagtgatttaaaattaaggttaaaatatgctaaaaattatcttcctttacccagtatctatcttccacttgtttattactgctttttaataattataatgtttcccgttggttcggataattttaatattcttctcggtctgagttatatgctaatgttgatatgacatggttctccagggtagtgttcagattgtatgttcagggagcaacagccacaattaacaagttcacctgtttagaatgcagattccagggctccactaaagatagttgaatcagaagctctgggaataagctcaggatcctaccttttgatagactcctcaaatgagcctcatgcacagaaaagtttgagaaccactgcttttgagtctaaattatttcagctttggacagaaagaaaactgctaaaaagaactacttatataaaagccaccaatgttttcagaacagggatgattttttatggctttaaaaatccttaaatagtagttctgaacatgtttttaacatgccaagtaagaattactaactagtttatttttgctaagggtagctggagttttaaatctcatctaaaataaggttagttaattccatatgaaagtcaattagtaaaagtatgccttaattcatcacatacatgtaggtgtctattgttacttcatggtattcagctgaatgatggggttcttgtgaaagataatgtggtctggaattaagagcactaggtttgatttgagatcaagctccattatttactaactgaatgactctttgagttccagtttccttaaccacttaaagttattatgaagactaaatgacatatggtaaattaaacttttgcaaattataaagggctttgcagaagtaggacatttataacatgttctgttcttacttcatgatggtttagtgatttatattctctgactgtaagttccatgagagcagggatgacacgttttgttcagattgtaccccagaaacttgtatagtggcacataatagacacccataattgtgtgtgcaactctatctttaaagaacgccactactacatctagaaatatatttcaagaaatctatcggcttaattaggtaatgaatttcaattgtatctcaaagcgttccttatatttagaagacacataagttttgtttttttctttcaacttatataagtatcttaacatgctacttctagaatattttaattgttaagaacaatttcttaataaacttccactgtcttcctgag

SEQ ID NO: 102687 - DNA, 1265 bp, Homo sapiens
  Payload ID: 33
  Gene Symbol: HAAO
  Gene Name: 3-hydroxyanthranilate 3,4-dioxygenase
  Uniprot ID: P46952
  ENST ID: ENST00000294973
  CDS Start-End: 57-917
gctgcgggcctccgacggcgggaggacagcgctgcgaggaggcgcccgggacagtcatggagcgccgcctgggagtgagggcctgggtgaaggagaaccggggctccttccagcccccggtctgcaacaagctcatgcaccaggagcagctcaaagtcatgttcatcggaggccccaacaccaggaaggactatcacatcgaagagggtgaagaggtattttaccagctggagggagacatggttctccgagtcctggagcaagggaaacaccgggatgtggtcattcggcagggagagatattcctcctgcctgccagggtgccccactcaccacagaggtttgccaacaccgtggggctggtggttgagcgaaggcggctggagaccgagctagatgggctcaggtactatgtgggcgacaccatggacgttctgtttgagaagtggttctactgcaaggacctcggcacgcagttggcccccatcatccaggagttcttcagctctgagcagtacagaacaggaaagcccatccctgaccagctgctcaaggagccaccattccctctgagcacacgatccatcatggagcccatgtccctggatgcctggctggacagccaccacagggagctgcaggcaggcacaccactcagcctgtttggggacacctatgagacccaggtgatcgcctatgggcaaggcagcagcgaaggcctgagacagaatgtggacgtgtggctgtggcagctggagggctcctcggtggtgacaatggggggacggcgcctgagcctggcccctgatgacagcctcctggtgctagctgggacctcgtatgcctgggagcgaacacaaggctctgtggccctgtctgtgacccaggaccctgcctgcaagaagcccctggggtgaccctcttgccatggcctgaagcagccacaggtgtgccaagcaccctcgagtgccatccctgccaaacaactctcccagcccccactacctctctgtgtactgccgctgtgtcccccacagacctgcacattgttgtcacccaccctcctgcccttctcagcccagatgccatgcccctgggcgggcagcagctccccatcttctctggcagactcagcccactgccttgccagtcttgccaggtggtctacccccggccccgctcctgcccattcctctgtccctgcagactcagtgcagcacttccacaccaagaaggccctcaataaaggcttcctgaggaacgca

SEQ ID NO: 102688 - DNA, 827 bp, Homo sapiens
  Payload ID: 33
  Gene Symbol: HAAO
  Gene Name: 3-hydroxyanthranilate 3,4-dioxygenase
  ENST ID: ENST00000431905
  CDS Start-End: 298-827
ggaggacagcgctgcgaggaggcgcccgggacagtcatggagcgccgcctgggagtgagggcctgggtgaaggagaaccggggctccttccagcccccggtctgcaacaagctcatataaggttagtaacatgccccagggcctgtgcttataaacacatgccacactgacttgacaccgcctgaggcccctgctagatgtcacggtctcctgcatccactgagccatgcctccagccaggggagagtgcagggtcctatagtcagacagcatgggcaccaggagcagctcaaagtcatgttcatcggaggccccaacaccaggaaggactatcacatcgaagagggtgaagaggtattttaccagctggagggagacatggttctccgagtcctggagcaagggaaacaccgggatgtggtcattcggcagggagagatattcctcctgcctgccagggtgccccactcaccacagaggtttgccaacaccgtggggctggtggttgagcgaaggcggctggagaccgagctagatgggctcaggtactatgtgggcgacaccatggacgttctgtttgagaagtggttctactgcaaggacctcggcacgcagttggcccccatcatccaggagttcttcagctctgagcagtacagaacaggaaagcccatccctgaccagctgctcaaggagccaccattccctctgagcacacgatccatcatggagcccatgtccctggatgcctggctggacagccaccacagggagctgcaggcaggcacaccactcagcctgtttggggacacctatgagacccaggt

SEQ ID NO: 102689 - DNA, 3330 bp, Homo sapiens
  Payload ID: 34
  Gene Symbol: BDH1
  Gene Name: 3-hydroxybutyrate dehydrogenase, type 1
  Uniprot ID: Q02338
  ENST ID: ENST00000358186
  CDS Start-End: 187-1218
attgaaagaatacacagaaagcctggaaaaggtttccaggggtgtcaatacgccctgtcaactgagaattaagaggatccggctggtcacttgcctggagaggatcctgcatgctgatagtgctgaggcacctgccagctaagaaccaccgggaggaactgggccattctaacacccgttgctaccatgctggccacccgcctctccagacccctgtcacggctcccaggaaaaaccctaagtgcctgtgatagagaaaatggagcaagacgcccactattgcttggttctacttcctttatcccgattggccgtcggacttatgccagtgcggcggagccggttggcagcaaagctgtcctggtcacaggctgtgactctggatttgggttctcattggccaagcatctgcattcaaaaggcttccttgtgtttgctggctgcttgatgaaggacaaaggccatgatggggtcaaggagctggacagcctaaacagtgaccgattgagaaccgtccagctcaatgtctgcagcagcgaagaggtggagaaagtggtggagattgtccgctcgagcctgaaggaccctgagaaaggcatgtggggcctcgttaacaatgccggcatctcaacgttcggggaggtggagttcaccagcctggagacctacaagcaggtggcagaagtgaacctttggggcacagtgcggatgacgaaatcctttctccccctcatccgaagggccaaaggccgcgtcgtcaatatcagcagcatgctgggccgcatggccaacccggcccgctccccgtactgcatcaccaagttcggggtagaggctttctcggactgcctgcgctatgagatgtaccccctgggcgtgaaggtcagcgtggtggagcccggcaacttcatcgctgccaccagcctttacagccctgagagcattcaggccatcgccaagaagatgtgggaggagctgcctgaggtcgtgcgcaaggactacggcaagaagtactttgatgaaaagatcgccaagatggagacctactgcagcagtggctccacagacacgtcccctgtcatcgatgctgtcacacacgccctgaccgccaccaccccctacacccgctaccaccccatggactactactggtggctgcgaatgcagatcatgacccacttgcctggagccatctccgacatgatctacatccgctgaagagtctcgctgtggcctctgtcagggatccctggtggaaggggaggggagggaggaacccatatagtcaactcttgattatccacgtgtggattatccaccatgccaggaagacccataactggttttaacactaactagagggaatgacttctttgcatagtgagtgacttgggccttcacaaacagggtgtggagtggcaggcagaggcctctaaatctcagggcaaacatggtgaatctatctctccggagataatttcatacagagattttaagaaaacatctttatattaaaaacagatctcatttgatccttaagccagtctcatgaatgaaaaggacaggtttttttcttttgtaaatgaagcatttgcagcttaaagaggatgcatgaaataacccttttatcgcttataaatagtgccagttatgtgttcctgccacggctgtggaaatacttcacatttgcattccaggactgttttggatccatttgcccgagaatcttctgactaactctgtgtcctcatctgggcagcacacaccaagtgcccactggtacctctgcatgtccatggtgctgtgtgactggccagccagcagccagtgactcagagctggctgtatggagggggtgggaatgtttctggagatttttgtttttccagacacagtcttgctcagtcccctaggctggagtgcaatggcaccatctccgctcactgcaacctccgcctccctggttcaagcggttctcctgcctcagccttccaagtagctggggttataggcacccaccaccatgccgggctaatttttgtatttttagtagagatggggtttcaccatgttggctaggctggtcccgaactcccgacttcaagtgatccgcctgccttggcctcccaaagtgctgggattacaggcatgagatttttacttgagatttttccatcctcttttaggactcaggatagacttgtgtggaggtgctctctggctaaggggataagttgttactggtttgggtctgcttggttttgccttgggtggggccggtgtcgatggggcaggcttggcacgagcagtggtgccatggcagggcactgtggcatctcccctagcagtggatttggggtccctgcttgcctcacgtggtgcttacacacatgtacacacacacacacacacacacacacacacacaccttacacacatgtacacacacacacacacacacacacacacacacacacacacacacacacacacacacacacacacacacacacccctgttctgcagggcttcagcgtggccttcattcccgcctcgcctcggcctcttttcaattaagaagtgatgccacttgaggcagggtctgcatgatcacttcttgggtttcagtttgaaagctgccatccctgcgactgcccagggcctgtatgttgggaccgaagccaaacaccactgtcctccagggggctttcggcccggggcagggtccccagtgcccgccttcgaatcagactccgcgtttccgcctctccctgggcggacctgccgctagagggcgctcctcctccgcagccggcgccggcctccagcgccccagactcccgcgctgccgcccgagcctgaggtttctcacggcgttcgggattcgcgcttcggaaaccgggaacaaagaagcaagcagcacccttcagaaacagtgttctcgctctcctagcagctggcccgggcccggaggctggtgccaggagaaggcagaagagcccgggcagccggagtgggctacggggttcaggcagtgccaaggaagaagggcctcacaatgggcaattcagctgcctcccgggccgttgtccccgctgtcttcaaacaggggtcccctgtcccagctgccccaggaggagggggggaggcaggcagggccgaaaccctccagagcccagagggggacgcttggtggccgctgcagttacataaccataggatgcttttgtaccgtggaccttgttctagcaggatcctttcggaattgcacttttacatgttgggcgaatttgtgtccgtgctgaagtttattaaaggaaaatagatgga

SEQ ID NO: 102690 - DNA, 3455 bp, Homo sapiens
  Payload ID: 34
  Gene Symbol: BDH1
  Gene Name: 3-hydroxybutyrate dehydrogenase, type 1
  Uniprot ID: Q02338
  ENST ID: ENST00000392378
  CDS Start-End: 312-1343
ggaggaggcggctcggcggccccccgacagccacgccgccgtgagccccgcccagcgtagccccagcgcgcgcttcgcgtgtagaagcgtccgggtggcggaggccgcaggccgcaggagtgctggtggaggggcttccagaaagaccctgcggcagcgccccccctcggctctccccgcaggagagcgggcacctgcgcggcgccgggtgaaggcgagagcctcggcgagccctctgcagcggagccccctgcccatttggttttggaaccaccgggaggaactgggccattctaacacccgttgctaccatgctggccacccgcctctccagacccctgtcacggctcccaggaaaaaccctaagtgcctgtgatagagaaaatggagcaagacgcccactattgcttggttctacttcctttatcccgattggccgtcggacttatgccagtgcggcggagccggttggcagcaaagctgtcctggtcacaggctgtgactctggatttgggttctcattggccaagcatctgcattcaaaaggcttccttgtgtttgctggctgcttgatgaaggacaaaggccatgatggggtcaaggagctggacagcctaaacagtgaccgattgagaaccgtccagctcaatgtctgcagcagcgaagaggtggagaaagtggtggagattgtccgctcgagcctgaaggaccctgagaaaggcatgtggggcctcgttaacaatgccggcatctcaacgttcggggaggtggagttcaccagcctggagacctacaagcaggtggcagaagtgaacctttggggcacagtgcggatgacgaaatcctttctccccctcatccgaagggccaaaggccgcgtcgtcaatatcagcagcatgctgggccgcatggccaacccggcccgctccccgtactgcatcaccaagttcggggtagaggctttctcggactgcctgcgctatgagatgtaccccctgggcgtgaaggtcagcgtggtggagcccggcaacttcatcgctgccaccagcctttacagccctgagagcattcaggccatcgccaagaagatgtgggaggagctgcctgaggtcgtgcgcaaggactacggcaagaagtactttgatgaaaagatcgccaagatggagacctactgcagcagtggctccacagacacgtcccctgtcatcgatgctgtcacacacgccctgaccgccaccaccccctacacccgctaccaccccatggactactactggtggctgcgaatgcagatcatgacccacttgcctggagccatctccgacatgatctacatccgctgaagagtctcgctgtggcctctgtcagggatccctggtggaaggggaggggagggaggaacccatatagtcaactcttgattatccacgtgtggattatccaccatgccaggaagacccataactggttttaacactaactagagggaatgacttctttgcatagtgagtgacttgggccttcacaaacagggtgtggagtggcaggcagaggcctctaaatctcagggcaaacatggtgaatctatctctccggagataatttcatacagagattttaagaaaacatctttatattaaaaacagatctcatttgatccttaagccagtctcatgaatgaaaaggacaggtttttttcttttgtaaatgaagcatttgcagcttaaagaggatgcatgaaataacccttttatcgcttataaatagtgccagttatgtgttcctgccacggctgtggaaatacttcacatttgcattccaggactgttttggatccatttgcccgagaatcttctgactaactctgtgtcctcatctgggcagcacacaccaagtgcccactggtacctctgcatgtccatggtgctgtgtgactggccagccagcagccagtgactcagagctggctgtatggagggggtgggaatgtttctggagatttttgtttttccagacacagtcttgctcagtcccctaggctggagtgcaatggcaccatctccgctcactgcaacctccgcctccctggttcaagcggttctcctgcctcagccttccaagtagctggggttataggcacccaccaccatgccgggctaatttttgtatttttagtagagatggggtttcaccatgttggctaggctggtcccgaactcccgacttcaagtgatccgcctgccttggcctcccaaagtgctgggattacaggcatgagatttttacttgagatttttccatcctcttttaggactcaggatagacttgtgtggaggtgctctctggctaaggggataagttgttactggtttgggtctgcttggttttgccttgggtggggccggtgtcgatggggcaggcttggcacgagcagtggtgccatggcagggcactgtggcatctcccctagcagtggatttggggtccctgcttgcctcacgtggtgcttacacacatgtacacacacacacacacacacacacacacacacaccttacacacatgtacacacacacacacacacacacacacacacacacacacacacacacacacacacacacacacacacacacacccctgttctgcagggcttcagcgtggccttcattcccgcctcgcctcggcctcttttcaattaagaagtgatgccacttgaggcagggtctgcatgatcacttcttgggtttcagtttgaaagctgccatccctgcgactgcccagggcctgtatgttgggaccgaagccaaacaccactgtcctccagggggctttcggcccggggcagggtccccagtgcccgccttcgaatcagactccgcgtttccgcctctccctgggcggacctgccgctagagggcgctcctcctccgcagccggcgccggcctccagcgccccagactcccgcgctgccgcccgagcctgaggtttctcacggcgttcgggattcgcgcttcggaaaccgggaacaaagaagcaagcagcacccttcagaaacagtgttctcgctctcctagcagctggcccgggcccggaggctggtgccaggagaaggcagaagagcccgggcagccggagtgggctacggggttcaggcagtgccaaggaagaagggcctcacaatgggcaattcagctgcctcccgggccgttgtccccgctgtcttcaaacaggggtcccctgtcccagctgccccaggaggagggggggaggcaggcagggccgaaaccctccagagcccagagggggacgcttggtggccgctgcagttacataaccataggatgcttttgtaccgtggaccttgttctagcaggatcctttcggaattgcacttttacatgttgggcgaatttgtgtccgtgctgaagtttattaaaggaaaatagatgga

SEQ ID NO: 102691 - DNA, 3546 bp, Homo sapiens
  Payload ID: 34
  Gene Symbol: BDH1
  Gene Name: 3-hydroxybutyrate dehydrogenase, type 1
  Uniprot ID: Q02338
  ENST ID: ENST00000392379
  CDS Start-End: 403-1434
cccagcgcgcgcttcgcgtgtagaagcgtccgggtggcggaggccgcaggccgcaggagtgctggtggaggggcttccagaaagaccctgcggcagcgccccccctcggctctccccgcaggagagcgggcacctgcgcggcgccgggtgaaggcgagagcctcggcgagccctctgcagcggagccccctgcccatttggttttggccagtcagcctggaaatctgcctgtagtcagctgatgcagagtcaccctgcagttcctactttgaggggttgcagaagcacatatttcactatggagggccgcctgcaggcctcgcgctgacaggatcttttgtgacgctgcaaatgtcctgaaccaccgggaggaactgggccattctaacacccgttgctaccatgctggccacccgcctctccagacccctgtcacggctcccaggaaaaaccctaagtgcctgtgatagagaaaatggagcaagacgcccactattgcttggttctacttcctttatcccgattggccgtcggacttatgccagtgcggcggagccggttggcagcaaagctgtcctggtcacaggctgtgactctggatttgggttctcattggccaagcatctgcattcaaaaggcttccttgtgtttgctggctgcttgatgaaggacaaaggccatgatggggtcaaggagctggacagcctaaacagtgaccgattgagaaccgtccagctcaatgtctgcagcagcgaagaggtggagaaagtggtggagattgtccgctcgagcctgaaggaccctgagaaaggcatgtggggcctcgttaacaatgccggcatctcaacgttcggggaggtggagttcaccagcctggagacctacaagcaggtggcagaagtgaacctttggggcacagtgcggatgacgaaatcctttctccccctcatccgaagggccaaaggccgcgtcgtcaatatcagcagcatgctgggccgcatggccaacccggcccgctccccgtactgcatcaccaagttcggggtagaggctttctcggactgcctgcgctatgagatgtaccccctgggcgtgaaggtcagcgtggtggagcccggcaacttcatcgctgccaccagcctttacagccctgagagcattcaggccatcgccaagaagatgtgggaggagctgcctgaggtcgtgcgcaaggactacggcaagaagtactttgatgaaaagatcgccaagatggagacctactgcagcagtggctccacagacacgtcccctgtcatcgatgctgtcacacacgccctgaccgccaccaccccctacacccgctaccaccccatggactactactggtggctgcgaatgcagatcatgacccacttgcctggagccatctccgacatgatctacatccgctgaagagtctcgctgtggcctctgtcagggatccctggtggaaggggaggggagggaggaacccatatagtcaactcttgattatccacgtgtggattatccaccatgccaggaagacccataactggttttaacactaactagagggaatgacttctttgcatagtgagtgacttgggccttcacaaacagggtgtggagtggcaggcagaggcctctaaatctcagggcaaacatggtgaatctatctctccggagataatttcatacagagattttaagaaaacatctttatattaaaaacagatctcatttgatccttaagccagtctcatgaatgaaaaggacaggtttttttcttttgtaaatgaagcatttgcagcttaaagaggatgcatgaaataacccttttatcgcttataaatagtgccagttatgtgttcctgccacggctgtggaaatacttcacatttgcattccaggactgttttggatccatttgcccgagaatcttctgactaactctgtgtcctcatctgggcagcacacaccaagtgcccactggtacctctgcatgtccatggtgctgtgtgactggccagccagcagccagtgactcagagctggctgtatggagggggtgggaatgtttctggagatttttgtttttccagacacagtcttgctcagtcccctaggctggagtgcaatggcaccatctccgctcactgcaacctccgcctccctggttcaagcggttctcctgcctcagccttccaagtagctggggttataggcacccaccaccatgccgggctaatttttgtatttttagtagagatggggtttcaccatgttggctaggctggtcccgaactcccgacttcaagtgatccgcctgccttggcctcccaaagtgctgggattacaggcatgagatttttacttgagatttttccatcctcttttaggactcaggatagacttgtgtggaggtgctctctggctaaggggataagttgttactggtttgggtctgcttggttttgccttgggtggggccggtgtcgatggggcaggcttggcacgagcagtggtgccatggcagggcactgtggcatctcccctagcagtggatttggggtccctgcttgcctcacgtggtgcttacacacatgtacacacacacacacacacacacacacacacacaccttacacacatgtacacacacacacacacacacacacacacacacacacacacacacacacacacacacacacacacacacacacccctgttctgcagggcttcagcgtggccttcattcccgcctcgcctcggcctcttttcaattaagaagtgatgccacttgaggcagggtctgcatgatcacttcttgggtttcagtttgaaagctgccatccctgcgactgcccagggcctgtatgttgggaccgaagccaaacaccactgtcctccagggggctttcggcccggggcagggtccccagtgcccgccttcgaatcagactccgcgtttccgcctctccctgggcggacctgccgctagagggcgctcctcctccgcagccggcgccggcctccagcgccccagactcccgcgctgccgcccgagcctgaggtttctcacggcgttcgggattcgcgcttcggaaaccgggaacaaagaagcaagcagcacccttcagaaacagtgttctcgctctcctagcagctggcccgggcccggaggctggtgccaggagaaggcagaagagcccgggcagccggagtgggctacggggttcaggcagtgccaaggaagaagggcctcacaatgggcaattcagctgcctcccgggccgttgtccccgctgtcttcaaacaggggtcccctgtcccagctgccccaggaggagggggggaggcaggcagggccgaaaccctccagagcccagagggggacgcttggtggccgctgcagttacataaccataggatgcttttgtaccgtggaccttgttctagcaggatcctttcggaattgcacttttacatgttgggcgaatttgtgtccgtgctgaagtttattaaaggaaaatagatgga

SEQ ID NO: 102692 - DNA, 868 bp, Homo sapiens
  Payload ID: 34
  Gene Symbol: BDH1
  Gene Name: 3-hydroxybutyrate dehydrogenase, type 1
  ENST ID: ENST00000446746
  CDS Start-End: 371-868
gcgtgtagaagcgtccgggtggcggaggccgcaggccgcaggagtgctggtggaggggcttccagaaagaccctgcggcagcgccccccctcggctctccccgcaggagagcgggcacctgcgcggcgccgggtgaaggcgagagcctcggcgagccctctgcagcggagccccctgcccatttggttttggacgcccactattgcttggttctacttcctttatcccgattggccgtcggacttatgccagtgcggcggagccggttggcagcaaagctgtcctggtcacaggctgtgactctggatttgggttctcattggccaagcatctgcattcaaaaggcttccttgtgtttgctggctgcttgatgaaggacaaaggccatgatggggtcaaggagctggacagcctaaacagtgaccgattgagaaccgtccagctcaatgtctgcagcagcgaagaggtggagaaagtggtggagattgtccgctcgagcctgaaggaccctgagaaaggcatgtggggcctcgttaacaatgccggcatctcaacgttcggggaggtggagttcaccagcctggagacctacaagcaggtggcagaagtgaacctttggggcacagtgcggatgacgaaatcctttctccccctcatccgaagggccaaaggccgcgtcgtcaatatcagcagcatgctgggccgcatggccaacccggcccgctccccgtactgcatcaccaagttcggggtagaggctttctcggactgcctgcgctatgagatgtaccccctgggcgtgaaggtcagcgtggtggagcccggcaacttcatcgctgccaccagcctttacagccctgagagcatt

SEQ ID NO: 102693 - DNA, 453 bp, Homo sapiens
  Payload ID: 34
  Gene Symbol: BDH1
  Gene Name: 3-hydroxybutyrate dehydrogenase, type 1
  ENST ID: ENST00000431056
  CDS Start-End: 187-453
attgaaagaatacacagaaagcctggaaaaggtttccaggggtgtcaatacgccctgtcaactgagaattaagaggatccggctggtcacttgcctggagaggatcctgcatgctgatagtgctgaggcacctgccagctaagaaccaccgggaggaactgggccattctaacacccgttgctaccatgctggccacccgcctctccagacccctgtcacggctcccaggaaaaaccctaagtgcctgtgatagagaaaatggagcaagacgcccactattgcttggttctacttcctttatcccgattggccgtcggacttatgccagtgcggcggagccggttggcagcaaagctgtcctggtcacaggctgtgactctggatttgggttctcattggccaagcatctgcattcaaaaggcttccttgtgtttgctggctgcttgatgaag

SEQ ID NO: 102694 - DNA, 539 bp, Homo sapiens
  Payload ID: 34
  Gene Symbol: BDH1
  Gene Name: 3-hydroxybutyrate dehydrogenase, type 1
  ENST ID: ENST00000445160
  CDS Start-End: 388-539
ccgggtggcggaggccgcaggccgcaggagtgctggtggaggggcttccagaaagaccctgcggcagcgccccccctcggctctccccgcaggagagcgggcacctgcgcggcgccgggtgaaggcgagagcctcggcgagccctctgcagcggagccccctgcccatttggttttgggcaggaggaggccctgggttaaacacgcggccctgcagctcccaggtgaaacgactcatcgtttcctgccggcgcatcttactgaaggggacccaggccccacgaagggaaggaaccgtcctcaaggtcacgtcgtagtcaaaggccgagcccagaccgaagccagaaccaccgggaggaactgggccattctaacacccgttgctaccatgctggccacccgcctctccagacccctgtcacggctcccaggaaaaaccctaagtgcctgtgatagagaaaatggagcaagacgcccactattgcttggttctacttcctttatcccgattggccgtcggacttatgccagtgcggcgga

SEQ ID NO: 102695 - DNA, 386 bp, Homo sapiens
  Payload ID: 34
  Gene Symbol: BDH1
  Gene Name: 3-hydroxybutyrate dehydrogenase, type 1
  ENST ID: ENST00000455876
  CDS Start-End: 1-386
atgccggcatctcaacgttcggggaggtggagttcaccagcctggagacctacaagcaggtggcagaagtgaacctttggggcacagtgcggatgacgaaatcctttctccccctcatccgaagggccaaaggtgagtgggaaagggagctccctcctgcccctgaacctgccccacgtgttcatctttgctcagaatggaaatacctgtcccagcagctccaatgtccacaactcagcagaggccgcgtcgtcaatatcagcagcatgctgggccgcatggccaacccggcccgctccccgtactgcatcaccaagttcggggtagaggctttctcggactgcctgcgctatgagatgtaccccctgggcgtgaaggtcagcgtg

SEQ ID NO: 102696 - DNA, 659 bp, Homo sapiens
  Payload ID: 34
  Gene Symbol: BDH1
  Gene Name: 3-hydroxybutyrate dehydrogenase, type 1
  ENST ID: ENST00000434143
  CDS Start-End: 154-659
ggctactcaggaggctgaggcaggagaatcgcttgaacccaggaggcggaggttgcagtgagctgagatcgtgtcactgcactccagcctgggcaacaagagtgaaactctgtctcaaaaacaaaacaaaacaaaacaaaaaacaaaatttgaatggcgtcaaatggtatacagaaaagacgcccactattgcttggttctacttcctttatcccgattggccgtcggacttatgccagtgcggcggagccggttggcagcaaagctgtcctggtcacaggctgtgactctggatttgggttctcattggccaagcatctgcattcaaaaggcttccttgtgtttgctggctgcttgatgaaggacaaaggccatgatggggtcaaggagctggacagcctaaacagtgaccgattgagaaccgtccagctcaatgtctgcagcagcgaagaggtggagaaagtggtggagattgtccgctcgagcctgaaggaccctgagaaaggcatgtggggcctcgttaacaatgccggcatctcaacgttcggggaggtggagttcaccagcctggagacctacaagcaggtggcagaagtgaacctttggggcacagtgcggatgacgaaatcctttctccccctcatccgaagggccaaagg

SEQ ID NO: 102697 - DNA, 955 bp, Homo sapiens
  Payload ID: 34
  Gene Symbol: BDH1
  Gene Name: 3-hydroxybutyrate dehydrogenase, type 1
  ENST ID: ENST00000432819
  CDS Start-End: 396-955
cgcgcttcgcgtgtagaagcgtccgggtggcggaggccgcaggccgcaggagtgctggtggaggggcttccagaaagaccctgcggcagcgccccccctcggctctccccgcaggagagcgggcacctgcgcggcgccgggtgaaggcgagagcctcggcgagccctctgcagcggagccccctgcccatttggttttggccagtcagcctggaaatctgcctgtagtcagctgatgcagagtcaccctgcagttcctactttgaggggttgcagaagcacatatttcactatggagggccgcctgcaggcctcgcgctgacaggatcttttgtgacgctgcaaatgtcctgaaccaccgggaggaactgggccattctaacacccgttgctaccatgctggccacccgcctctccagacccctgtcacggctcccaggaaaaaccctaagtgcctgtgatagagaaaatggagcaagacgcccactattgcttggttctacttcctttatcccgattggccgtcggacttatgccagtgcggcggagccggttggcagcaaagctgtcctggtcacaggctgtgactctggatttgggttctcattggccaagcatctgcattcaaaaggcttccttgtgtttgctggctgcttgatgaaggacaaaggccatgatggggtcaaggagctggacagcctaaacagtgaccgattgagaaccgtccagctcaatgtctgcagcagcgaagaggtggagaaagtggtggagattgtccgctcgagcctgaaggaccctgagaaaggcatgtggggcctcgttaacaatgccggcatctcaacgttcggggaggtggagttcaccagcctggagacctacaagcaggtggcagaagtgaacctttggggcacagtgcggatgacgaaatcctttctccccctcatccgaagggccaa

SEQ ID NO: 102698 - DNA, 1605 bp, Homo sapiens
  Payload ID: 34
  Gene Symbol: BDH1
  Gene Name: 3-hydroxybutyrate dehydrogenase, type 1
  ENST ID: ENST00000441275
  CDS Start-End: 534-1304
cccagcgcgcgcttcgcgtgtagaagcgtccgggtggcggaggccgcaggccgcaggagtgctggtggaggggcttccagaaagaccctgcggcagcgccccccctcggctctccccgcaggagagcgggcacctgcgcggcgccgggtgaaggcgagagcctcggcgagccctctgcagcggagccccctgcccatttggttttggccagtcagcctggaaatctgcctgtagtcagctgatgcagagtcaccctgcagttcctactttgaggggttgcagaagcacatatttcactatggagggccgcctgcaggcctcgcgctgacaggatcttttgtgacgctgcaaatgtcctgacgcccactattgcttggttctacttcctttatcccgattggccgtcggacttatgccagtgcggcggagccggtgacaaagctgtcctggtcacaggctgtgactctggatttgggttctcattggccaagcatctgcattcaaaaggcttccttgtgtttgctggctgcttgatgaaggacaaaggccatgatggggtcaaggagctggacagcctaaacagtgaccgattgagaaccgtccagctcaatgtctgcagcagcgaagaggtggagaaagtggtggagattgtccgctcgagcctgaaggaccctgagaaaggcatgtggggcctcgttaacaatgccggcatctcaacgttcggggaggtggagttcaccagcctggagacctacaagcaggtggcagaagtgaacctttggggcacagtgcggatgacgaaatcctttctccccctcatccgaagggccaaaggccgcgtcgtcaatatcagcagcatgctgggccgcatggccaacccggcccgctccccgtactgcatcaccaagttcggggtagaggctttctcggactgcctgcgctatgagatgtaccccctgggcgtgaaggtcagcgtggtggagcccggcaacttcatcgctgccaccagcctttacagccctgagagcattcaggccatcgccaagaagatgtgggaggagctgcctgaggtcgtgcgcaaggactacggcaagaagtactttgatgaaaagatcgccaagatggagacctactgcagcagtggctccacagacacgtcccctgtcatcgatgctgtcacacacgccctgaccgccaccaccccctacacccgctaccaccccatggactactactggtggctgcgaatgcagatcatgacccacttgcctggagccatctccgacatgatctacatccgctgaagagtctcgctgtggcctctgtcagggatccctggtggaaggggaggggagggaggaacccatatagtcaactcttgattatccacgtgtggattatccaccatgccaggaagacccataactggttttaacactaactagagggaatgacttctttgcatagtgagtgacttgggccttcacaaacagggtgtggagtggcaggcagaggcctctaaatctcagggcaaacatggtgaatctatctctccggagataatttcatacagagattttaagaaaacatctttatattaaaaac

SEQ ID NO: 102699 - DNA, 3546 bp, Homo sapiens; identical to SEQ ID NO: 102691
  Payload ID: 34
  Gene Symbol: BDH1
  Gene Name: 3-hydroxybutyrate dehydrogenase, type 1
  Uniprot ID: Q02338
  ENST ID: ENST00000617317
  CDS Start-End: 403-1434

SEQ ID NO: 102700 - DNA, 7976 bp, Homo sapiens
  Payload ID: 34
  Gene Symbol: BDH1
  Gene Name: 3-hydroxybutyrate dehydrogenase, type 1
  Uniprot ID: Q02338
  ENST ID: ENST00000612690
  CDS Start-End: 312-1343
ggaggaggcggctcggcggccccccgacagccacgccgccgtgagccccgcccagcgtagccccagcgcgcgcttcgcgtgtagaagcgtccgggtggcggaggccgcaggccgcaggagtgctggtggaggggcttccagaaagaccctgcggcagcgccccccctcggctctccccgcaggagagcgggcacctgcgcggcgccgggtgaaggcgagagcctcggcgagccctctgcagcggagccccctgcccatttggttttggaaccaccgggaggaactgggccattctaacacccgttgctaccatgctggccacccgcctctccagacccctgtcacggctcccaggaaaaaccctaagtgcctgtgatagagaaaatggagcaagacgcccactattgcttggttctacttcctttatcccgattggccgtcggacttatgccagtgcggcggagccggttggcagcaaagctgtcctggtcacaggctgtgactctggatttgggttctcattggccaagcatctgcattcaaaaggcttccttgtgtttgctggctgcttgatgaaggacaaaggccatgatggggtcaaggagctggacagcctaaacagtgaccgattgagaaccgtccagctcaatgtctgcagcagcgaagaggtggagaaagtggtggagattgtccgctcgagcctgaaggaccctgagaaaggcatgtggggcctcgttaacaatgccggcatctcaacgttcggggaggtggagttcaccagcctggagacctacaagcaggtggcagaagtgaacctttggggcacagtgcggatgacgaaatcctttctccccctcatccgaagggccaaaggccgcgtcgtcaatatcagcagcatgctgggccgcatggccaacccggcccgctccccgtactgcatcaccaagttcggggtagaggctttctcggactgcctgcgctatgagatgtaccccctgggcgtgaaggtcagcgtggtggagcccggcaacttcatcgctgccaccagcctttacagccctgagagcattcaggccatcgccaagaagatgtgggaggagctgcctgaggtcgtgcgcaaggactacggcaagaagtactttgatgaaaagatcgccaagatggagacctactgcagcagtggctccacagacacgtcccctgtcatcgatgctgtcacacacgccctgaccgccaccaccccctacacccgctaccaccccatggactactactggtggctgcgaatgcagatcatgacccacttgcctggagccatctccgacatgatctacatccgctgaagagtctcgctgtggcctctgtcagggatccctggtggaaggggaggggagggaggaacccatatagtcaactcttgattatccacgtgtggattatccaccatgccaggaagacccataactggttttaacactaactagagggaatgacttctttgcatagtgagtgacttgggccttcacaaacagggtgtggagtggcaggcagaggcctctaaatctcagggcaaacatggtgaatctatctctccggagataatttcatacagagattttaagaaaacatctttatattaaaaacagatctcatttgatccttaagccagtctcatgaatgaaaaggacaggtttttttcttttgtaaatgaagcatttgcagcttaaagaggatgcatgaaataacccttttatcgcttataaatagtgccagttatgtgttcctgccacggctgtggaaatacttcacatttgcattccaggactgttttggatccatttgcccgagaatcttctgactaactctgtgtcctcatctgggcagcacacaccaagtgcccactggtacctctgcatgtccatggtgctgtgtgactggccagccagcagccagtgactcagagctggctgtatggagggggtgggaatgtttctggagatttttgtttttccagacacagtcttgctcagtcccctaggctggagtgcaatggcaccatctccgctcactgcaacctccgcctccctggttcaagcggttctcctgcctcagccttccaagtagctggggttataggcacccaccaccatgccgggctaatttttgtatttttagtagagatggggtttcaccatgttggctaggctggtcccgaactcccgacttcaagtgatccgcctgccttggcctcccaaagtgctgggattacaggcatgagatttttacttgagatttttccatcctcttttaggactcaggatagacttgtgtggaggtgctctctggctaaggggataagttgttactggtttgggtctgcttggttttgccttgggtggggccggtgtcgatggggcaggcttggcacgagcagtggtgccatggcagggcactgtggcatctcccctagcagtggatttggggtccctgcttgcctcacgtggtgcttacacacatgtacacacacacacacacacacacacacacacacaccttacacacatgtacacacacacacacacacacacacacacacacacacacacacacacacacacacacacacacacacacacacccctgttctgcagggcttcagcgtggccttcattcccgcctcgcctcggcctcttttcaattaagaagtgatgccacttgaggcagggtctgcatgatcacttcttgggtttcagtttgaaagctgccatccctgcgactgcccagggcctgtatgttgggaccgaagccaaacaccactgtcctccagggggctttcggcccggggcagggtccccagtgcccgccttcgaatcagactccgcgtttccgcctctccctgggcggacctgccgctagagggcgctcctcctccgcagccggcgccggcctccagcgccccagactcccgcgctgccgcccgagcctgaggtttctcacggcgttcgggattcgcgcttcggaaaccgggaacaaagaagcaagcagcacccttcagaaacagtgttctcgctctcctagcagctggcccgggcccggaggctggtgccaggagaaggcagaagagcccgggcagccggagtgggctacggggttcaggcagtgccaaggaagaagggcctcacaatgggcaattcagctgcctcccgggccgttgtccccgctgtcttcaaacaggggtcccctgtcccagctgccccaggaggagggggggaggcaggcagggccgaaaccctccagagcccagagggggacgcttggtggccgctgcagttacataaccataggatgcttttgtaccgtggaccttgttctagcaggatcctttcggaattgcacttttacatgttgggcgaatttgtgtccgtgctgaagtttattaaaggaaaatagatggagccttggagttgcacgtgtgcgtccctgcctgggaactagaggaaggagggccacatactctgggtccccatcagcagacccgaacgtcagagaagctgcatgtgcgtctactgggatcttctgagtaagctagaactgctgggccggcctgtgcaggttgttctggcttttaatcgtttccagtgattgaaaagcccaggctaccatccctccaaataactccagtgctaactcaaacctcatattcaccattcactttccggcagcttagaacctaccggggcgcaggacgtagttttcgtctttaccagagtgcgtggccgggcgcggtggctcacacctgtcatcccagcattttgggaggcccaggcggtcggatcgcctgaggtcaggagttcaagaccagcctggccaacgtggtgaaaccctgtctctactaaaagcacaaaaattagccaggcgtggtggtgggcgcctgtaaccccagctactcgggagggtgaggcagggagaatcgactgaacccagaggcagaggttgtagtgagccgagatcatgccactgcactccagcctgggcaacagagtgaggctctgtctcaaaaaacaaaacaacaacaacaaaacaaaaaaagagtgagaggacaaaacaggtgtatattcccattttatagatgacataactgaggcccaaagaaggaaagtgactcactcagtgtcacagtaaatccacggcaggaccagggccagaacaaaagtctcctgagtggcactcttcactatcacataacactgtggctcgcaacagccctggaagcaaagccagttggggtcaccaggcacctagaccctcactgcttgtctgctggcagagagccgctccttcttgtcagagtaagtaggaaggaggcctttgcctgtgcggacctatggtctggtgactccagccagcacaaacccatcccctgatggttggaggctgggcaagggcttcttgcaagatgcgcctgacagtgccttgttacagagcacctgctgtgcttagcattccacccggggccaagaggctgtgtgagcaggtgacagccagcctggccccgcctgtcacaagctgctaggtctgcacccttgccacccatggcagggggtctgacaaagactccccatttgtgaggtctgttcactgcctgtatttcgaacagggcctggctctgcaaacctgtgcaaactgtgttgatataggagccgacatgagcaagcagaggctcccctggctcaggcagccccaggttgggttggccagacagcaaccaggcacaggggccaagtgcaggtcctgctacccagccaccacagcttcctctcacctgattctcacagcaacccaggcaggataggcagggtggggttatcttattttgcagaaacaggctttcccaagtctgtcaccaagtgaggggtagagctgggtgtccagccagatctaacctccagcccagagctggtgatgcggaaaatcagggcagatggcagcaggatctaaaatagggagggaagaagtcctcagttacgtaacagcgaggagactctcagcctacgcacagtagcaaccatggggtcctgccactcgagccagaccctccttcccttcccgttttgggctctaagtgctgccccctgtgagagaatgtgctggaggagcccccagtatccttccagcgggaagtcggctctgtcaaggccattcccgagagcaggctctaggaattcaaagaccaagcaggcagagctggattctggagctgccctcaaagggcttgagggttatatgagcgccgtgcttgagaagttagtgatgatttctgctcaaagagacagagcaagagggctgaggggctctggtgctctgggggagatgaaacaaccccacagtatatgaggcctctctggtgtgtgcgggcactaaggaagggtgacttgcgagtggcgcattcggaggcacggggtgggcagctgttgagcaagggaccagggctgggacaggctgccaggacccccacaaccccaggggaggaaaggggactcagccatcatcatgcctgactcccaggctcccggatgaggagcctgctagccagggcttgaagccctccagtgacagggggtgcattacttcctaagaagccatttccttggttcagaaacgtttatccaaagactgagccgaaatctaccacctcacttaatgtttttggcacctggttatgacccagacctgcacagaataatttaactcttctgaaatagacttccagatatttggaagtggccaagtcaggtttaagagctcaggtctcccatttgacaagatttccatctcctcgctgtctgaacaggtttcagctgtggttatccaatccctcattcttgatgacacacaccaggctgaatggtctttagagttcccctcaagccgccaagcgctctgagacaggtttactagctttggtgagatgctgacactcctcacatgcacgtgcccctcccaactactcaagtgagttcgtggcaaatctctcatctgatctgcataaacggattatatcttaggcggtgccattgtctgcattttacaaataaggaaactgagcctcagggaggtgaagtcatttgcccaaaatcacagagccaggaaacgagagagccaagatccagaccccgcaagatccagaccccacaagatccagaccccgcaagatccagacccctcaagatatagaccctgcaagatccagacctcacaagatccagaccccacaagatccagacctcggctatctggcttctcttttttttgcgacagagtctcaatctgtcacccaggctggagcgcagtggtgtgatctcagctcactgcaacctctgcctcccaggttcaagcaattctcctgcctcagcctcccgagtagctgggatcacaggtgtgcgccatgcctggctaaatttttttttttttttttgtatttttagtagagatggggtttcgctatgttggccaagctggtctcgaacccctgacctcaggtgatccacctgcctcgacctctcagagtgctgggattacaggcgtgagccactgcacccagccccatctgacttctatacccgcagccccttcctttaccctcaggctgcctcagtctccacactggggcccagagctgggctggactcagcgcagtcagaacctcgccttgcacgtggcgaaggagcggcaggcaggcaggcaggcaggcaggcaagcaggacagccagcttcctcctagtccgcagtttcgcggagcagcctggaaagggaggcccaggcttccctgtctcgtcgcacgtgtgtctgcagtgtctgtgctatctcccaggggcctggatgtcgatggaatgcctgagggtggagagagctgtggctgaggcctaccctggcggcctcagcatctgtggagatgtgtagagacagggagagtgaatggggaccaacctcaggagatgctgggtcccagaagcaccatgtgcttctcctttggtgagacttaattactctctaaaatgtaaggctactcccacttatcaaattatagatgagtttaattacagcacactgagtaaccacactgggctccttcagaaatagcagcaggctggttgctcttctcagcttcagctgtagccaccccagtttcaggaggaagtgcccgtggttcctggggcctggaagtgccgctcaactctgctgccagacaagtgcgggcgtggtggactgcactgggtacactgctgtaccggccaccaccctccggccactctcagccggtgagtgctctgcggggccatctggccacgtgttctgtgactgggtcatttactctgctgcaacctctctttctcctacctacatcgtgttctggataaaggttttggctcataatgtccgaccagaggtggacaaagtggtgtgggacctgccgtaagaaacagggagcatggtgcggggagagaagcctgtgccttatggagactcggggcaccttcaggaagcagggtcaacagcagcaggccgctagggagtcgggagagctcggtgatgtcacgaggggcatcagactcttccctgcaggctggcgggactgatgggctctcgttccaatggaggtacaatgggacttccggggctgtgatgggaagggcggaggagctgccgatggtcccagtgccatattagtgtcacattctgaggggcagccctgtgccggacggcagctgctacctctccctctgcccctttattacttgaatctcttcgttgtgccctgtctaggcacggtcgtccgacagcaggcagcccactgccctcccagagctcactgtctagcccagggtgacacagggtaaccgtgggcatgacttgggccgggaagtgagaggctcgattccatcacatgtaaataaaaatactcattttcaatctaa

SEQ ID NO: 102701 - DNA, 868 bp, Homo sapiens; identical to SEQ ID NO: 102692
  Payload ID: 34
  Gene Symbol: BDH1
  Gene Name: 3-hydroxybutyrate dehydrogenase, type 1
  ENST ID: ENST00000625957
  CDS Start-End: 371-868

SEQ ID NO: 102702 - DNA, 1605 bp, Homo sapiens; identical to SEQ ID NO: 102698
  Payload ID: 34
  Gene Symbol: BDH1
  Gene Name: 3-hydroxybutyrate dehydrogenase, type 1
  ENST ID: ENST00000631323
  CDS Start-End: 534-1304

SEQ ID NO: 102703 - DNA, 845 bp, Homo sapiens
  Payload ID: 34
  Gene Symbol: BDH1
  Gene Name: 3-hydroxybutyrate dehydrogenase, type 1
  ENST ID: ENST00000630698
  CDS Start-End: 286-845
gcaggagagcgggcacctgcgcggcgccgggtgaaggcgagagcctcggcgagccctctgcagcggagccccctgcccatttggttttggccagtcagcctggaaatctgcctgtagtcagctgatgcagagtcaccctgcagttcctactttgaggggttgcagaagcacatatttcactatggagggccgcctgcaggcctcgcgctgacaggatcttttgtgacgctgcaaatgtcctgaaccaccgggaggaactgggccattctaacacccgttgctaccatgctggccacccgcctctccagacccctgtcacggctcccaggaaaaaccctaagtgcctgtgatagagaaaatggagcaagacgcccactattgcttggttctacttcctttatcccgattggccgtcggacttatgccagtgcggcggagccggttggcagcaaagctgtcctggtcacaggctgtgactctggatttgggttctcattggccaagcatctgcattcaaaaggcttccttgtgtttgctggctgcttgatgaaggacaaaggccatgatggggtcaaggagctggacagcctaaacagtgaccgattgagaaccgtccagctcaatgtctgcagcagcgaagaggtggagaaagtggtggagattgtccgctcgagcctgaaggaccctgagaaaggcatgtggggcctcgttaacaatgccggcatctcaacgttcggggaggtggagttcaccagcctggagacctacaagcaggtggcagaagtgaacctttggggcacagtgcggatgacgaaatcctttctccccctcatccgaagggccaa

SEQ ID NO: 102704 - DNA, 658 bp, Homo sapiens
  Payload ID: 34
  Gene Symbol: BDH1
  Gene Name: 3-hydroxybutyrate dehydrogenase, type 1
  ENST ID: ENST00000629309
  CDS Start-End: 154-658
ggctactcaggaggctgaggcaggagaatcgcttgaacccaggaggcggaggttgcagtgagctgagatcgtgtcactgcactccagcctgggcaacaagagtgaaactctgtctcaaaaacaaaacaaaacaaaacaaaaaacaaaatttgaatggcgtcaaatggtatacagaaaagacgcccactattgcttggttctacttcctttatcccgattggccgtcggacttatgccagtgcggcggagccggttggcagcaaagctgtcctggtcacaggctgtgactctggatttgggttctcattggccaagcatctgcattcaaaaggcttccttgtgtttgctggctgcttgatgaaggacaaaggccatgatggggtcaaggagctggacagcctaaacagtgaccgattgagaaccgtccagctcaatgtctgcagcagcgaagaggtggagaaagtggtggagattgtccgctcgagcctgaaggaccctgagaaaggcatgtggggcctcgttaacaatgccggcatctcaacgttcggggaggtggagttcaccagcctggagacctacaagcaggtggcagaagtgaacctttggggcacagtgcggatgacgaaatcctttctccccctcatccgaagggccaaag

SEQ ID NO: 102705 - DNA, 949 bp, Homo sapiens
  Payload ID: 34
  Gene Symbol: BDH1
  Gene Name: 3-hydroxybutyrate dehydrogenase, type 1
  ENST ID: ENST00000626799
  CDS Start-End: 388-949
ccgggtggcggaggccgcaggccgcaggagtgctggtggaggggcttccagaaagaccctgcggcagcgccccccctcggctctccccgcaggagagcgggcacctgcgcggcgccgggtgaaggcgagagcctcggcgagccctctgcagcggagccccctgcccatttggttttgggcaggaggaggccctgggttaaacacgcggccctgcagctcccaggtgaaacgactcatcgtttcctgccggcgcatcttactgaaggggacccaggccccacgaagggaaggaaccgtcctcaaggtcacgtcgtagtcaaaggccgagcccagaccgaagccagaaccaccgggaggaactgggccattctaacacccgttgctaccatgctggccacccgcctctccagacccctgtcacggctcccaggaaaaaccctaagtgcctgtgatagagaaaatggagcaagacgcccactattgcttggttctacttcctttatcccgattggccgtcggacttatgccagtgcggcggagccggttggcagcaaagctgtcctggtcacaggctgtgactctggatttgggttctcattggccaagcatctgcattcaaaaggcttccttgtgtttgctggctgcttgatgaaggacaaaggccatgatggggtcaaggagctggacagcctaaacagtgaccgattgagaaccgtccagctcaatgtctgcagcagcgaagaggtggagaaagtggtggagattgtccgctcgagcctgaaggaccctgagaaaggcatgtggggcctcgttaacaatgccggcatctcaacgttcggggaggtggagttcaccagcctggagacctacaagcaggtggcagaagtgaacctttggggcacagtgcggatgacgaaatcctttctccccctcatccgaagggccaaag

SEQ ID NO: 102706 - DNA, 310 bp, Homo sapiens
  Payload ID: 34
  Gene Symbol: BDH1
  Gene Name: 3-hydroxybutyrate dehydrogenase, type 1
  ENST ID: ENST00000627658
  CDS Start-End: 44-310
aaccaccgggaggaactgggccattctaacacccgttgctaccatgctggccacccgcctctccagacccctgtcacggctcccaggaaaaaccctaagtgcctgtgatagagaaaatggagcaagacgcccactattgcttggttctacttcctttatcccgattggccgtcggacttatgccagtgcggcggagccggttggcagcaaagctgtcctggtcacaggctgtgactctggatttgggttctcattggccaagcatctgcattcaaaaggcttccttgtgtttgctggctgcttgatgaag

SEQ ID NO: 102707 - DNA, 1126 bp, Homo sapiens
  Payload ID: 35
  Gene Symbol: BDH2
  Gene Name: 3-hydroxybutyrate dehydrogenase, type 2
  Uniprot ID: Q9BUT1
  ENST ID: ENST00000296424
  CDS Start-End: 122-859
agcatgcattattaagcgcttgacttgcttccagacaaaggttgtctcaagtttgttgctcaaaccgagttctggagaacgccatcagctcgctgcttaaaattaaaccacaggttccattatgggtcgacttgatgggaaagtcatcatcctgacggccgctgctcaggggattggccaagcagctgccttagcttttgcaagagaaggtgccaaagtcatagccacagacattaatgagtccaaacttcaggaactggaaaagtacccgggtattcaaactcgtgtccttgatgtcacaaagaagaaacaaattgatcagtttgccaatgaagttgagagacttgatgttctctttaatgttgctggttttgtccatcatggaactgtcctggattgtgaggagaaagactgggacttctcgatgaatctcaatgtgcgcagcatgtacctgatgatcaaggcattccttcctaaaatgcttgctcagaaatctggcaatattatcaacatgtcttctgtggcttccagcgtcaaaggagttgtgaacagatgtgtgtacagcacaaccaaggcagccgtgattggcctcacaaaatctgtggctgcagatttcatccagcagggcatcaggtgcaactgtgtgtgcccaggaacagttgatacgccatctctacaagaaagaatacaagccagaggaaatcctgaagaggcacggaatgatttcctgaagagacaaaagacgggaagattcgcaactgcagaagaaatagccatgctctgcgtgtatttggcttctgatgaatctgcttatgtaactggtaaccctgtcatcattgatggaggctggagcttgtgattttaggatctccatggtgggaaggaaggcaggcccttcctatccacagtgaacctggttacgaagaaaactcaccaatcatctccttcctgttaatcacatgttaatgaaaataagctctttttaatgatgtcactgtttgcaagagtctgattctttaagtatattaatctctttgtaatctcttctgaaatcattgtaaagaaataaaaatattgaactcatagcaggagaatagtttttaaaataaatctcgatttgttagca

SEQ ID NO: 102708 - DNA, 582 bp, Homo sapiens
  Payload ID: 35
  Gene Symbol: BDH2
  Gene Name: 3-hydroxybutyrate dehydrogenase, type 2
  ENST ID: ENST00000511354
  CDS Start-End: 68-340
gttgctcaaaccgagttctggagaacgccatcagctcgctgcttaaaattaaaccacaggttccattatgggtcgacttgatgggaaagtcatcatcctgacggccgctgctcaggggattggccaagcagctgccttagcttttgcaagagaaggtgccaaagtcatagccacagacattaatgagtccaaacttcaggaactggaaaagtacccgggtattcaaactcgtgtccttgatgtcacaaagaagaaacaaattgatcagtttgccaatgaagttgagagacttgatgttctctttaatgttgctggggtttgtcttggttccccaggctagagggcagtggaatgatcatagctcactgcatcctaaaactcctgggctcaagtggtcctcttgcctcagccttcaaagtagctgaggctgcagttttgtccatcatggaactgtcctggattgtgaggagaaagactgggacttctcgatgaatctcaatgtgcgcagcatgtacctgatgatcaaggcattccttcctaaaatgcttgctcagaaatctggcaatattatcaacatgtctt

SEQ ID NO: 102709 - DNA, 616 bp, Homo sapiens
  Payload ID: 35
  Gene Symbol: BDH2
  Gene Name: 3-hydroxybutyrate dehydrogenase, type 2
  ENST ID: ENST00000509245
  CDS Start-End: 268-616
aagcgcttgacttgcttccagacaaaggttgtctcaagtttgttgctcaaaccgagttctggagaacgccatcagctcgctgcttaaagggaaatgctgttgtgagagagaatgaggagagaactaggtaaggctgtgagagccatcagacctcgatgcaagtccacccgcgagggaggaaaagaaggaaaccaggttgagtggaagcatcccagacagctgtgcagtctaagagaacttcagcaagattaaaccacaggttccattatgggtcgacttgatgggaaagtcatcatcctgacggccgctgctcaggggattggccaagcagctgccttagcttttgcaagagaaggtgccaaagtcatagccacagacattaatgagtccaaacttcaggaactggaaaagtacccgggtattcaaactcgtgtccttgatgtcacaaagaagaaacaaattgatcagtttgccaatgaagttgagagacttgatgttctctttaatgttgctggttttgtccatcatggaactgtcctggattgtgaggagaaagactgggacttctcgatgaatctcaatgtgcgcagcatgtacctgatgatcaaggcattcc

SEQ ID NO: 102710 - DNA, 550 bp, Homo sapiens
  Payload ID: 35
  Gene Symbol: BDH2
  Gene Name: 3-hydroxybutyrate dehydrogenase, type 2
  ENST ID: ENST00000506521
  CDS Start-End: 109-303
aagcgcttgacttgcttccagacaaaggttgtctcaagtttgttgctcaaaccgagttctggagaacgccatcagctcgctgcttaaaattaaaccacaggttccattatgggtcgacttgatgggaaagtcatcatcctgacggccgctgctcaggggattggccaagcagctgccttagcttttgcaagagaaggtgccaaagtcatagccacagacattaatgagtccaaacttcaggaactggaaaagtacccggtgcctcttgttttatttttcaggtattcaaactcgtgtccttgatgtcacaaagaagaaacaaattgatcagtttgccaatgaagttgagagacttgatgttctctttaatgttgctggttttgtccatcatggaactgtcctggattgtgaggagaaagactgggacttctcgatgaatctcaatgtgcgcagcatgtacctgatgatcaaggcattccttcctaaaatgcttgctcagaaatctggcaatattatcaacatgtcttctgtggcttccagcgtcaaaggt

SEQ ID NO: 102711 - DNA, 578 bp, Homo sapiens
  Payload ID: 35
  Gene Symbol: BDH2
  Gene Name: 3-hydroxybutyrate dehydrogenase, type 2
  ENST ID: ENST00000504285
  CDS Start-End: 187-578
gttgctcaaaccgagttctggagaacgccatcagctcgctgcttaaactggaaacaaaagtctcaacttccaacctctttgcagctaggagtggccaagtagcatagatctggtgaatgaactgcaggtgggaatttctgagaaggtttccttcttaaatagaaagattaaaccacaggttccattatgggtcgacttgatgggaaagtcatcatcctgacggccgctgctcaggggattggccaagcagctgccttagcttttgcaagagaaggtgccaaagtcatagccacagacattaatgagtccaaacttcaggaactggaaaagtacccgggtattcaaactcgtgtccttgatgtcacaaagaagaaacaaattgatcagtttgccaatgaagttgagagacttgatgttctctttaatgttgctggttttgtccatcatggaactgtcctggattgtgaggagaaagactgggacttctcgatgaatctcaatgtgcgcagcatgtacctgatgatcaaggcattccttcctaaaatgcttgctcagaaatctggcaatattatcaacat

SEQ ID NO: 102712 - DNA, 1990 bp, Homo sapiens
  Payload ID: 36
  Gene Symbol: HIBADH
  Gene Name: 3-hydroxyisobutyrate dehydrogenase
  Uniprot ID: P31937
  ENST ID: ENST00000265395
  CDS Start-End: 208-1218
ggattgacaggccctgccgcgtcaggccgctcctctcggctccgcgctccttccctcgcgcgtgggcacccgcccccgagcggtgagagcgcgtgcgcgcgcgcccttctccgtgggcgagccagccagtcccgctgcacacgctcgcagtctgtgggccctccgggaggcggcggaggtcaccgcggggagaggggcgggcgcagcatggcagcctccttacggctcctcggagctgcctccggtctccggtactggagccggcggctgcggccggcagccggcagctttgcagcggtgtgttctaggtcagtggcttcaaagactccagttggattcattggactgggcaacatggggaatccaatggcaaaaaatctcatgaaacatggctatccacttattatttatgatgtgttccctgatgcctgcaaagagtttcaagatgcaggtgaacaggtagtatcttccccagcagatgttgctgaaaaagctgacagaattattacaatgctgcccaccagtatcaatgcaatagaagcttattccggagcaaatgggattctaaaaaaagtgaagaagggctcattattaatagattccagcactattgatcctgcagtttcaaaagaattggccaaagaagttgagaaaatgggagcagttttcatggatgcccctgtttctggtggtgtaggagctgcacgatctgggaacctcacgtttatggtgggaggagttgaagatgaatttgctgctgcccaagagttgctggggtgcatgggctccaacgtggtgtactgtggagctgttgggactgggcaggcggcaaagatctgcaacaacatgctgttagctattagtatgattggaactgctgaagctatgaatcttggaatcaggttagggcttgacccaaaactactggctaaaatcctaaatatgagctcaggacggtgttggtcaagtgacacttataatcctgtacctggagtgatggatggcgttccctcggctaataactatcagggtggatttggaacaacactcatggctaaggatctgggattggcacaagactctgctaccagcacaaagagcccaatccttcttggcagtctggcccatcagatctacaggatgatgtgtgcaaagggctactcaaagaaagacttctcatccgtgttccagttcctacgagaggaggagaccttctgagtgtgccctttggccacggacactgttgggaaccaaactctgtcttggagcctccttttagctcactccacaagtaaatggatttaatcaaaggtcacctatctgcttttgattgtctaggtcacagtaatccctaggatttttcaccgcttattctttttgtctttttaacaaacatattatccgaattttttttctgcaagccactgatagtctctgctaactagcttaattgacctttttacaaagtttgatccccaagcatcctcaactaaatcattgaatacttcaatcaggatattatctgctttactttacaaataaaaccaaatcttttgtcaacaggatgaaacccatcttaaaggaaagaaaaggaattggtgtgaagagagaagttagagaagggaaatgcagtgaattactatctgtgtccatcaggaagtttgtcctgttaaccaaatggttactgcactaccagggttactggtttattttccagggagctgataaagcaggagaactgttgctgcatgttttctatttggactccgtcacaatatggtaggatatccctcaccaactcccgacactcagcagacttgtttttatatttttttctttcttgttcattcttactacgtattttttgacttaagaatgacatctttagatgcatttcagagccaatgatgatatttgctttagataattattatattattataaatatagccatattattttgaattcaaataaatttctatactggtaa

SEQ ID NO: 102713 - DNA, 618 bp, Homo sapiens
  Payload ID: 36
  Gene Symbol: HIBADH
  Gene Name: 3-hydroxyisobutyrate dehydrogenase
  ENST ID: ENST00000425715
  CDS Start-End: 1-618
ctgaattacctcatactctgaagttaccaggcttacctctgtttcccaacaagtttcttatttctttagtgttgctaattttagtatcttccccagcagatgttgctgaaaaagctgacagaattattacaatgctgcccaccagtatcaatgcaatagaagcttattccggagcaaatgggattctaaaaaaagtgaagaagggctcattattaatagattccagcactattgatcctgcagtttcaaaagaattggccaaagaagttgagaaaatgggagcagttttcatggatgcccctgtttctggtggtgtaggagctgcacgatctgggaacctcacgtttatggtgggaggagttgaagatgaatttgctgctgcccaagagttgctggggtgcatgggctccaacgtggtgtactgtggagctgttgggactgggcaggcggcaaagatctgcaacaacatgctgttagctattagtatgattggaactgctgaagctatgaatcttggaatcaggttagggcttgacccaaaactactggctaaaatcctaaatatgagctcaggacggtgttggtcaagtgacacttataatcctgtacctggagtga

SEQ ID NO: 102714 - DNA, 1669 bp, Homo sapiens
  Payload ID: 36
  Gene Symbol: HIBADH
  Gene Name: 3-hydroxyisobutyrate dehydrogenase
  ENST ID: ENST00000428288
  CDS Start-End: 81-200
agtcccgctgcacacgctcgcagtctgtgggccctccgggaggcggcggaggtcaccgcggggagaggggcgggcgcagcatggcagcctccttacggctcctcggagctgcctccggtctccggtactggagccggcggctgcggccggcagccggcagctttgcagcgggtagtatcttccccagcagatgttgctgaaaaagctgacagaattattacaatgctgcccaccagtatcaatgcaatagaagcttattccggagcaaatgggattctaaaaaaagtgaagaagggctcattattaatagattccagcactattgatcctgcagtttcaaaagaattggccaaagaagttgagaaaatgggagcagttttcatggatgcccctgtttctggtggtgtaggagctgcacgatctgggaacctcacgtttatggtgggaggagttgaagatgaatttgctgctgcccaagagttgctggggtgcatgggctccaacgtggtgtactgtggagctgttgggactgggcaggcggcaaagatctgcaacaacatgctgttagctattagtatgattggaactgctgaagctatgaatcttggaatcaggttagggcttgacccaaaactactggctaaaatcctaaatatgagctcaggacggtgttggtcaagtgacacttataatcctgtacctggagtgatggatggcgttccctcggctaataactatcagggtggatttggaacaacactcatggctaaggatctgggattggcacaagactctgctaccagcacaaagagcccaatccttcttggcagtctggcccatcagatctacaggatgatgtgtgcaaagggctactcaaagaaagacttctcatccgtgttccagttcctacgagaggaggagaccttctgagtgtgccctttggccacggacactgttgggaaccaaactctgtcttggagcctccttttagctcactccacaagtaaatggatttaatcaaaggtcacctatctgcttttgattgtctaggtcacagtaatccctaggatttttcaccgcttattctttttgtctttttaacaaacatattatccgaattttttttctgcaagccactgatagtctctgctaactagcttaattgacctttttacaaagtttgatccccaagcatcctcaactaaatcattgaatacttcaatcaggatattatctgctttactttacaaataaaaccaaatcttttgtcaacaggatgaaacccatcttaaaggaaagaaaaggaattggtgtgaagagagaagttagagaagggaaatgcagtgaattactatctgtgtccatcaggaagtttgtcctgttaaccaaatggttactgcactaccagggttactggtttattttccagggagctgataaagcaggagaactgttgctgcatgttttctatttggactccgtcacaatatggtaggatatccctcaccaactcccgacactcagcagacttgtttttatatttttttctttcttgttcattcttactacgtattttttgacttaagaatgacatctttagatgcatttcagagccaatgatgatatttgctttagataattattatattattataaatatagccatatt

SEQ ID NO: 102715 - DNA, 1939 bp, Homo sapiens
  Payload ID: 37
  Gene Symbol: HIBCH
  Gene Name: 3-hydroxyisobutyryl-CoA hydrolase
  Uniprot ID: Q6NVY1
  ENST ID: ENST00000359678
  CDS Start-End: 296-1456
cctgcgaatccgccctagtccgttctatcctccctcttcccgctccgcctcagctcgctctccgccttctccctggcccggtccccgatcccttcctctccctcaactatttcctccaggcgtcgttcttgccccgcccttccccgtcgcgtagcggaaacggtcgctctggcttcctggaggacttgtcatctgtgcccggcggcgcaggacggcggtgggcggggctcacgcgaggcgctggaacggtccgggagattctcgctctgctgctttagcttcggagtgtttggcgatggggcagcgcgagatgtggaggctcatgtcgaggtttaatgcattcaaaaggactaataccatactgcaccatttgagaatgtccaagcacacagatgcagcagaagaggtgctattggaaaaaaaaggttgcacgggagtcataacactaaacagaccaaagttcctcaatgcactgactcttaatatgattcggcagatttatccacagctaaagaagtgggaacaagatcctgaaactttcctgatcattataaagggagcaggaggaaaggctttctgtgccgggggtgatatcagagtgatctcggaagctgaaaaggcaaaacagaagatagctccagttttcttcagagaagaatatatgctgaataatgctgttggttcttgccagaaaccttatgttgcacttattcatggaattacaatgggtgggggagttggtctctcagtccatgggcaatttcgagtggctacagaaaagtgtctttttgctatgccagaaactgcaataggactgttccctgatgtgggtggaggttatttcttgccacgactccaaggaaaacttggttacttccttgcattaacaggattcagactaaaaggaagagatgtgtacagagcaggaattgctacacactttgtagattctgaaaagttggccatgttagaggaagatttgttagccttgaaatctccttcaaaagaaaatattgcatctgtcttagaaaattaccatacagagtctaagattgatcgagacaagtcttttatacttgaggaacacatggacaaaataaacagttgtttttcagccaatactgtggaagaaattattgaaaacttacagcaagatggttcatcttttgccctagagcaattgaaggtaattaataaaatgtctccaacatctctaaagatcacactaaggcaactcatggaggggtcttcaaagaccttgcaagaagtactaactatggagtatcggctaagtcaagcttgtatgagaggtcatgactttcatgaaggcgttagagctgttttaattgataaagaccagagtccaaaatggaaaccagctgatctaaaagaagttactgaggaagatttgaataatcactttaagtctttgggaagcagtgatttgaaattttgaggtgacaggcttttaaggtatattttgtagcatgggttggcaatctacagcatgtgggccaaatccagcctgctgcctgtttttatataccctgtaagctaagaatggtttccgcatttttaaatggttgggaaaagaaatcaaagactaataattcatgacgtgaaaattatcagaattcacaaataaagctttattggaactagctatactcatctgtttatatattatctgtggctgctttgaaatgagtagttgcaatagagatggtaaagcctacaaagcctaattatttactgtctggtttttgtcagaaaaaagtttgtcaatccttgttttagaagatggaaaaatgtgaagatctttggagattctcttgagtggtatatctaattgaaatgggatcttcgtttggcttgtatgttgatgaaatcaacttaggtatacaatataaaaaataaagaccctgaaaattgttttgga

SEQ ID NO: 102716 - DNA, 2463 bp, Homo sapiens
  Payload ID: 37
  Gene Symbol: HIBCH
  Gene Name: 3-hydroxyisobutyryl-CoA hydrolase
  Uniprot ID: Q6NVY1
  ENST ID: ENST00000392332
  CDS Start-End: 141-1157
ggaaacggtcgctctggcttcctggaggacttgtcatctgtgcccggcggcgcaggacggcggtgggcggggctcacgcgaggcgctggaacggtccgggagattctcgctctgctgctttagcttcggagtgtttggcgatggggcagcgcgagatgtggaggctcatgtcgaggtttaatgcattcaaaaggactaataccatactgcaccatttgagaatgtccaagcacacagatgcagcagaagaggtgctattggaaaaaaaaggttgcacgggagtcataacactaaacagaccaaagttcctcaatgcactgactcttaatatgattcggcagatttatccacagctaaagaagtgggaacaagatcctgaaactttcctgatcattataaagggagcaggaggaaaggctttctgtgccgggggtgatatcagagtgatctcggaagctgaaaaggcaaaacagaagatagctccagttttcttcagagaagaatatatgctgaataatgctgttggttcttgccagaaaccttatgttgcacttattcatggaattacaatgggtgggggagttggtctctcagtccatgggcaatttcgagtggctacagaaaagtgtctttttgctatgccagaaactgcaataggactgttccctgatgtgggtggaggttatttcttgccacgactccaaggaaaacttggttacttccttgcattaacaggattcagactaaaaggaagagatgtgtacagagcaggaattgctacacactttgtagattctgaaaagttggccatgttagaggaagatttgttagccttgaaatctccttcaaaagaaaatattgcatctgtcttagaaaattaccatacagagtctaagattgatcgagacaagtcttttatacttgaggaacacatggacaaaataaacagttgtttttcagccaatactgtggaagaaattattgaaaacttacagcaagatggttcatcttttgccctagagcaattgaaggtaattaataaaatgtctccaacatctctaaagatcacactaaggcaactcatggaggggtcttcaaagaccttgcaagaagtactaactatggagtatcggctaagtcaagcttgtatgttttaattgataaagaccagagtccaaaatggaaaccagctgatctaaaagaagttactgaggaagatttgaataatcactttaagtctttgggaagcagtgatttgaaattttgaggtgacaggcttttaaggtatattttgtagcatgggttggcaatctacagcatgtgggccaaatccagcctgctgcctgtttttatataccctgtaagctaagaatggtttccgcatttttaaatggttgggaaaagaaatcaaagactaataattcatgacgtgaaaattatcagaattcacaaataaagctttattggaactagctatactcatctgtttatatattatctgtggctgctttgaaatgagtagttgcaatagagatggtaaagcctacaaagcctaattatttactgtctggtttttgtcagaaaaaagtttgtcaatccttgttttagaagatggaaaaatgtgaagatctttggagattctcttgagtggtatatctaattgaaatgggatcttcgtttggcttgtatgttgatgaaatcaacttaggtatacaatataaaaaataaagaccctgaaaattgttttggatactgtgttaatgcctcatagaatttttgttttggatactgtgttaatgcctcatagaattttctccatatatgagtgtgttttaaagtaactgagttactgtagcagaagagctccttttataaacattagaaaccttgggcagagagaaaagatttttattaacgtccctcttcagtattaactcagacttggtcttccctaaaataatcagaataccatcccatggtgaaactgaaaggattattttcttgttatttgtgatatttgttaatctggtagaatgagaaattaggaaactccaatctcttagatagagacactctgtttttttataatttacgtaagacttttgtgtgataattatccttacaaacaaggttcaagtcaggagaaaaaaattaattgaaagcaagaagacttttgttcaaaagatatattcaataattgatattgttaatgaagtaagtactttttaaggtatgaaagaactaaaaggtattccagactcagaaccttaaagttctaggcaagaataatttttaaactaaaggtaagtttataaattaacaaagtaaacaaaatttatgattttgttttttgtttgtaatttttgtttaattttaaaggtaagtttataaattaacaaacaaaatttataattttttgtttgtaatttttgtttataaacaaaataaattttttgtaacttg

SEQ ID NO: 102717 - DNA, 493 bp, Homo sapiens
  Payload ID: 37
  Gene Symbol: HIBCH
  Gene Name: 3-hydroxyisobutyryl-CoA hydrolase
  ENST ID: ENST00000392333
  CDS Start-End: 1-209
tgatctcggaagctgaaaaggcaaaacagaagatagctccagttttcttcagagaagaatatatgctgaataatgctgttggttcttgccagaaaccttatgttgcacttattcatggaattacaatgggtggggactgttccctgatgtgggtggaggttatttcttgccacgactccaaggaaaacttggttacttccttgcattaacaggattcagactaaaaggaagagatgtgtacagagcaggaattgctacacactttgtagattctgaaaagttggccatgttagaggaagatttgttagccttgaaatctccttcaaaagaaaatattgcatctgtcttagaaaattaccatacagagtctaagattgatcgagacaagtcttttatacttgaggaacacatggacaaaataaacagttgtttttcagccaatactgtggaagaaattattgaaaacttacagcaagatggttcatcttttgcc
